United States Patent Application Publication US 2022/0211838 A1 - sequence listing, part 8

SEQ ID NO: 11702 - RNA, 3822 nt, Artificial Sequence
  SARS-CoV-2/2019-nCoV/USA-CruiseA-18/2020__MT159716.1 spike protein CDS wt (1-1273)
auguuuguuuuucuuguuuuauugccacuagucucuagucaguguguuaaucuuacaaccagaacucaauuacccccugcauacacuaauucuuucacacgugguguuuauuacccugacaaaguuuucagauccucaguuuuacauucaacucaggacuuguucuuaccuuucuuuuccaauguuacuugguuccaugcuauacaugucucugggaccaaugguacuaagagguuugauaacccuguccuaccauuuaaugaugguguuuauuuugcuuccacugagaagucuaacauaauaagaggcuggauuuuugguacuacuuuagauucgaagacccagucccuacuuauuguuaauaacgcuacuaauguuguuauuaaagucugugaauuucaauuuuguaaugauccauuuuuggguguuuauuaccacaaaaacaacaaaaguuggauggaaagugaguuaagaguuuauucuagugcgaauaauugcacuuuugaauaugucucucagccuuuucuuauggaccuugaaggaaaacaggguaauuucaaaaaucuuagggaauuuguguuuaagaauauugaugguuauuuuaaaauauauucuaagcacacgccuauuaauuuagugcgugaucucccucaggguuuuucggcuuuagaaccauugguagauuugccaauagguauuaacaucacuagguuucaaacuuuacuugcuuuacauagaaguuauuugacuccuggugauucuucuucagguuggacagcuggugcugcagcuuauuauguggguuaucuucaaccuaggacuuuucuauuaaaauauaaugaaaauggaaccauuacagaugcuguagacugugcacuugacccucucucagaaacaaaguguacguugaaauccuucacuguagaaaaaggaaucuaucaaacuucuaacuuuagaguccaaccaacagaaucuauuguuagauuuccuaauauuacaaacuugugcccuuuuggugaaguuuuuaacgccaccagauuugcaucuguuuaugcuuggaacaggaagagaaucagcaacuguguugcugauuauucuguccuauauaauuccgcaucauuuuccacuuuuaaguguuauggagugucuccuacuaaauuaaaugaucucugcuuuacuaaugucuaugcagauucauuuguaauuagaggugaugaagucagacaaaucgcuccagggcaaacuggaaagauugcugauuauaauuauaaauuaccagaugauuuuacaggcugcguuauagcuuggaauucuaacaaucuugauucuaagguuggugguaauuauaauuaccuguauagauuguuuaggaagucuaaucucaaaccuuuugagagagauauuucaacugaaaucuaucaggccgguagcacaccuuguaaugguguugaagguuuuaauuguuacuuuccuuuacaaucauaugguuuccaacccacuaaugguguugguuaccaaccauacagaguaguaguacuuucuuuugaacuucuacaugcaccagcaacuguuuguggaccuaaaaagucuacuaauuugguuaaaaacaaaugugucaauuucaacuucaaugguuuaacaggcacagguguucuuacugagucuaacaaaaaguuucugccuuuccaacaauuuggcagagacauugcugacacuacugaugcuguccgugauccacagacacuugagauucuugacauuacaccauguucuuuugguggugucaguguuauaacaccaggaacaaauacuucuaaccagguugcuguucuuuaucaggauguuaacugcacagaagucccuguugcuauucaugcagaucaacuuacuccuacuuggcguguuuauucuacagguucuaauguuuuucaaacacgugcaggcuguuuaauaggggcugaacaugucaacaacucauaugagugugacauacccauuggugcagguauaugcgcuaguuaucagacucagacuaauucuccucggcgggcacguaguguagcuagucaauccaucauugccuacacuaugucacuuggugcagaaaauucaguugcuuacucuaauaacucuauugccauacccacaaauuuuacuauuaguguuaccacagaaauucuaccagugucuaugaccaagacaucaguagauuguacaauguacauuuguggugauucaacugaaugcagcaaucuuuuguugcaauauggcaguuuuuguacacaauuaaaccgugcuuuaacuggaauagcuguugaacaagacaaaaacacccaagaaguuuuugcacaagucaaacaaauuuacaaaacaccaccaauuaaagauuuuggugguuuuaauuuuucacaaauauuaccagauccaucaaaaccaagcaagaggucauuuauugaagaucuacuuuucaacaaagugacacuugcagaugcuggcuucaucaaacaauauggugauugccuuggugauauugcugcuagagaccucauuugugcacaaaaguuuaacggccuuacuguuuugccaccuuugcucacagaugaaaugauugcucaauacacuucugcacuguuagcggguacaaucacuucugguuggaccuuuggugcaggugcugcauuacaaauaccauuugcuaugcaaauggcuuauagguuuaaugguauuggaguuacacagaauguucucuaugagaaccaaaaauugauugccaaccaauuuaauagugcuauuggcaaaauucaagacucacuuucuuccacagcaagugcacuuggaaaacuucaagauguggucaaccaaaaugcacaagcuuuaaacacgcuuguuaaacaacuuagcuccaauuuuggugcaauuucaaguguuuuaaaugauauccuuucacgucuugacaaaguugaggcugaagugcaaauugauagguugaucacaggcagacuucaaaguuugcagacauaugugacucaacaauuaauuagagcugcagaaaucagagcuucugcuaaucuugcugcuacuaaaaugucagaguguguacuuggacaaucaaaaagaguugauuuuuguggaaagggcuaucaucuuauguccuucccucagucagcaccucaugguguagucuucuugcaugugacuuaugucccugcacaagaaaagaacuucacaacugcuccugccauuugucaugauggaaaagcacacuuuccucgugaaggugucuuuguuucaaauggcacacacugguuuguaacacaaaggaauuuuuaugaaccacaaaucauuacuacagacaacacauuugugucugguaacugugauguuguaauaggaauugucaacaacacaguuuaugauccuuugcaaccugaauuagacucauucaaggaggaguuagauaaauauuuuaagaaucauacaucaccagauguugauuuaggugacaucucuggcauuaaugcuucaguuguaaacauucaaaaagaaauugaccgccucaaugagguugccaagaauuuaaaugaaucucucaucgaucuccaagaacuuggaaaguaugagcaguauauaaaauggccaugguacauuuggcuagguuuuauagcuggcuugauugccauaguaauggugacaauuaugcuuugcuguaugaccaguugcuguaguugucucaagggcuguuguucuuguggauccugcugcaaauuugaugaagacgacucugagccagugcucaaaggagucaaauuacauuacacauaa

SEQ ID NO: 11703 - RNA, 3822 nt, Artificial Sequence
  SARS-CoV-2/SARS-CoV-2/Yunnan-01/human/2020/CHN__MT049951.1 spike protein CDS wt (1-1273)
auguuuguuuuucuuguuuuauugccacuagucucuagucaguguguuaaucuuacaaccagaacucaauuacccccugcaaacacuaauucuuucacacgugguguuuauuacccugacaaaguuuucagauccucaguuuuacauucaacucaggacuuguucuuaccuuucuuuuccaauguuacuugguuccaugcuauacaugucucugggaccaaugguacuaagagguuugauaacccuguccuaccauuuaaugaugguguuuauuuugcuuccacugagaagucuaacauaauaagaggcuggauuuuugguacuacuuuagauucgaagacccagucccuacuuauuguuaauaacgcuacuaauguuguuauuaaagucugugaauuucaauuuuguaaugauccauuuuuggguguuuauuaccacaaaaacaacaaaaguuggauggaaagugaguucagaguuuauucuagugcgaauaauugcacuuuugaauaugucucucagccuuuucuuauggaccuugaaggaaaacaggguaauuucaaaaaucuuagggaauuuguguuuaagaauauugaugguuauuuuaaaauauauucuaagcacacgccuauuaauuuagugcgugaucucccucaggguuuuucggcuuuagaaccauugguagauuugccaauagguauuaacaucacuagguuucaaacuuuacuugcuuuacauagaaguuauuugacuccuggugauucuucuucagguuggacagcuggugcugcagcuuauuauguggguuaucuucaaccuaggacuuuucuauuaaaauauaaugaaaauggaaccauuacagaugcuguagacugugcacuugacccucucucagaaacaaaguguacguugaaauccuucacuguagaaaaaggaaucuaucaaacuucuaacuuuagaguccaaccaacagaaucuauuguuagauuuccuaauauuacaaacuugugcccuuuuggugaaguuuuuaacgccaccagauuugcaucuguuuaugcuuggaacaggaagagaaucagcaacuguguugcugauuauucuguccuauauaauuccgcaucauuuuccacuuuuaaguguuauggagugucuccuacuaaauuaaaugaucucugcuuuacuaaugucuaugcagauucauuuguaauuagaggugaugaagucagacaaaucgcuccagggcaaacuggaaagauugcugauuauaauuauaaauuaccagaugauuuuacaggcugcguuauagcuuggaauucuaacaaucuugauucuaagguuggugguaauuauaauuaccuguauagauuguuuaggaagucuaaucucaaaccuuuugagagagauauuucaacugaaaucuaucaggccgguagcacaccuuguaaugguguugaagguuuuaauuguuacuuuccuuuacaaucauaugguuuccaacccacuaaugguguugguuaccaaccauacagaguaguaguacuuucuuuugaacuucuacaugcaccagcaacuguuuguggaccuaaaaagucuacuaauuugguuaaaaacaaaugugucaauuucaacuucaaugguuuaacaggcacagguguucuuacugagucuaacaaaaaguuucugccuuuccaacaauuuggcagagacauugcugacacuacugaugcuguccgugauccacagacacuugagauucuugacauuacaccauguucuuuugguggugucaguguuauaacaccaggaacaaauacuucuaaccagguugcuguucuuuaucaggauguuaacugcacagaagucccuguugcuauucaugcagaucaacuuacuccuacuuggcguguuuauucuacagguucuaauguuuuucaaacacgugcaggcuguuuaauaggggcugaacaugucaacaacucauaugagugugacauacccauuggugcagguauaugcgcuaguuaucagacucagacuaauucuccucggcgggcacguaguguagcuagucaauccaucauugccuacacuaugucacuuggugcagaaaauucaguugcuuacucuaauaacucuauugccauacccacaaauuuuacuauuaguguuaccacagaaauucuaccagugucuaugaccaagacaucaguagauuguacaauguacauuuguggugauucaacugaaugcagcaaucuuuuguugcaauauggcaguuuuuguacacaauuaaaccgugcuuuaacuggaauagcuguugaacaagacaaaaacacccaagaaguuuuugcacaagucaaacaaauuuacaaaacaccaccaauuaaagauuuuggugguuuuaauuuuucacaaauauuaccagauccaucaaaaccaagcaagaggucauuuauugaagaucuacuuuucaacaaagugacacuugcagaugcuggcuucaucaaacaauauggugauugccuuggugauauugcugcuagagaccucauuugugcacaaaaguuuaacggccuuacuguuuugccaccuuugcucacagaugaaaugauugcucaauacacuucugcacuguuagcggguacaaucacuucugguuggaccuuuggugcaggugcugcauuacaaauaccauuugcuaugcaaauggcuuauagguuuaaugguauuggaguuacacagaauguucucuaugagaaccaaaaauugauugccaaccaauuuaauagugcuauuggcaaaauucaagacucacuuucuuccacagcaagugcacuuggaaaacuucaagauguggucaaccaaaaugcacaagcuuuaaacacgcuuguuaaacaacuuagcuccaauuuuggugcaauuucaaguguuuuaaaugauauccuuucacgucuugacaaaguugaggcugaagugcaaauugauagguugaucacaggcagacuucaaaguuugcagacauaugugacucaacaauuaauuagagcugcagaaaucagagcuucugcuaaucuugcugcuacuaaaaugucagaguguguacuuggacaaucaaaaagaguugauuuuuguggaaagggcuaucaucuuauguccuucccucagucagcaccucaugguguagucuucuugcaugugacuuaugucccugcacaagaaaagaacuucacaacugcuccugccauuugucaugauggaaaagcacacuuuccucgugaaggugucuuuguuucaaauggcacacacugguuuguaacacaaaggaauuuuuaugaaccacaaaucauuacuacagacaacacauuugugucugguaacugugauguuguaauaggaauugucaacaacacaguuuaugauccuuugcaaccugaauuagacucauucaaggaggaguuagauaaauauuuuaagaaucauacaucaccagauguugauuuaggugacaucucuggcauuaaugcuucaguuguaaacauucaaaaagaaauugaccgccucaaugagguugccaagaauuuaaaugaaucucucaucgaucuccaagaacuuggaaaguaugagcaguauauaaaauggccaugguacauuuggcuagguuuuauagcuggcuugauugccauaguaauggugacaauuaugcuuugcuguaugaccaguugcuguaguugucucaagggcuguuguucuuguggauccugcugcaaauuugaugaagacgacucugagccagugcucaaaggagucaaauuacauuacacauaa

SEQ ID NO: 11704 - RNA, 3822 nt, Artificial Sequence
  SARS-CoV-2/USA/WA-UW292/2020__EPI_ISL_418077 spike protein CDS wt (1-1273)
auguuuguuuuucuuguuuuauugccacuagucucuagucaguguguuaaucuuacaaccagaacucaauuacccccugcauacacuaauucuuucacacgugguguuuauuacccugacaaaguuuucagauccucaguuuuacauucaacucaggacuuguucuuaccuuucuuuuccaauguuacuugguuccaugcuauacaugucucugggaccaaugguacuaagagguuugauaacccuguccuaccauuuaaugaugguguuuauuuugcuuccacugagaagucuaacauaauaagaggcuggauuuuugguacuacuuuagauucgaagacccagucccuacuuauuguuaauaacgcuacuaauguuguuauuaaagucugugaauuucaauuuuguaaugauccauuuuuggguguuuauuaccacaaaaacaacaaaaguuggauggaaagugaguucagaguuuauucuagugcgaauaauugcacuuuugaauaugucucucagccuuuucuuauggaccuugaaggaaaacaggguaauuucaaaaaucuuagggaauuuguguuuaagaauauugaugguuauuuuaaaauauauucuaagcacacgccuauuaauuuagugcgugaucucccucaggguuuuucggcuuuagaaccauugguagauuugccaauagguauuaacaucacuagguuucaaacuuuacuugcuuuacauagaaguuauuugacuccuggugauucuucuucagguuggacagcuggugcugcagcuuauuauguggguuaucuucaaccuaggacuuuucuauuaaaauauaaugaaaauggaaccauuacagaugcuguagacugugcacuugacccucucucagaaacaaaguguacguugaaauccuucacuguagaaaaaggaaucuaucaaacuucuaacuuuagaguccaaccaacagaaucuauuguuagauuuccuaauauuacaaacuugugcccuuuuggugaaguuuuuaacgccaccagauuugcaucuguuuaugcuuggaacaggaagagaaucagcaacuguguugcugauuauucuguccuauauaauuccgcaucauuuuccacuuuuaaguguuauggagugucuccuacuaaauuaaaugaucucugcuuuacuaaugucuaugcagauucauuuguaauuagaggugaugaagucagacaaaucgcuccagggcaaacuggaaagauugcugauuauaauuauaaauuaccagaugauuuuacaggcugcguuauagcuuggaauucuaacaaucuugauucuaagguuggugguaauuauaauuaccuguauagauuguuuaggaagucuaaucucaaaccuuuugagagagauauuucaacugaaaucuaucaggccaguagcacaccuuguaaugguguugaagguuuuaauuguuacuuuccuuuacaaucauaugguuuccaacccacuaaugguguugguuaccaaccauacagaguaguaguacuuucuuuugaacuucuacaugcaccagcaacuguuuguggaccuaaaaagucuacuaauuugguuaaaaacaaaugugucaauuucaacuucaaugguuuaacaggcacagguguucuuacugagucuaacaaaaaguuucugccuuuccaacaauuuggcagagacauugcugacacuacugaugcuguccgugauccacagacacuugagauucuugacauuacaccauguucuuuugguggugucaguguuauaacaccaggaacaaauacuucuaaccagguugcuguucuuuaucaggauguuaacugcacagaagucccuguugcuauucaugcagaucaacuuacuccuacuuggcguguuuauucuacagguucuaauguuuuucaaacacgugcaggcuguuuaauaggggcugaacaugucaacaacucauaugagugugacauacccauuggugcagguauaugcgcuaguuaucagacucagacuaauucuccucggcgggcacguaguguagcuagucaauccaucauugccuacacuaugucacuuggugcagaaaauucaguugcuuacucuaauaacucuauugccauacccacaaauuuuacuauuaguguuaccacagaaauucuaccagugucuaugaccaagacaucaguagauuguacaauguacauuuguggugauucaacugaaugcagcaaucuuuuguugcaauauggcaguuuuuguacacaauuaaaccgugcuuuaacuggaauagcuguugaacaagacaaaaacacccaagaaguuuuugcacaagucaaacaaauuuacaaaacaccaccaauuaaagauuuuggugguuuuaauuuuucacaaauauuaccagauccaucaaaaccaagcaagaggucauuuauugaagaucuacuuuucaacaaagugacacuugcagaugcuggcuucaucaaacaauauggugauugccuuggugauauugcugcuagagaccucauuugugcacaaaaguuuaacggccuuacuguuuugccaccuuugcucacagaugaaaugauugcucaauacacuucugcacuguuagcggguacaaucacuucugguuggaccuuuggugcaggugcugcauuacaaauaccauuugcuaugcaaauggcuuauagguuuaaugguauuggaguuacacagaauguucucuaugagaaccaaaaauugauugccaaccaauuuaauagugcuauuggcaaaauucaagacucacuuucuuccacagcaagugcacuuggaaaacuucaagauguggucaaccaaaaugcacaagcuuuaaacacgcuuguuaaacaacuuagcuccaauuuuggugcaauuucaaguguuuuaaaugauauccuuucacgucuugacaaaguugaggcugaagugcaaauugauagguugaucacaggcagacuucaaaguuugcagacauaugugacucaacaauuaauuagagcugcagaaaucagagcuucugcuaaucuugcugcuacuaaaaugucagaguguguacuuggacaaucaaaaagaguugauuuuuguggaaagggcuaucaucuuauguccuucccucagucagcaccucaugguguagucuucuugcaugugacuuaugucccugcacaagaaaagaacuucacaacugcuccugccauuugucaugauggaaaagcacacuuuccucgugaaggugucuuuguuucaaauggcacacacugguuuguaacacaaaggaauuuuuaugaaccacaaaucauuacuacagacaacacauuugugucugguaacugugauguuguaauaggaauugucaacaacacaguuuaugauccuuugcaaccugaauuagacucauucaaggaggaguuagauaaauauuuuaagaaucauacaucaccagauguugauuuaggugacaucucuggcauuaaugcuucaguuguaaacauucaaaaagaaauugaccgccucaaugagguugccaagaauuuaaaugaaucucucaucgaucuccaagaacuuggaaaguaugagcaguauauaaaauggccaugguacauuuggcuagguuuuauagcuggcuugauugccauaguaauggugacaauuaugcuuugcuguaugaccaguugcuguaguugucucaagggcuguuguucuuguggauccugcugcaaauuugaugaagacgacucugagccagugcucaaaggagucaaauuacauuacacauaa

SEQ ID NO: 11705 - RNA, 3822 nt, Artificial Sequence
  SARS-CoV-2/Iceland/192/2020__EPI_ISL_417819 spike protein CDS wt (1-1273)
auguuuguuuuuuuuguuuuauugccacuagucucuagucaguguguuaaucuuacaaccagaacucaauuacccccugcauacacuaauucuuucacacgugguguuuauuacccugacaaaguuuucagauccucaguuuuacauucaacucaggacuuguucuuaccuuucuuuuccaauguuacuugguuccaugcuauacaugucucugggaccaaugguacuaagagguuugauaacccuguccuaccauuuaaugaugguguuuauuuugcuuccacugagaagucuaacauaauaagaggcuggauuuuugguacuacuuuagauucgaagacccagucccuacuuauuguuaauaacgcuacuaauguuguuauuaaagucugugaauuucaauuuuguaaugauccauuuuuggguguuuauuaccacaaaaacaacaaaaguuggauggaaagugaguucagaguuuauucuagugcgaauaauugcacuuuugaauaugucucucagccuuuucuuauggaccuugaaggaaaacaggguaauuucaaaaaucuuagggaauuuguguuuaagaauauugaugguuauuuuaaaauauauucuaagcacacgccuauuaauuuagugcgugaucucccucaggguuuuucggcuuuagaaccauugguagauuugccaauagguauuaacaucacuagguuucaaacuuuacuugcuuuacauagaaguuauuugacuccuggugauucuucuucagguuggacagcuggugcugcagcuuauuauguggguuaucuucaaccuaggacuuuucuauuaaaauauaaugaaaauggaaccauuacagaugcuguagacugugcacuugacccucucucagaaacaaaguguacguugaaauccuucacuguagaaaaaggaaucuaucaaacuucuaacuuuagaguccaaccaacagaaucuauuguuagauuuccuaauauuacaaacuugugcccuuuuggugaaguuuuuaacgccaccagauuugcaucuguuuaugcuuggaacaggaagagaaucagcaacuguguugcugauuauucuguccuauauaauuccgcaucauuuuccacuuuuaaguguuauggagugucuccuacuaaauuaaaugaucucugcuuuacuaaugucuaugcagauucauuuguaauuagaggugaugaagucagacaaaucgcuccagggcaaacuggaaagauugcugauuauaauuauaaauuaccagaugauuuuacaggcugcguuauagcuuggaauucuaacaaucuugauucuaagguuggugguaauuauaauuaccuguauagauuguuuaggaagucuaaucucaaaccuuuugagagagauauuucaacugaaaucuaucaggccgguagcacaccuuguaaugguguugaagguuuuaauuguuacuuuccuuuacaaucauaugguuuccaacccacuaaugguguugguuaccaaccauacagaguaguaguacuuucuuuugaacuucuacaugcaccagcaacuguuuguggaccuaaaaagucuacuaauuugguuaaaaacaaaugugucaauuucaacuucaaugguuuaacaggcacagguguucuuacugagucuaacaaaaaguuucugccuuuccaacaauuuggcagagacauugcugacacuacugaugcuguccgugauccacagacacuugagauucuugacauuacaccauguucuuuugguggugucaguguuauaacaccaggaacaaauacuucuaaccagguugcuguucuuuaucaggguguuaacugcacagaagucccuguugcuauucaugcagaucaacuuacuccuacuuggcguguuuauucuacagguucuaauguuuuucaaacacgugcaggcuguuuaauaggggcugaacaugucaacaacucauaugagugugacauacccauuggugcagguauaugcgcuaguuaucagacucagacuaauucuccucggcgggcacguaguguagcuagucaauccaucauugccuacacuaugucacuuggugcagaaaauucaguugcuuacucuaauaacucuauugccauacccacaaauuuuacuauuaguguuaccacagaaauucuaccagugucuaugaccaagacaucaguagauuguacaauguacauuuguggugauucaacugaaugcagcaaucuuuuguugcaauauggcaguuuuuguacacaauuaaaccgugcuuuaacuggaauagcuguugaacaagacaaaaacacccaagaaguuuuugcacaagucaaacaaauuuacaaaacaccaccaauuaaagauuuuggugguuuuaauuuuucacaaauauuaccagauccaucaaaaccaagcaagaggucauuuauugaagaucuacuuuucaacaaagugacacuugcagaugcuggcuucaucaaacaauauggugauugccuuggugauauugcugcuagagaccucauuugugcacaaaaguuuaacggccuuacuguuuugccaccuuugcucacagaugaaaugauugcucaauacacuucugcacuguuagcggguacaaucacuucugguuggaccuuuggugcaggugcugcauuacaaauaccauuugcuaugcaaauggcuuauagguuuaaugguauuggaguuacacagaauguucucuaugagaaccaaaaauugauugccaaccaauuuaauagugcuauuggcaaaauucaagacucacuuucuuccacagcaagugcacuuggaaaacuucaagauguggucaaccaaaaugcacaagcuuuaaacacgcuuguuaaacaacuuagcuccaauuuuggugcaauuucaaguguuuuaaaugauauccuuucacgucuugacaaaguugaggcugaagugcaaauugauagguugaucacaggcagacuucaaaguuugcagacauaugugacucaacaauuaauuagagcugcagaaaucagagcuucugcuaaucuugcugcuacuaaaaugucagaguguguacuuggacaaucaaaaagaguugauuuuuguggaaagggcuaucaucuuauguccuucccucagucagcaccucaugguguagucuucuugcaugugacuuaugucccugcacaagaaaagaacuucacaacugcuccugccauuugucaugauggaaaagcacacuuuccucgugaaggugucuuuguuucaaauggcacacacugguuuguaacacaaaggaauuuuuaugaaccacaaaucauuacuacagacaacacauuugugucugguaacugugauguuguaauaggaauugucaacaacacaguuuaugauccuuugcaaccugaauuagacucauucaaggaggaguuagauaaauauuuuaagaaucauacaucaccagauguugauuuaggugacaucucuggcauuaaugcuucaguuguaaacauucaaaaagaaauugaccgccucaaugagguugccaagaauuuaaaugaaucucucaucgaucuccaagaacuuggaaaguaugagcaguauauaaaauggccaugguacauuuggcuagguuuuauagcuggcuugauugccauaguaauggugacaauuaugcuuugcuguaugaccaguugcuguaguugucucaagggcuguuguucuuguggauccugcugcaaauuugaugaagacgacucugagccagugcucaaaggagucaaauuacauuacacauaa

SEQ ID NO: 11706 - RNA, 3822 nt, Artificial Sequence
  SARS-CoV-2/Belgium/ULG-6939/2020__EPI_ISL_417020 spike protein CDS wt (1-1273)
auguuuguuuuucuuguuuuauugccacuagucucuagucaguguguuaaucuuacaaccagaacucaauuacccccugcauacacuaauucuuucacacgugguguuuauuacccugacaaaguuuucagauccucaguuuuacauucaacucaggacuuguucuuaccuuucuuuuccaauguuacuugguuccaugcuauacaugucucugggaccaaugguacuaagagguuugauaacccuguccuaccauuuaaugaugguguuuauuuugcuuccacugagaagucuaacauaauaagaggcuggauuuuugguacuacuuuagauucgaagacccagucccuacuuauuguuaauaacgcuacuaauguuguuauuaaagucugugaauuucaauuuuguaaugauccauuuuuggguguuuauuaccacaaaaacaacaaaaguuggauggaaagugaguucagaguuuauucuagugcgaauaauugcacuuuugaauaugucucucagccuuuucuuauggaccuugaaggaaaacaggguaauuucaaaaaucuuagggaauuuguguuuaagaauauugaugguuauuuuaaaauauauucuaagcacacgccuauuaauuuagugcgugaucucccucaggguuuuucggcuuuagaaccauugguagauuugccaauagguauuaacaucacuagguuucaaacuuuacuugcuuuacauagaaguuauuugacuccuggugauucuucuucagguuggacagcuggugcugcagcuuauuauguggguuaucuucaaccuaggacuuuucuauuaaaauauaaugaaaauggaaccauuacagaugcuguagacugugcacuugacccucucucagaaacaaaguguacguugaaauccuucacuguagaaaaaggaaucuaucaaacuucuaacuuuagaguccaaccaacagaaucuauuguuagauuuccuaauauuacaaacuugugcccuuuuggugaaguuuuuaacgccaccagauuugcaucuguuuaugcuuggaacaggaagagaaucagcaacuguguugcugauuauucuguccuauauaauuccgcaucauuuuccacuuuuaaguguuauggagugucuccuacuaaauuaaaugaucucugcuuuacuaaugucuaugcagauucauuuguaauuagaggugaugaagucagacaaaucgcuccagggcaaacuggaaagauugcugauuauaauuauaaauuaccagaugauuuuacaggcugcguuauagcuuggaauucuaacaaucuugauucuaagguuggugguaauuauaauuaccuguauagauuguuuaggaagucuaaucucaaaccuuuugagagagauauuucaacugaaaucuaucaggccgguagcacaccuuguaaugguguugaagguuuuaauuguuacuuuccuuuacaaucauaugguuuccaacccacuaaugguguugguuaccaaccauacagaguaguaguacuuucuuuugaacuucuacaugcaccagcaacuguuuguggaccuaaaaagucuacuaauuugguuaaaaacaaaugugucaauuucaacuucaaugguuuaacaggcacagguguucuuacugagucuaacaaaaaguuucugccuuuccaacaauuuggcagagacauugcugacacuacugaugcuguccgugauccacagacacuugagauucuugacauuacaccauguucuuuugguggugucaguguuauaacaccaggaacaaauacuucuaaccagguugcuguucuuuaucaggguguuaacugcacagaagucccuguugcuauucaugcagaucaacuuacuccuacuuggcguguuuauucuacagguucuaauguuuuucaaacacgugcaggcuguuuaauaggggcugaacaugucaacaacucauaugagugugacauacccauuggugcagguauaugcgcuaguuaucagacucagacuaauucuccucggcgggcacguaguguagcuagucaauccaucauugccuacacuaugucacuuggugcagaaaauucaguuguuuacucuaauaacucuauugccauacccacaaauuuuacuauuaguguuaccacagaaauucuaccagugucuaugaccaagacaucaguagauuguacaauguacauuuguggugauucaacugaaugcagcaaucuuuuguugcaauauggcaguuuuuguacacaauuaaaccgugcuuuaacuggaauagcuguugaacaagacaaaaacacccaagaaguuuuugcacaagucaaacaaauuuacaaaacaccaccaauuaaagauuuuggugguuuuaauuuuucacaaauauuaccagauccaucaaaaccaagcaagaggucauuuauugaagaucuacuuuucaacaaagugacacuugcagaugcuggcuucaucaaacaauauggugauugccuuggugauauugcugcuagagaccucauuugugcacaaaaguuuaacggccuuacuguuuugccaccuuugcucacagaugaaaugauugcucaauacacuucugcacuguuagcggguacaaucacuucugguuggaccuuuggugcaggugcugcauuacaaauaccauuugcuaugcaaauggcuuauagguuuaaugguauuggaguuacacagaauguucucuaugagaaccaaaaauugauugccaaccaauuuaauagugcuauuggcaaaauucaagacucacuuucuuccacagcaagugcacuuggaaaacuucaagauguggucaaccaaaaugcacaagcuuuaaacacgcuuguuaaacaacuuagcuccaauuuuggugcaauuucaaguguuuuaaaugauauccuuucacgucuugacaaaguugaggcugaagugcaaauugauagguugaucacaggcagacuucaaaguuugcagacauaugugacucaacaauuaauuagagcugcagaaaucagagcuucugcuaaucuugcugcuacuaaaaugucagaguguguacuuggacaaucaaaaagaguugauuuuuguggaaagggcuaucaucuuauguccuucccucagucagcaccucaugguguagucuucuugcaugugacuuaugucccugcacaagaaaagaacuucacaacugcuccugccauuugucaugauggaaaagcacacuuuccucgugaaggugucuuuguuucaaauggcacacacugguuuguaacacaaaggaauuuuuaugaaccacaaaucauuacuacagacaacacauuugugucugguaacugugauguuguaauaggaauugucaacaacacaguuuaugauccuuugcaaccugaauuagacucauucaaggaggaguuagauaaauauuuuaagaaucauacaucaccagauguugauuuaggugacaucucuggcauuaaugcuucaguuguaaacauucaaaaagaaauugaccgccucaaugagguugccaagaauuuaaaugaaucucucaucgaucuccaagaacuuggaaaguaugagcaguauauaaaauggccaugguacauuuggcuagguuuuauagcuggcuugauugccauaguaauggugacaauuaugcuuugcuguaugaccaguugcuguaguugucucaagggcuguuguucuuguggauccugcugcaaauuugaugaagacgacucugagccagugcucaaaggagucaaauuacauuacacauaa

SEQ ID NO: 11707 - RNA, 3822 nt, Artificial Sequence
  SARS-CoV-2/France/HF2496/2020__EPI_ISL_418231 spike protein CDS wt (1-1273)
auguuuguuuuucuuguuuuauugccacuagucucuagucaguguguuaaucuuacaaccagaacucaauuacccccugcauacacuaauucuuucacacgugguguuuauuacccugacaaaguuuucagauccucaguuuuacauucaacucaggacuuguucuuaccuuucuuuuccaauguuacuugguuccaugcuauacaugucucugggaccaaugguacuaagagguuugauaacccuguccuaccauuuaaugaugguguuuauuuugcuuccacugagaagucuaacauaauaagaggcuggauuuuugguacuacuuuagauucgaagacccagucccuacuuauuguuaauaacgcuacuaauguuguuauuaaagucugugaauuucaauuuuguaaugauccauuuuuggguguuuauuaccacaaaaacaacaaaaguuggauggaaagugaguucagaguuuauucuagugcgaauaauugcacuuuugaauaugucucucagccuuuucuuauggaccuugaaggaaaacaggguaauuucaaaaaucuuagggaauuuguguuuaagaauauugaugguuauuuuaaaauauauucuaagcacacgccuauuaauuuagugcgugaucucccucaggguuuuucggcuuuagaaccauugguagauuugccaauagguauuaacaucacuagguuucaaacuuuacuugcuuuacauagaaguuauuugacuccuggugauucuucuucagguuggacagcuggugcugcagcuuauuauguggguuaucuucaaccuaggacuuuucuauuaaaauauaaugaaaauggaaccauuacagaugcuguagacugugcacuugacccucucucagaaacaaaguguacguugaaauccuucacuguagaaaaaggaaucuaucaaacuucuaacuuuagaguccaaccaacagaaucuauuguuagauuuccuaauauuacaaacuugugcccuuuuggugaaguuuuuaacgccaccagauuugcaucuguuuaugcuuggaacaggaagagaaucagcaacuguguugcugauuauucuguccuauauaauuccgcaucauuuuccacuuuuaaguguuauggagugucuccuacuaaauuaaaugaucucugcuuuacuaaugucuaugcagauucauuuguaauuagaggugaugaagucagacaaaucgcuccagggcaaacuggaaagauugcugauuauaauuauaaauuaccagaugauuuuacaggcugcguuauagcuuggaauucuaacaaucuugauucuaagguuggugguaauuauaauuaccuguauagauuguuuaggaagucuaaucucaaaccuuuugagagagauauuucaacugaaaucuaucaggccgguagcacaccuuguaaugguguugaagguuuuaauuguuacuuuccuuuacaaucauaugguuuccaacccacuaaugguguugguuaccaaccauacagaguaguaguacuuucuuuugaacuucuacaugcaccagcaacuguuuguggaccuaaaaagucuacuaauuugguuaaaaacaaaugugucaauuucaacuucaaugguuuaacaggcacagguguucuuacugagucuaacaaaaaguuucugccuuuccaacaauuuggcagagacauugcugacacuacugaugcuguccgugauccacagacacuugagauucuugacauuacaccauguucuuuugguggugucaguguuauaacaccaggaacaaauacuucuaaccagguugcuguucuuuaucaggguguuaacugcacagaagucccuguugcuauucaugcagaucaacuuacuccuacuuggcguguuuauucuacagguucuaauguuuuucaaacacgugcaggcuguuuaauaggggcugaacaugucaacaacucauaugagugugacauacccauuggugcagguauaugcgcuaguuaucagacucagacuaauucuccucggcgggcacguaguguagcuagucaauccaucauugccuacacuaugucacuuggugcagaaaauucaguugcuuacucuaauaacucuauugccauacccacaaauuuuacuauuaguguuaccacagaaauucuaccagugucuaugaccaagacaucaguagauuguacaauguacauuuguggugauucaacugaaugcagcaaucuuuuguugcaauauggcaguuuuuguacacaauuaaaccgugcuuuaacuggaauagcuguugaacaagacaaaaacacccaagaaguuuuugcacaagucaaacaaauuuacaaaacaccaccaauuaaagauuuuggugguuuuaauuuuucacaaauauuaccagauccaucaaaaccaagcaagaggucauuuauugaagaucuacuuuucaacaaagugacacuugcagaugcuggcuucaucaaacaauauggugauugccuuggugauauuguugcuagagaccucauuugugcacaaaaguuuaacggccuuacuguuuugccaccuuugcucacagaugaaaugauugcucaauacacuucugcacuguuagcggguacaaucacuucugguuggaccuuuggugcaggugcugcauuacaaauaccauuugcuaugcaaauggcuuauagguuuaaugguauuggaguuacacagaauguucucuaugagaaccaaaaauugauugccaaccaauuuaauagugcuauuggcaaaauucaagacucacuuucuuccacagcaagugcacuuggaaaacuucaagauguggucaaccaaaaugcacaagcuuuaaacacgcuuguuaaacaacuuagcuccaauuuuggugcaauuucaaguguuuuaaaugauauccuuucacgucuugacaaaguugaggcugaagugcaaauugauagguugaucacaggcagacuucaaaguuugcagacauaugugacucaacaauuaauuagagcugcagaaaucagagcuucugcuaaucuugcugcuacuaaaaugucagaguguguacuuggacaaucaaaaagaguugauuuuuguggaaagggcuaucaucuuauguccuucccucagucagcaccucaugguguagucuucuugcaugugacuuaugucccugcacaagaaaagaacuucacaacugcuccugccauuugucaugauggaaaagcacacuuuccucgugaaggugucuuuguuucaaauggcacacacugguuuguaacacaaaggaauuuuuaugaaccacaaaucauuacuacagacaacacauuugugucugguaacugugauguuguaauaggaauugucaacaacacaguuuaugauccuuugcaaccugaauuagacucauucaaggaggaguuagauaaauauuuuaagaaucauacaucaccagauguugauuuaggugacaucucuggcauuaaugcuucaguuguaaacauucaaaaagaaauugaccgccucaaugagguugccaagaauuuaaaugaaucucucaucgaucuccaagaacuuggaaaguaugagcaguauauaaaauggccaugguacauuuggcuagguuuuauagcuggcuugauugccauaguaauggugacaauuaugcuuugcuguaugaccaguugcuguaguugucucaagggcuguuguucuuguggauccugcugcaaauuugaugaagacgacucugagccagugcucaaaggagucaaauuacauuacacauaa

SEQ ID NO: 11708 - RNA, 3822 nt, Artificial Sequence
  SARS-CoV-2/USA/WA-UW291/2020__EPI_ISL_418076 spike protein CDS wt (1-1273)
auguuuguuuuucuuguuuuauugccacuagucucuagucaguguguuaaucuuacaaccagaacucaauuacccccugcauacacuaauucuuucacacgugguguuuauuacccugacaaaguuuucagauccucaguuuuacauucaacucaggacuuguucuuaccuuucuuuuccaauguuacuugguuccaugcuauacaugucucugggaccaaugguacuaagagguuugauaacccuguccuaccauuuaaugaugguguuuauuuugcuuccacugagaagucuaacauaauaagaggcuggauuuuugguacuacuuuagauucgaagacccagucccuacuuauuguuaauaacgcuacuaauguuguuauuaaagucugugaauuucaauuuuguaaugauccauuuuuggguguuuauuaccacaaaaacaacaaaaguuggauggaaagugaguucagaguuuauucuagugcgaauaauugcacuuuugaauaugucucucagccuuuucuuauggaccuugaaggaaaacaggguaauuucaaaaaucuuagggaauuuguguuuaagaauauugaugguuauuuuaaaauauauucuaagcacacgccuauuaauuuagugcgugaucucccucaggguuuuucggcuuuagaaccauugguagauuugccaauagguauuaacaucacuagguuucaaacuuuacuugcuuuacauagaaguuauuugacuccuggugauucuucuucagguuggacagcuggugcugcagcuuauuauguggguuaucuucaaccuaggacuuuucuauuaaaauauaaugaaaauggaaccauuacagaugcuguagacugugcacuugacccucucucagaaacaaaguguacguugaaauccuucacuguagaaaaaggaaucuaucaaacuucuaacuuuagaguccaaccaacagaaucuauuguuagauuuccuaauauuacaaacuugugcccuuuuggugaaguuuuuaacgccaccagauuugcaucuguuuaugcuuggaacaggaagagaaucagcaacuguguugcugauuauucuguccuauauaauuccgcaucauuuuccacuuuuaaguguuauggagugucuccuacuaaauuaaaugaucucugcuuuacuaaugucuaugcagauucauuuguaauuagaggugaugaagucagacaaaucgcuccagggcaaacuggaaagauugcugauuauaauuauaaauuaccagaugauuuuacaggcugcguuauagcuuggaauucuaacaaucuugauucuaagguuggugguaauuauaauuaccuguauagauuguuuaggaagucuaaucucaaaccuuuugagagagauauuucaacugaaaucuaucaggccgguagcacaccuuguaaugguguugaagguuuuaauuguuacuuuccuuuacaaucauaugguuuccaacccacuaaugguguugguuaccaaccauacagaguaguaguacuuucuuuugaacuucuacaugcaccagcaacuguuuguggaccuaaaaagucuacuaauuugguuaaaaacaaaugugucaauuucaacuucaaugguuuaacaggcacagguguucuuacugagucuaacaaaaaguuucugccuuuccaacaauuuggcagagacauugcugacacuacugaugcuguccgugauccacagacacuugagauucuugacauuacaccauguucuuuugguggugucaguguuauaacaccaggaacaaauacuucuaaccagguugcuguucuuuaucaggguguuaacugcacagaagucccuguugcuauucaugcagaucaacuuacuccuacuuggcguguuuauucuacagguucuaauguuuuucaaacacgugcaggcuguuuaauaggggcugaacaugucaacaacucauaugagugugacauacccauuggugcagguauaugcgcuaguuaucagacucagacuaauucuccucggcgggcacguaguguagcuagucaauccaucauugccuacacuaugucacuuggugcagaaaauucaguugcuuacucuaauaacucuauugccauacccacaaauuuuacuauuaguguuaccacagaaauucuaccagugucuaugaccaagacaucaguagauuguacaauguacauuuguggugauucaacugaaugcagcaaucuuuuguugcaauauggcaguuuuuguacacaauuaaaccgugcuuuaacuggaauagcuguugaacaagacaaaaacacccaagaaguuuuugcacaagucaaacaaauuuacaaaacaccaccaauuaaagauuuuggugguuuuaauuuuucacaaauauuaccagauccaucaaaaccaagcaagaggucauuuauugaagaucuacuuuucaacaaagugacacuugcagaugcuggcuucaucaaacaauauggugauugccuuggugauauugcugcuagagaccucauuugugcacaaaaguuuaacggccuuacuguuuugccaccuuugcucacagaugaaaugauugcucaauacacuucugcacuguuagcggguacaaucacuucugguuggaccuuuggugcaggugcugcauuacaaauaccauuugcuaugcaaauggcuuauagguuuaaugguauuggaguuacacagaauguucucuaugagaaccaaaaauugauugccaaccaauuuaauagugcuauuggcaaaauucaauacucacuuucuuccacagcaagugcacuuggaaaacuucaagauguggucaaccaaaaugcacaagcuuuaaacacgcuuguuaaacaacuuagcuccaauuuuggugcaauuucaaguguuuuaaaugauauccuuucacgucuugacaaaguugaggcugaagugcaaauugauagguugaucacaggcagacuucaaaguuugcagacauaugugacucaacaauuaauuagagcugcagaaaucagagcuucugcuaaucuugcugcuacuaaaaugucagaguguguacuuggacaaucaaaaagaguugauuuuuguggaaagggcuaucaucuuauguccuucccucagucagcaccucaugguguagucuucuugcaugugacuuaugucccugcacaagaaaagaacuucacaacugcuccugccauuugucaugauggaaaagcacacuuuccucgugaaggugucuuuguuucaaauggcacacacugguuuguaacacaaaggaauuuuuaugaaccacaaaucauuacuacagacaacacauuugugucugguaacugugauguuguaauaggaauugucaacaacacaguuuaugauccuuugcaaccugaauuagacucauucaaggaggaguuagauaaauauuuuaagaaucauacaucaccagauguugauuuaggugacaucucuggcauuaaugcuucaguuguaaacauucaaaaagaaauugaccgccucaaugagguugccaagaauuuaaaugaaucucucaucgaucuccaagaacuuggaaaguaugagcaguauauaaaauggccaugguacauuuggcuagguuuuauagcuggcuugauugccauaguaauggugacaauuaugcuuugcuguaugaccaguugcuguaguugucucaagggcuguuguucuuguggauccugcugcaaauuugaugaagacgacucugagccagugcucaaaggagucaaauuacauuacacauaa

SEQ ID NO: 11709 - RNA, 3822 nt, Artificial Sequence
  SARS-CoV-2/Portugal/PT0034/2020__EPI_ISL_418019 spike protein CDS wt (1-1273)
auguuuguuuuucuuguuuuauugccacuagucucuagucaguguguuaaucuuacaaccagaacucaauuacccccugcauacacuaauucuuucacacgugguguuuauuacccugacaaaguuuucagauccucaguuuuacauucaacucaggacuuguucuuaccuuucuuuuccaauguuacuugguuccaugcuauacaugucucugggaccaaugguacuaagagguuugauaacccuguccuaccauuuaaugaugguguuuauuuugcuuccacugagaagucuaacauaauaagaggcuggauuuuugguacuacuuuagauucgaagacccagucccuacuuauuguuaauaacgcuacuaauguuguuauuaaagucugugaauuucaauuuuguaaugauccauuuuuggguguuuauuaccacaaaaacaacaaaaguuggauggaaagugaguucagaguuuauucuagugcgaauaauugcacuuuugaauaugucucucagccuuuucuuauggaccuugaaggaaaacaggguaauuucaaaaaucuuagggaauuuguguuuaagaauauugaugguuauuuuaaaauauauucuaagcacacgccuauuaauuuagugcgugaucucccucaggguuuuucggcuuuagaaccauugguagauuugccaauagguauuaacaucacuagguuucaaacuuuacuugcuuuacauagaaguuauuugacuccuggugauucuucuucagguuggacagcuggugcugcagcuuauuauguggguuaucuucaaccuaggacuuuucuauuaaaauauaaugaaaauggaaccauuacagaugcuguagacugugcacuugacccucucucagaaacaaaguguacguugaaauccuucacuguagaaaaaggaaucuaucaaacuucuaacuuuagaguccaaccaacagaaucuauuguuagauuuccuaauauuacaaacuugugcccuuuuggugaaguuuuuaacgccaccagauuugcaucuguuuaugcuuggaacaggaagagaaucagcaacuguguugcugauuauucuguccuauauaauuccgcaucauuuuccacuuuuaaguguuauggagugucuccuacuaaauuaaaugaucucugcuuuacuaaugucuaugcagauucauuuguaauuagaggugaugaagucagacaaaucgcuccagggcaaacuggaaagauugcugauuauaauuauaaauuaccagaugauuuuacaggcugcguuauagcuuggaauucuaacaaucuugauucuaagguuggugguaauuauaauuaccuguauagauuguuuaggaagucuaaucucaaaccuuuugagagagauauuucaacugaaaucuaucaggccgguagcacaccuuguaaugguguugaagguuuuaauuguuacuuuccuuuacaaucauaugguuuccaacccacuaaugguguugguuaccaaccauacagaguaguaguacuuucuuuugaacuucuacaugcaccagcaacuguuuguggaccuaaaaagucuacuaauuugguuaaaaacaaaugugucaauuucaacuucaaugguuuaacaggcacagguguucuuacugagucuaacaaaaaguuucugccuuuccaacaauuuggcagagacauugcugacacuacugaugcuguccgugauccacagacacuugagauucuugacauuacaccauguucuuuugguggugucaguguuauaacaccaggaacaaauacuucuaaccagguugcuguucuuuaucaggguguuaacugcacagaagucccuguugcuauucaugcagaucaacuuacuccuacuuggcguguuuauucuacagguucuaauguuuuucaaacacgugcaggcuguuuaauaggggcugaacaugucaacaacucauaugagugugacauacccauuggugcagguauaugcgcuaguuaucagacucagacuaauucuccucggcgggcacguaguguagcuagucaauccaucauugccuacacuaugucacuuggugcagaaaauucaguugcuuacucuaauaacucuauugccauacccacaaauuuuacuauuaguguuaccacagaaauucuaccagugucuaugaccaagacaucaguagauuguacaauguacauuuguggugauucaacugaaugcagcaaucuuuuguugcaauauggcaguuuuuguacacaauuaaaccgugcuuuaacuggaauagcuguugaacaagacaaaaacacccaagaaguuuuugcacaagucaaacaaauuuacaaaacaccaccaauuaaagauuuuggugguuuuaauuuuucacaaauauuaccagauccaucaaaaccaagcaagaggucauuuauugaagaucuacuuuucaacaaagugacacuugcagaugcuggcuucaucaaacaauauggugauugccuuggugauauugcugcuagagaccucauuugugcacaaaaguuuaacggccuuacuguuuugccaccuuugcucacagaugaaaugauugcucaauacacuucugcacuguuagcggguacaaucacuucugguuggaccuuuggugcaggugcugcauuacaaauaccauuugcuaugcaaauggcuuauagguuuaaugguauuggaguuacacagaauguucucuaugagaaccaaaaauugauugccaaccaauuuaauagugcuauuggcaaaauucaagacucacuuucuuccacagcaagugcacuuggaaaacuucaagauguggucaaccaaaaugcacaagcuuuaaacacgcuuguuaaacaacuuagcuccaauuuuggugcaauuucaaguguuuuaaaugauauccuuucacgucuugacaaaguugaggcugaagugcaaauugauagguugaucacaggcagacuucaaaguuugcagacauaugugacucaacaauuaauuagagcugcagaaaucagagcuucugcuaaucuugcugcuacuaaaaugucagaguguguacuuggacaaucaaaaagaguugauuuuuguggaaagggcuaucaucuuauguccuucccucagucagcaccucaugguguagucuucuugcaugugacuuaugucccugcacaagaaaagaacuucacaacugcuccugccauuugucaugauggaaaagcacacuuuccucgugaaggugucuuuguuucaaauggcacacacugguuuguaacacaaaggaauuuuuaugaaccacaaaucauuacuacagacaacacauuugugucugguaacugugauguuguaauaggaauugucaacaacacaguuuaugauccuuugcaaccugaauuagacucauucaaggaggaguuagauaaauauuuuaagaaucauacaucaccagauguugauuuaggugacaucucuggcauuaaugcuucaguuguaaacauucaaaaagaaauugaccgccucaaugagguugccaagaauuuaaaugaaucucucaucgaucuccaagaacuuggaaaguaugagcaguauauaaaauggccaugguacauuuggcuagguuuuauagcuggcuugauugccauaguaauggugacaauuaugcuuugcuguauuaccaguugcuguaguugucucaagggcuguuguucuuguggauccugcugcaaauuugaugaagacgacucugagccagugcucaaaggagucaaauuacauuacacauaa

SEQ ID NO: 11710 - RNA, 3822 nt, Artificial Sequence
  SARS-CoV-2/Iceland/202/2020__EPI_ISL_417750 spike protein CDS wt (1-1273)
auguuuguuuuucuuguuuuauugccacuagucucuagucaguguguuaaucuuacaaccagaacucaauuacccccugcauacacuaauucuuucacacgugguguuuauuacccugacaaaguuuucagauccucaguuuuacauucaacucaggacuuguucuuaccuuucuuuuccaauguuacuugguuccaugcuauacaugucucugggaccaaugguacuaagagguuugauaacccuguccuaccauuuaaugaugguguuuauuuugcuuccacugagaagucuaacauaauaagaggcuggauuuuugguacuacuuuagauucgaagacccagucccuacuuauuguuaauaacgcuacuaauguuguuauuaaagucugugaauuucaauuuuguaaugauccauuuuuggguguuuauuaccacaaaaacaacaaaaguuggauggaaagugaguucagaguuuauucuagugcgaauaauugcacuuuugaauaugucucucagccuuuucuuauggaccuugaaggaaaacaggguaauuucaaaaaucuuagggaauuuguguuuaagaauauugaugguuauuuuaaaauauauucuaagcacacgccuauuaauuuagugcgugaucucccucaggguuuuucggcuuuagaaccauugguagauuugccaauagguauuaacaucacuagguuucaaacuuuacuugcuuuacauagaaguuauuugacuccuggugauucuucuucagguuggacagcuggugcugcagcuuauuauguggguuaucuucaaccuaggacuuuucuauuaaaauauaaugaaaauggaaccauuacagaugcuguagacugugcacuugacccucucucagaaacaaaguguacguugaaauccuucacuguagaaaaaggaaucuaucaaacuucuaacuuuagaguccaaccaacagaaucuauuguuagauuuccuaauauuacaaacuugugcccuuuuggugaaguuuuuaacgccaccagauuugcaucuguuuaugcuuggaacaggaagagaaucagcaacuguguugcugauuauucuguccuauauaauuccgcaucauuuuccacuuuuaaguguuauggagugucuccuacuaaauuaaaugaucucugcuuuacuaaugucuaugcagauucauuuguaauuagaggugaugaagucagacaaaucgcuccagggcaaacuggaaagauugcugauuauaauuauaaauuaccagaugauuuuacaggcugcguuauagcuuggaauucuaacaaucuugauucuaagguuggugguaauuauaauuaccuguauagauuguuuaggaagucuaaucucaaaccuuuugagagagauauuucaacugaaaucuaucaggccgguagcacaccuuguaaugguguugaagguuuuaauuguuacuuuccuuuacaaucauaugguuuccaacccacuaaugguguugguuaccaaccauacagaguaguaguacuuucuuuugaacuucuacaugcaccagcaacuguuuguggaccuaaaaagucuacuaauuugguuaaaaacaaaugugucaauuucaacuucaaugguuuaacaggcacagguguucuuacugagucuaacaaaaaguuucugccuuuccaacaauuuggcagagacauugcugacacuacugaugcuguccgugauccacagacacuugagauucuugacauuacaccauguucuuuugguggugucaguguuauaacaccaggaacaaauacuucuaaccagguugcuguucuuuaucaggauguuaacugcacagaagucccuguugcuauucaugcagaucaacuuacuccuacuuggcguguuuauucuacagguucuaauguuuuucaaacacgugcaggcuguuuaauaggggcugaacaugucaacaacucauaugagugugacauacccauuggugcagguauaugcgcuaguuaucagacucagacuaauucuccucggcgggcacguaguguagcuagucaauccaucauugccuacacuaugucacuuggugcagaaaauucaguugcuuacucuaauaacucuauugccauacccacaaauuuuacuauuaguguuaccacagaaauucuaccagugucuaugaccaagacaucaguagauuguacaauguacauuuguggugauucaacugaaugcagcaaucuuuuguugcaauauggcaguuuuuguacacaauuaaaccgugcuuuaacuggaauagcuguugaacaagacaaaaacacccaagaaguuuuugcacaagucaaacaaauuuacaaaacaccaccaauuaaagauuuuggugguuuuaauuuuucacaaauauuaccagauccaucaaaaccaagcaagaggucauuuauugaagaucuacuuuucaacaaagugacacuugcagaugcuggcuucaucaaacaauauggugauugccuuggugauauugcugcuagagaccucauuugugcacaaaaguuuaacggccuuacuguuuugccaccuuugcucacagaugaaaugauugcucaauacacuucugcacuguuagcggguacaaucacuucugguuggaccuuuggugcaggugcugcauuacaaauaccauuugcuaugcaaauggcuuauagguuuaaugguauuggaguuacacagaauguucucuaugagaaccaaaaauugauugccaaccaauuuaauagugcuauuggcaaaauucaagacucacuuucuuccacagcaagugcacuuggaaaacuucaagauguggucaaccaaaaugcacaagcuuuaaacacgcuuguuaaacaacuuagcuccaauuuuggugcaauuucaaguguuuuaaaugauauccuuucacgucuugacaaaguugaggcugaagugcaaauugauagguugaucacaggcagacuucaaaguuugcagacauaugugacucaacaauuaauuagagcugcagaaaucagagcuucugcuaaucuugcugcuacuaaaaugucagaguguguacuuggacaaucaaaaagaguugauuuuuguggaaagggcuaucaucuuauguccuucccucagucagcaccucaugguguagucuucuugcaugugacuuaugucccugcacaagaaaagaacuucacaacugcuccugccauuugucaugauggaaaagcacacuuuccucgugaaggugucuuuguuucaaauggcacacacugguuuguaacacaaaggaauuuuuaugaaccacaaaucauuacuacagacaacacauuugugucugguaacugugauguuguaauaggaauugucaacaacacaguuuaugauccuuugcaaccugaauuagacucauucaaggaggaguuagauaaauauuuuaagaaucauacaucaccagauguugauuuaggugacaucccuggcauuaaugcuucaguuguaaacauucaaaaagaaauugaccgccucaaugagguugccaagaauuuaaaugaaucucucaucgaucuccaagaacuuggaaaguaugagcaguauauaaaauggccaugguacauuuggcuagguuuuauagcuggcuugauugccauaguaauggugacaauuaugcuuugcuguaugaccaguugcuguaguugucucaagggcuguuguucuuguggauccugcugcaaauuugaugaagacgacucugagccagugcucaaaggagucaaauuacauuacacauaa

SEQ ID NO: 11711 - RNA, 3822 nt, Artificial Sequence
  SARS-CoV-2/USA/WA-UW261/2020__EPI_ISL_418046 spike protein CDS wt (1-1273)
auguuuguuuuucuuguuuuauugccacuagucucuagucaguguguuaaucuuacaaccagaacucaauuacccccugcauacacuaauucuuucacacgugguguuuauuacccugacaaaguuuucagauccucaguuuuacauucaacucaggacuuguucuuaccuuucuuuuccaauguuacuugguuccaugcuauacaugucucugggaccaaugguacuaagagguuugauaacccuguccuaccauuuaaugaugguguuuauuuugcuuccacugagaagucuaacauaauaagaggcuggauuuuugguacuacuuuagauucgaagacccagucccuacuuauuguuaauaacgcuacuaauguuguuauuaaagucugugaauuucaauuuuguaaugauccauuuuuggguguuuauuaccacaaaaacaacaaaaguuggauggaaagugaguucagaguuuauucuagugcgaauaauugcacuuuugaauaugucucucagccuuuucuuauggaccuugaaggaaaacaggguaauuucaaaaaucuuagggaauuuguguuuaagaauauugaugguuauuuuaaaauauauucuaagcacacgccuauuaauuuagugcgugaucucccucaggguuuuucggcuuuagaaccauugguagauuugccaauagguauuaacaucacuagguuucaaacuuuacuugcuuuacauagaaguuauuugacuccuggugauucuucuucagguuggacagcuggugcugcagcuuauuauguggguuaucuucaaccuaggacuuuucuauuaaaauauaaugaaaauggaaccauuacagaugcuguagacugugcacuugacccucucucagaaacaaaguguacguugaaauccuucacuguagaaaaaggaaucuaucaaacuucuaacuuuagaguccaaccaacagaaucuauuguuagauuuccuaauauuacaaacuugugcccuuuuggugaaguuuuuaacgccaccagauuuacaucuguuuaugcuuggaacaggaagagaaucagcaacuguguugcugauuauucuguccuauauaauuccgcaucauuuuccacuuuuaaguguuauggagugucuccuacuaaauuaaaugaucucugcuuuacuaaugucuaugcagauucauuuguaauuagaggugaugaagucagacaaaucgcuccagggcaaacuggaaagauugcugauuauaauuauaaauuaccagaugauuuuacaggcugcguuauagcuuggaauucuaacaaucuugauucuaagguuggugguaauuauaauuaccuguauagauuguuuaggaagucuaaucucaaaccuuuugagagagauauuucaacugaaaucuaucaggccgguagcacaccuuguaaugguguugaagguuuuaauuguuacuuuccuuuacaaucauaugguuuccaacccacuaaugguguugguuaccaaccauacagaguaguaguacuuucuuuugaacuucuacaugcaccagcaacuguuuguggaccuaaaaagucuacuaauuugguuaaaaacaaaugugucaauuucaacuucaaugguuuaacaggcacagguguucuuacugagucuaacaaaaaguuucugccuuuccaacaauuuggcagagacauugcugacacuacugaugcuguccgugauccacagacacuugagauucuugacauuacaccauguucuuuugguggugucaguguuauaacaccaggaacaaauacuucuaaccagguugcuguucuuuaucaggauguuaacugcacagaagucccuguugcuauucaugcagaucaacuuacuccuacuuggcguguuuauucuacagguucuaauguuuuucaaacacgugcaggcuguuuaauaggggcugaacaugucaacaacucauaugagugugacauacccauuggugcagguauaugcgcuaguuaucagacucagacuaauucuccucggcgggcacguaguguagcuagucaauccaucauugccuacacuaugucacuuggugcagaaaauucaguugcuuacucuaauaacucuauugccauacccacaaauuuuacuauuaguguuaccacagaaauucuaccagugucuaugaccaagacaucaguagauuguacaauguacauuuguggugauucaacugaaugcagcaaucuuuuguugcaauauggcaguuuuuguacacaauuaaaccgugcuuuaacuggaauagcuguugaacaagacaaaaacacccaagaaguuuuugcacaagucaaacaaauuuacaaaacaccaccaauuaaagauuuuggugguuuuaauuuuucacaaauauuaccagauccaucaaaaccaagcaagaggucauuuauugaagaucuacuuuucaacaaagugacacuugcagaugcuggcuucaucaaacaauauggugauugccuuggugauauugcugcuagagaccucauuugugcacaaaaguuuaacggccuuacuguuuugccaccuuugcucacagaugaaaugauugcucaauacacuucugcacuguuagcggguacaaucacuucugguuggaccuuuggugcaggugcugcauuacaaauaccauuugcuaugcaaauggcuuauagguuuaaugguauuggaguuacacagaauguucucuaugagaaccaaaaauugauugccaaccaauuuaauagugcuauuggcaaaauucaagacucacuuucuuccacagcaagugcacuuggaaaacuucaagauguggucaaccaaaaugcacaagcuuuaaacacgcuuguuaaacaacuuagcuccaauuuuggugcaauuucaaguguuuuaaaugauauccuuucacgucuugacaaaguugaggcugaagugcaaauugauagguugaucacaggcagacuucaaaguuugcagacauaugugacucaacaauuaauuagagcugcagaaaucagagcuucugcuaaucuugcugcuacuaaaaugucagaguguguacuuggacaaucaaaaagaguugauuuuuguggaaagggcuaucaucuuauguccuucccucagucagcaccucaugguguagucuucuugcaugugacuuaugucccugcacaagaaaagaacuucacaacugcuccugccauuugucaugauggaaaagcacacuuuccucgugaaggugucuuuguuucaaauggcacacacugguuuguaacacaaaggaauuuuuaugaaccacaaaucauuacuacagacaacacauuugugucugguaacugugauguuguaauaggaauugucaacaacacaguuuaugauccuuugcaaccugaauuagacucauucaaggaggaguuagauaaauauuuuaagaaucauacaucaccagauguugauuuaggugacaucucuggcauuaaugcuucaguuguaaacauucaaaaagaaauugaccgccucaaugagguugccaagaauuuaaaugaaucucucaucgaucuccaagaacuuggaaaguaugagcaguauauaaaauggccaugguacauuuggcuagguuuuauagcuggcuugauugccauaguaauggugacaauuaugcuuugcuguaugaccaguugcuguaguugucucaagggcuguuguucuuguggauccugcugcaaauuugaugaagacgacucugagccagugcucaaaggagucaaauuacauuacacauaa

SEQ ID NO: 11712 - RNA, 3822 nt, Artificial Sequence
  SARS-CoV-2/Portugal/PT0035/2020__EPI_ISL_418020 spike protein CDS wt (1-1273)
auguuuguuuuucuuguuuuauugccacuagucucuagucaguguguuaaucuuacaaccagaacucaauuacccccugcauacacuaauucuuucacacgugguguuuauuacccugacaaaguuuucagauccucaguuuuacauucaacucaggacuuguucuuaccuuucuuuuccaauguuacuugguuccaugcuauacaugucucugggaccaaugguacuaagagguuugauaacccuguccuaccauuuaaugaugguguuuauuuugcuuccacugagaagucuaacauaauaagaggcuggauuuuugguacuacuuuagauucgaagacccagucccuacuuauuguuaauaacgcuacuaauguuguuauuaaagucugugaauuucaauuuuguaaugauccauuuuuggguguuuauuaccacaaaaacaacaaaaguuggauggaaagugaguucagaguuuauucuagugcgaauaauugcacuuuugaauaugucucucagccuuuucuuauggaccuugaaggaaaacaggguaauuucaaaaaucuuagggaauuuguguuuaagaauauugaugguuauuuuaaaauauauucuaagcacacgccuauuaauuuagugcgugaucucccucaggguuuuucggcuuuagaaccauugguagauuugccaauagguauuaacaucacuagguuucaaacuuuacuugcuuuacauagaaguuauuugacuccuggugauucuucuucagguuggacagcuggugcugcagcuuauuauguggguuaucuucaaccuaggacuuuucuauuaaaauauaaugaaaauggaaccauuacagaugcuguagacugugcacuugacccucucucagaaacaaaguguacguugaaauccuucacuguagaaaaaggaaucuaucaaacuucuaacuuuagaguccaaccaacagaaucuauuguuagauuuccuaauauuacaaacuugugcccuuuuggugaaguuuuuaacgccaccagauuugcaucuguuuaugcuuggaacaggaagagaaucagcaacuguguugcugauuauucuguccuauauaauuccgcaucauuuuccacuuuuaaguguuauggagugucuccuacuaaauuaaaugaucucugcuuuacuaaugucuaugcagauucauuuguaauuagaggugaugaagucagacaaaucgcuccagggcaaacuggaaagauugcugauuauaauuauaaauuaccagaugauuuuacaggcugcguuauagcuuggaauucuaacaaucuugauucuaagguuggugguaauuauaauuaccuguauagauuguuuaggaagucuaaucucaaaccuuuugagagagauauuucaacugaaaucuaucaggccgguagcacaccuuguaaugguguugaagguuuuaauuguuacuuuccuuuacaaucauaugguuuccaacccacuaaugguguugguuaccaaccauacagaguaguaguacuuucuuuugaacuucuacaugcaccagcaacuguuuguggaccuaaaaagucuacuaauuugguuaaaaacaaaugugucaauuucaacuucaaugguuuaacaggcacagguguucuuacugagucuaacaaaaaguuucugccuuuccaacaauuuggcagagacauugcugacacuacugaugcuguccgugauccacagacacuugagauucuugacauuacaccauguucuuuugguggugucaguguuauaacaccaggaacaaauacuucuaaccagguugcuguucuuuaucaggauguuaacugcacagaagucccuguugcuauucaugcagaucaacuuacuccuacuuggcguguuuauucuacagguucuaauguuuuucaaacacgugcaggcuguuuaauaggggcugaacaugucaacaacucauaugagugugacauacccauuggugcagguauaugcgcuaguuaucagacucagacuaauucuccucggcgggcacguaguguagcuagucaauccaucauugccuacacuaugucacuuggugcagaaaauucaguugcuuacucuaauaacucuauugccauacccacaaauuuuacuauuaguguuaccacagaaauucuaccagugucuaugaccaagacaucaguagauuguacaauguacauuuguggugauucaacugaaugcagcaaucuuuuguugcaauauggcaguuuuuguacacaauuaaaccgugcuuuaacuggaauagcuguugaacaagacaaaaacacccaagaaguuuuugcacaagucaaacaaauuuacaaaacaccaccaauuaaagauuuuggugguuuuaauuuuucacaaauauuaccagauccaucaaaaccaagcaagaggucauuuauugaagaucuacuuuucaacaaagugacacuugcagaugcuggcuucaucaaacaauauggugauugccuuggugauauuucugcuagagaccucauuugugcacaaaaguuuaacggccuuacuguuuugccaccuuugcucacagaugaaaugauugcucaauacacuucugcacuguuagcggguacaaucacuucugguuggaccuuuggugcaggugcugcauuacaaauaccauuugcuaugcaaauggcuuauagguuuaaugguauuggaguuacacagaauguucucuaugagaaccaaaaauugauugccaaccaauuuaauagugcuauuggcaaaauucaagacucacuuucuuccacagcaagugcacuuggaaaacuucaagauguggucaaccaaaaugcacaagcuuuaaacacgcuuguuaaacaacuuagcuccaauuuuggugcaauuucaaguguuuuaaaugauauccuuucacgucuugacaaaguugaggcugaagugcaaauugauagguugaucacaggcagacuucaaaguuugcagacauaugugacucaacaauuaauuagagcugcagaaaucagagcuucugcuaaucuugcugcuacuaaaaugucagaguguguacuuggacaaucaaaaagaguugauuuuuguggaaagggcuaucaucuuauguccuucccucagucagcaccucaugguguagucuucuugcaugugacuuaugucccugcacaagaaaagaacuucacaacugcuccugccauuugucaugauggaaaagcacacuuuccucgugaaggugucuuuguuucaaauggcacacacugguuuguaacacaaaggaauuuuuaugaaccacaaaucauuacuacagacaacacauuugugucugguaacugugauguuguaauaggaauugucaacaacacaguuuaugauccuuugcaaccugaauuagacucauucaaggaggaguuagauaaauauuuuaagaaucauacaucaccagauguugauuuaggugacaucucuggcauuaaugcuucaguuguaaacauucaaaaagaaauugaccgccucaaugagguugccaagaauuuaaaugaaucucucaucgaucuccaagaacuuggaaaguaugagcaguauauaaaauggccaugguacauuuggcuagguuuuauagcuggcuugauugccauaguaauggugacaauuaugcuuugcuguaugaccaguugcuguaguugucucaagggcuguuguucuuguggauccugcugcaaauuugaugaagacgacucugagccagugcucaaaggagucaaauuacauuacacauaa

SEQ ID NO: 11713 - RNA, 3822 nt, Artificial Sequence
  SARS-CoV-2/USA/NY-NYUMC7/2020__EPI_ISL_418192 spike protein CDS wt (1-1273)
auguuuguuuuucuuguuuuauugccacuagucucuagucaguguguuaaucuuacaaccagaacucaauuacccccugcauacacuaauucuuucacacgugguguuuauuacccugacaaaguuuucagauccucaguuuuacauucaacucaggacuuguucuuaccuuucuuuuccaauguuacuugguuccaugcuauacaugucucugggaccaaugguacuaagagguuugauaacccuguccuaccauuuaaugaugguguuuauuuugcuuccacugagaagucuaacauaauaagaggcuggauuuuugguacuacuuuagauucgaagacccagucccuacuuauuguuaauaacgcuacuaauguuguuauuaaagucugugaauuucaauuuuguaaugauccauuuuuggguguuuaucaccacaaaaacaacaaaaguuggauggaaagugaguucagaguuuauucuagugcgaauaauugcacuuuugaauaugucucucagccuuuucuuauggaccuugaaggaaaacaggguaauuucaaaaaucuuagggaauuuguguuuaagaauauugaugguuauuuuaaaauauauucuaagcacacgccuauuaauuuagugcgugaucucccucaggguuuuucggcuuuagaaccauugguagauuugccaauagguauuaacaucacuagguuucaaacuuuacuugcuuuacauagaaguuauuugacuccuggugauucuucuucagguuggacagcuggugcugcagcuuauuauguggguuaucuucaaccuaggacuuuucuauuaaaauauaaugaaaauggaaccauuacagaugcuguagacugugcacuugacccucucucagaaacaaaguguacguugaaauccuucacuguagaaaaaggaaucuaucaaacuucuaacuuuagaguccaaccaacagaaucuauuguuagauuuccuaauauuacaaacuugugcccuuuuggugaaguuuuuaacgccaccagauuugcaucuguuuaugcuuggaacaggaagagaaucagcaacuguguugcugauuauucuguccuauauaauuccgcaucauuuuccacuuuuaaguguuauggagugucuccuacuaaauuaaaugaucucugcuuuacuaaugucuaugcagauucauuuguaauuagaggugaugaagucagacaaaucgcuccagggcaaacuggaaagauugcugauuauaauuauaaauuaccagaugauuuuacaggcugcguuauagcuuggaauucuaacaaucuugauucuaagguuggugguaauuauaauuaccuguauagauuguuuaggaagucuaaucucaaaccuuuugagagagauauuucaacugaaaucuaucaggccgguagcacaccuuguaaugguguugaagguuuuaauuguuacuuuccuuuacaaucauaugguuuccaacccacuaaugguguugguuaccaaccauacagaguaguaguacuuucuuuugaacuucuacaugcaccagcaacuguuuguggaccuaaaaagucuacuaauuugguuaaaaacaaaugugucaauuucaacuucaaugguuuaacaggcacagguguucuuacugagucuaacaaaaaguuucugccuuuccaacaauuuggcagagacauugcugacacuacugaugcuguccgugauccacagacacuugagauucuugacauuacaccauguucuuuugguggugucaguguuauaacaccaggaacaaauacuucuaaccagguugcuguucuuuaucaggguguuaacugcacagaagucccuguugcuauucaugcagaucaacuuacuccuacuuggcguguuuauucuacagguucuaauguuuuucaaacacgugcaggcuguuuaauaggggcugaacaugucaacaacucauaugagugugacauacccauuggugcagguauaugcgcuaguuaucagacucagacuaauucuccucggcgggcacguaguguagcuagucaauccaucauugccuacacuaugucacuuggugcagaaaauucaguugcuuacucuaauaacucuauugccauacccacaaauuuuacuauuaguguuaccacagaaauucuaccagugucuaugaccaagacaucaguagauuguacaauguacauuuguggugauucaacugaaugcagcaaucuuuuguugcaauauggcaguuuuuguacacaauuaaaccgugcuuuaacuggaauagcuguugaacaagacaaaaacacccaagaaguuuuugcacaagucaaacaaauuuacaaaacaccaccaauuaaagauuuuggugguuuuaauuuuucacaaauauuaccagauccaucaaaaccaagcaagaggucauuuauugaagaucuacuuuucaacaaagugacacuugcagaugcuggcuucaucaaacaauauggugauugccuuggugauauugcugcuagagaccucauuugugcacaaaaguuuaacggccuuacuguuuugccaccuuugcucacagaugaaaugauugcucaauacacuucugcacuguuagcggguacaaucacuucugguuggaccuuuggugcaggugcugcauuacaaauaccauuugcuaugcaaauggcuuauagguuuaaugguauuggaguuacacagaauguucucuaugagaaccaaaaauugauugccaaccaauuuaauagugcuauuggcaaaauucaagacucacuuucuuccacagcaagugcacuuggaaaacuucaagauguggucaaccaaaaugcacaagcuuuaaacacgcuuguuaaacaacuuagcuccaauuuuggugcaauuucaaguguuuuaaaugauauccuuucacgucuugacaaaguugaggcugaagugcaaauugauagguugaucacaggcagacuucaaaguuugcagacauaugugacucaacaauuaauuagagcugcagaaaucagagcuucugcuaaucuugcugcuacuaaaaugucagaguguguacuuggacaaucaaaaagaguugauuuuuguggaaagggcuaucaucuuauguccuucccucagucagcaccucaugguguagucuucuugcaugugacuuaugucccugcacaagaaaagaacuucacaacugcuccugccauuugucaugauggaaaagcacacuuuccucgugaaggugucuuuguuucaaauggcacacacugguuuguaacacaaaggaauuuuuaugaaccacaaaucauuacuacagacaacacauuugugucugguaacugugauguuguaauaggaauugucaacaacacaguuuaugauccuuugcaaccugaauuagacucauucaaggaggaguuagauaaauauuuuaagaaucauacaucaccagauguugauuuaggugacaucucuggcauuaaugcuucaguuguaaacauucaaaaagaaauugaccgccucaaugagguugccaagaauuuaaaugaaucucucaucgaucuccaagaacuuggaaaguaugagcaguauauaaaauggccaugguacauuuggcuagguuuuauagcuggcuugauugccauaguaauggugacaauuaugcuuugcuguaugaccaguugcuguaguugucucaagggcuguuguucuuguggauccugcugcaaauuugaugaagacgacucugagccagugcucaaaggagucaaauuacauuacacauaa

SEQ ID NO: 11714 - RNA, 3822 nt, Artificial Sequence
  SARS-CoV-2/Iceland/189/2020__EPI_ISL_417709 spike protein CDS wt (1-1273)
auguuuguuuuucuuguuuuauugccacuagucucuagucaguguguuaaucuuacaaccagaacucaauuacccccugcauacacuaauucuuucacacgugguguuuauuacccugacaaaguuuucagauccucaguuuuacauucaacucaggacuuguucuuaccuuucuuuuccaauguuacuugguuccaugcuauacaugucucugggaccaaugguacuaagagguuugauaacccuguccuaccauuuaaugaugguguuuauuuugcuuccacugagaagucuaacauaauaagaggcuggauuuuugguacuacuuuagauucgaagacccagucccuacuuauuguuaauaacgcuacuaauguuguuauuaaagucugugaauuucaauuuuguaaugauccauuuuuggguguuuauuaccacaaaaacaacaaaaguuggauggaaagugaguucagaguuuauucuagugcgaauaauugcacuuuugaauaugucucucagccuuuucuuauggaccuugaaggaaaacaggguaauuucaaaaaucuuagggaauuuguguuuaagaauauugaugguuauuuuaaaauauauucuaagcacacgccuauuaauuuagugcgugaucucccucaggguuuuucggcuuuagaaccauugguagauuugccaauagguauuaacaucacuagguuucaaacuuuacuugcuuuacauagaaguuauuugacuccuggugauucuucuucagguuggacagcuggugcugcagcuuauuauguggguuaucuucaaccuaggacuuuucuauuaaaauauaaugaaaauggaaccauuacagaugcuguagacugugcacuugacccucucucagaaacaaaguguacguugaaauccuucacuguagaaaaaggaaucuaucaaacuucuaacuuuagaguccaaccaacagaaucuauuguuagauuuccuaauauuacaaacuugugcccuuuuggugaaguuuuuaacgccaccagauuugcaucuguuuaugcuuggaacaggaagagaaucagcaacuguguugcugauuauucuguccuauauaauuccgcaucauuuuccacuuuuaaguguuauggagugucuccuacuaaauuaaaugaucucugcuuuacuaaugucuaugcagauucauuuguaauuagaggugaugaagucagacaaaucgcuccagggcaaacuggaaagauugcugauuauaauuauaaauuaccagaugauuuuacaggcugcguuauagcuuggaauucuaacaaucuugauucuaagguuggugguaauuauaauuaccuguauagauuguuuaggaagucuaaucucaaaccuuuugagagagauauuucaacugaaaucuaucaggccgguagcacaccuuguaaugguguugaagguuuuaauuguuacuuuccuuuacaaucauaugguuuccaacccacuaaugguguugguuaccaaccauacagaguaguaguacuuucuuuugaacuucuacaugcaccagcaacuguuuguggaccuaaaaagucuacuaauuugguuaaaaacaaaugugucaauuucaacuucaaugguuuaacaggcacagguguucuuacugagucuaacaaaaaguuucugccuuuccaacaauuuggcagagacauugcugacacuacugaugcuguccgugauccacagacacuugagauucuugacauuacaccauguucuuuugguggugucaguguuauaacaccaggaacaaauacuucuaaccagguugcuguucuuuaucaggguguuaacugcacagaagucccuguugcuauucaugcagaucaacuuacuccuacuuggcguguuuauucuacagguucuaauguuuuucaaacacgugcaggcuguuuaauaggggcugaacaugucaacaacucauaugagugugacauacccauuggugcagguauaugcgcuaguuaucagacucagacuaauucuccucggcgggcacguaguguagcuagucaauccaucauugccuacacuaugucacuuggugcagaaaauucaguugcuuacucuaauaacucuauugccauacccacaaauuuuacuauuaguguuaccacagaaauucuaccagugucuaugaccaagacaucaguagauuguacaauguacauuuguggugauucaacugaaugcagcaaucuuuuguugcaauauggcaguuuuuguacacaauuaaaccgugcuuuaacuggaauagcuguugaacaagacaaaaacacccaagaaguuuuugcacaagucaaacaaauuuacaaaacaccaccaauuaaagauuuuggugguuuuaauuuuucacaaauauuaccagauccaucaaaaccaagcaagaggucauuuauugaagaucuacuuuucaacaaagugacacuugcagaugcuggcuucaccaaacaauauggugauugccuuggugauauugcugcuagagaccucauuugugcacaaaaguuuaacggccuuacuguuuugccaccuuugcucacagaugaaaugauugcucaauacacuucugcacuguuagcggguacaaucacuucugguuggaccuuuggugcaggugcugcauuacaaauaccauuugcuaugcaaauggcuuauagguuuaaugguauuggaguuacacagaauguucucuaugagaaccaaaaauugauugccaaccaauuuaauagugcuauuggcaaaauucaagacucacuuucuuccacagcaagugcacuuggaaaacuucaagauguggucaaccaaaaugcacaagcuuuaaacacgcuuguuaaacaacuuagcuccaauuuuggugcaauuucaaguguuuuaaaugauauccuuucacgucuugacaaaguugaggcugaagugcaaauugauagguugaucacaggcagacuucaaaguuugcagacauaugugacucaacaauuaauuagagcugcagaaaucagagcuucugcuaaucuugcugcuacuaaaaugucagaguguguacuuggacaaucaaaaagaguugauuuuuguggaaagggcuaucaucuuauguccuucccucagucagcaccucaugguguagucuucuugcaugugacuuaugucccugcacaagaaaagaacuucacaacugcuccugccauuugucaugauggaaaagcacacuuuccucgugaaggugucuuuguuucaaauggcacacacugguuuguaacacaaaggaauuuuuaugaaccacaaaucauuacuacagacaacacauuugugucugguaacugugauguuguaauaggaauugucaacaacacaguuuaugauccuuugcaaccugaauuagacucauucaaggaggaguuagauaaauauuuuaagaaucauacaucaccagauguugauuuaggugacaucucuggcauuaaugcuucaguuguaaacauucaaaaagaaauugaccgccucaaugagguugccaagaauuuaaaugaaucucucaucgaucuccaagaacuuggaaaguaugagcaguauauaaaauggccaugguacauuuggcuagguuuuauagcuggcuugauugccauaguaauggugacaauuaugcuuugcuguaugaccaguugcuguaguugucucaagggcuguuguucuuguggauccugcugcaaauuugaugaagacgacucugagccagugcucaaaggagucaaauuacauuacacauaa

SEQ ID NO: 11715 - RNA, 3822 nt, Artificial Sequence
  SARS-CoV-2/Australia/NSW56/2020__EPI_ISL_417408 spike protein CDS wt (1-1273)
auguuuguuuuucuuguuuuauugccacuagucucuagucaguguguuaaucuuacaaccagaacucaauuacccccugcauacacuaauucuuucacacgugguguuuauuacccugacaaaguuuucagauccucaguuuuacauucaacucaggacuuguucuuaccuuucuuuuccaauguuacuugguuccaugcuauacaugucucugggaccaaugguacuaagagguuugauaacccuguccuaccauuuaaugaugguguuuauuuugcuuccacugagaagucuaacauaauaagaggcuggauuuuugguacuacuuuagauucgaagacccagucccuacuuauuguuaauaacgcuacuaauguuguuauuaaagucugugaauuucaauuuuguaaugauccauuuuuggguguuuauuaccacaaaaacaacaaaaguuggauggaaagugaguucagaguuuauucuagugcgaauaauugcacuuuugaauaugucucucagccuuuucuuauggaccuugaaggaaaacaggguaauuucaaaaaucuuagggaauuuguguuuaagaauauugaugguuauuuuaaaauauauucuaagcacacgccuauuaauuuagugcgugaucucccucaggguuuuucggcuuuagaaccauugguagauuugccaauagguauuaacaucacuagguuucaaacuuuacuugcuuuacauagaaguuauuugacuccuggugauucuucuucagguuggacagcuggugcugcagcuuauuauguggguuaucuucaaccuaggacuuuucuauuaaaauauaaugaaaauggaaccauuacagaugcuguagacugugcacuugacccucucucagaaacaaaguguacguugaaauccuucacuguagaaaaaggaaucuaucaaacuucuaacuuuagaguccaaccaacagaaucuauuguuagauuuccuaauauuacaaacuugugcccuuuuggugaaguuuuuaacgccaccagauuugcaucuguuuaugcuuggaacaggaagagaaucagcaacuguguugcugauuauucuguccuauauaauuccgcaucauuuuccacuuuuaaguguuauggagugucuccuacuaaauuaaaugaucucugcuuuacuaaugucuaugcagauucauuuguaauuagaggugaugaagucagacaaaucgcuccagggcaaacuggaaagauugcugauuauaauuauaaauuaccagaugauuuuacaggcugcguuauagcuuggaauucuaacaaucuugauucuaagguuggugguaauuauaauuaccuguauagauuguuuaggaagucuaaucucaaaccuuuugagagagauauuucaacugaaaucuaucaggccgguagcacaccuuguaaugguguugaagguuuuaauuguuacuuuccuuuacaaucauaugguuuccaacccacuaaugguguugguuaccaaccauacagaguaguaguacuuucuuuugaacuucuacaugcaccagcaacuguuuguggaccuaaaaagucuacuaauuugguuaaaaacaaaugugucaauuucaacuucaaugguuuaacaggcacagguguucuuacugagucuaacaaaaaguuucugccuuuccaacaauuuggcagagacauugcugacacuacugaugcuguccgugauccacagacacuugagauucuugacauuacaccauguucuuuugguggugucaguguuauaacaccaggaacaaauacuucuaaccagguugcuguucuuuaucaggauguuaacugcacagaagucccuguugcuauucaugcagaucaacuuacuccuacuuggcguguuuauucuacagguucuaauguuuuucaaacacgugcaggcuguuuaauaggggcugaacaugucaacaacucauaugagugugacauacccauuggugcagguauaugcgcuaguuaucagacucagacuaauucuccucggcgggcacguaguguagcuagucaauccaucauugccuacacuaugucacuuggugcagaaaauucaguugcuuacucuaauaacucuauugccauacccacaaauuuuacuauuaguguuaccacagaaauucuaccagugucuaugaccaagacaucaguagauuguacaauguacauuuguggugauucaacugaaugcagcaaucuuuuguugcaauauggcaguuuuuguacacaauuaaaccgugcuuuaacuggaauagcuguugaacaagacaaaaacacccaagaaguuuuugcacaagucaaacaaauuuacaaaacaccaccaauuaaagauuuuggugguuuuaauuuuucacaaauauuaccagauucaucaaaaccaagcaagaggucauuuauugaagaucuacuuuucaacaaagugacacuugcagaugcuggcuucaucaaacaauauggugauugccuuggugauauugcugcuagagaccucauuugugcacaaaaguuuaacggccuuacuguuuugccaccuuugcucacagaugaaaugauugcucaauacacuucugcacuguuagcggguacaaucacuucugguuggaccuuuggugcaggugcugcauuacaaauaccauuugcuaugcaaauggcuuauagguuuaaugguauuggaguuacacagaauguucucuaugagaaccaaaaauugauugccaaccaauuuaauagugcuauuggcaaaauucaagacucacuuucuuccacagcaagugcacuuggaaaacuucaagauguggucaaccaaaaugcacaagcuuuaaacacgcuuguuaaacaacuuagcuccaauuuuggugcaauuucaaguguuuuaaaugauauccuuucacgucuugacaaaguugaggcugaagugcaaauugauagguugaucacaggcagacuucaaaguuugcagacauaugugacucaacaauuaauuagagcugcagaaaucagagcuucugcuaaucuugcugcuacuaaaaugucagaguguguacuuggacaaucaaaaagaguugauuuuuguggaaagggcuaucaucuuauguccuucccucagucagcaccucaugguguagucuucuugcaugugacuuaugucccugcacaagaaaagaacuucacaacugcuccugccauuugucaugauggaaaagcacacuuuccucgugaaggugucuuuguuucaaauggcacacacugguuuguaacacaaaggaauuuuuaugaaccacaaaucauuacuacagacaacacauuugugucugguaacugugauguuguaauaggaauugucaacaacacaguuuaugauccuuugcaaccugaauuagacucauucaaggaggaguuagauaaauauuuuaagaaucauacaucaccagauguugauuuaggugacaucucuggcauuaaugcuucaguuguaaacauucaaaaagaaauugaccgccucaaugagguugccaagaauuuaaaugaaucucucaucgaucuccaagaacuuggaaaguaugagcaguauauaaaauggccaugguacauuuggcuagguuuuauagcuggcuugauugccauaguaauggugacaauuaugcuuugcuguaugaccaguugcuguaguugucucaagggcuguuguucuuguggauccugcugcaaauuugaugaagacgacucugagccagugcucaaaggagucaaauuacauuacacauaa

SEQ ID NO: 11716 - RNA, 3822 nt, Artificial Sequence
  SARS-CoV-2/Iceland/280/2020__EPI_ISL_417608 spike protein CDS wt (1-1273)
auguuuguuuuucuuguuuuauugccacuagucucuagucaguguguuaaucuuacaaccagaacucaauuacccccugcauacacuaauucuuucacacgugguguuuauuacccugacaaaguuuucagauccucaguuuuacauucaacucaggacuuguucuuaccuuucuuuuccaauguuacuugguuccaugcuauacaugucucugggaccaaugguacuaagagguuugauaacccuguccuaccauuuaaugaugguguuuauuuugcuuccacugagaagucuaacauaauaagaggcuggauuuuugguacuacuuuagauucgaagacccagucccuacuuauuguuaauaacgcuacuaauguuguuauuaaagucugugaauuucaauuuuguaaugauccauuuuuggguguuuauuaccacaaaaacaacaaaaguuggauggaaagugaguucagaguuuauucuagugcgaauaauugcacuuuugaauaugucucucagccuuuucuuauggaccuugaaggaaaacaggguaauuucaaaaaucuuagggaauuuguguuuaagaauauugaugguuauuuuaaaauauauucuaagcacacgccuauuaauuuagugcgugaucucccucaggguuuuucggcuuuagaaccauugguagauuugccaauagguauuaacaucacuagguuucaaacuuuacuugcuuuacauagaaguuauuugacuccuggugauucuucuucagguuggacagcuggugcugcagcuuauuauguggguuaucuucaaccuaggacuuuucuauuaaaauauaaugaaaauggaaccauuacagaugcuguagacugugcacuugacccucucucagaaacaaaguguacguugaaauccuucacuguagaaaaaggaaucuaucaaacuucuaacuuuagaguccaaccaacagaaucuauuguuagauuuccuaauauuacaaacuugugcccuuuuggugaaguuuuuaacgccaccagauuugcaucuguuuaugcuuggaacaggaagagaaucagcaacuguguugcugauuauucuguccuauauaauuccgcaucauuuuccacuuuuaaguguuauggagugucuccuacuaaauuaaaugaucucugcuuuacuaaugucuaugcagauucauuuguaauuagaggugaugaagucagacaaaucgcuccagggcaaacuggaaagauugcugauuauaauuauaaauuaccagaugauuuuacaggcugcguuauagcuuggaauucuaacaaucuugauucuaagguuggugguaauuauaauuaccuguauagauuguuuaggaagucuaaucucaaaccuuuugagagagauauuucaacugaaaucuaucaggccgguagcacaccuuguaaugguguugaagguuuuaauuguuacuuuccuuuacaaucauaugguuuccaacccacuaaugguguugguuaccaaccauacagaguaguaguacuuucuuuugaacuucuacaugcaccagcaacuguuuguggaccuaaaaagucuacuaauuugguuaaaaacaaaugugucaauuucaacuucaaugguuuaacaggcacagguguucuuacugagucuaacaaaaaguuucugccuuuccaacaauuuggcagagacauugcugacacuacugaugcuguccgugauccacagacacuugagauucuugacauuacaccauguucuuuugguggugucaguguuauaacaccaggaacaaauacuucuaaccagguugcuguucuuuaucaggguguuaacugcacagaagucccuguugcuauucaugcagaucaacuuacuccuacuuggcguguuuauucuacagguucuaauguuuuucaaacacgugcaggcuguuuaauaggggcugaacaugucaacaacucauaugagugugacauacccauuggugcagguauaugcgcuaguuaucauacucagacuaauucuccucggcgggcacguaguguagcuagucaauccaucauugccuacacuaugucacuuggugcagaaaauucaguugcuuacucuaauaacucuauugccauacccacaaauuuuacuauuaguguuaccacagaaauucuaccagugucuaugaccaagacaucaguagauuguacaauguacauuuguggugauucaacugaaugcagcaaucuuuuguugcaauauggcaguuuuuguacacaauuaaaccgugcuuuaacuggaauagcuguugaacaagacaaaaacacccaagaaguuuuugcacaagucaaacaaauuuacaaaacaccaccaauuaaagauuuuggugguuuuaauuuuucacaaauauuaccagauccaucaaaaccaagcaagaggucauuuauugaagaucuacuuuucaacaaagugacacuugcagaugcuggcuucaucaaacaauauggugauugccuuggugauauugcugcuagagaccucauuugugcacaaaaguuuaacggccuuacuguuuugccaccuuugcucacagaugaaaugauugcucaauacacuucugcacuguuagcggguacaaucacuucugguuggaccuuuggugcaggugcugcauuacaaauaccauuugcuaugcaaauggcuuauagguuuaaugguauuggaguuacacagaauguucucuaugagaaccaaaaauugauugccaaccaauuuaauagugcuauuggcaaaauucaagacucacuuucuuccacagcaagugcacuuggaaaacuucaagauguggucaaccaaaaugcacaagcuuuaaacacgcuuguuaaacaacuuagcuccaauuuuggugcaauuucaaguguuuuaaaugauauccuuucacgucuugacaaaguugaggcugaagugcaaauugauagguugaucacaggcagacuucaaaguuugcagacauaugugacucaacaauuaauuagagcugcagaaaucagagcuucugcuaaucuugcugcuacuaaaaugucagaguguguacuuggacaaucaaaaagaguugauuuuuguggaaagggcuaucaucuuauguccuucccucagucagcaccucaugguguagucuucuugcaugugacuuaugucccugcacaagaaaagaacuucacaacugcuccugccauuugucaugauggaaaagcacacuuuccucgugaaggugucuuuguuucaaauggcacacacugguuuguaacacaaaggaauuuuuaugaaccacaaaucauuacuacagacaacacauuugugucugguaacugugauguuguaauaggaauugucaacaacacaguuuaugauccuuugcaaccugaauuagacucauucaaggaggaguuagauaaauauuuuaagaaucauacaucaccagauguugauuuaggugacaucucuggcauuaaugcuucaguuguaaacauucaaaaagaaauugaccgccucaaugagguugccaagaauuuaaaugaaucucucaucgaucuccaagaacuuggaaaguaugagcaguauauaaaauggccaugguacauuuggcuagguuuuauagcuggcuugauugccauaguaauggugacaauuaugcuuugcuguaugaccaguugcuguaguugucucaagggcuguuguucuuguggauccugcugcaaauuugaugaagacgacucugagccagugcucaaaggagucaaauuacauuacacauaa

SEQ ID NO: 11717 - RNA, 3822 nt, Artificial Sequence
  SARS-CoV-2/Iceland/247/2020__EPI_ISL_417575 spike protein CDS wt (1-1273)
auguuuguuuuucuuguuuuauugccacuagucucuagucaguguguuaaucuuacaaccagaacucaauuacccccugcauacacuaauucuuucacacgugguguuuauuacccugacaaaguuuucagauccucaguuuuacauucaacucaggacuuguucuuaccuuucuuuuccaauguuacuugguuccaugcuauacaugucucugggaccaaugguacuaagagguuugauaacccuguccuaccauuuaaugaugguguuuauuuugcuuccacugagaagucuaacauaauaagaggcuggauuuuugguacuacuuuagauucgaagacccagucccuacuuauuguuaauaacgcuacuaauguuguuauuaaagucugugaauuucaauuuuguaaugauccauuuuuggguguuuauuaccacaaaaacaacaaaaguuggauggaaagugaguucagaguuuauucuagugcgaauaauugcacuuuugaauaugucucucagccuuuucuuauggaccuugaaggaaaacaggguaauuucaaaaaucuuagggaauuuguguuuaagaauauugaugguuauuuuaaaauauauucuaagcacacgccuauuaauuuagugcgugaucucccucaggguuuuucggcuuuagaaccauugguagauuugccaauagguauuaacaucacuagguuucaaacuuuacuugcuuuacauagaaguuauuugacuccuggugauucuucuucagguuggacagcuggugcugcagcuuauuauguggguuaucuucaaccuaggacuuuucuauuaaaauauaaugaaaauggaaccauuacagaugcuguagacugugcacuugacccucucucagaaacaaaguguacguugaaauccuucacuguagaaaaaggaaucuaucaaacuucuaacuuuagaguccaaccaacagaaucuauuguuagauuuccuaauauuacaaacuugugcccuuuuggugaaguuuuuaacgccaccagauuugcaucuguuuaugcuuggaacaggaagagaaucagcaacuguguugcugauuauucuguccuauauaauuccgcaucauuuuccacuuuuaaguguuauggagugucuccuacuaaauuaaaugaucucugcuuuacuaaugucuaugcagauucauuuguaauuagaggugaugaagucagacaaaucgcuccagggcaaacuggaaagauugcugauuauaauuauaaauuaccagaugauuuuacaggcugcguuauagcuuggaauucuaacaaucuugauucuaagguuggugguaauuauaauuaccuguauagauuguuuaggaagucuaaucucaaaccuuuugagagagauauuucaacugaaaucuaucaggccgguagcacaccuuguaaugguguugaagguuuuaauuguuacuuuccuuuacaaucauaugguuuccaacccacuaaugguguugguuaccaaccauacagaguaguaguacuuucuuuugaacuucuacaugcaccagcaacuguuuguggaccuaaaaagucuacuaauuugguuaaaaacaaaugugucaauuucaacuucaaugguuuaacaggcacagguguucuuacugagucuaacaaaaaguuucugccuuuccaacaauuuggcagagacauugcugacacuacugaugcuguccgugauccacagacacuugagauucuugacauuacaccauguucuuuugguggugucaguguuauaacaccaggaacaaauacuucuaaccagguugcuguucuuuaucaggguguuaacugcacagaagucccuguugcuauucaugcagaucaacuuacuccuacuuggcguguuuauucuacagguucuaauguuuuucaaacacgugcaggcuguuuaauaggggcugaacaugucaacaacucauaugagugugacauacccauuggugcagguauaugcgcuaguuaucagacucagacuaauucuccucggcgggcacguaguguagcuagucaauccaucauugccuacacuaugucacuuggugcagaaaauucaguugcuuacucuaauaacucuauugccauacccacaaauuuuacuauuaguguuaccacagaaauucuaccagugucuaugaccaagacaucaguagauuguacaauguacauuuguggugauucaacugaaugcagcaaucuuuuguugcaauauggcaguuuuuguacacaauuaaaccgugcuuuaacuggaauagcuguugaacaagacaaaaacacccaagaaguuuuugcacaagucaaacaaauuuacaaaacaccaccaauuaaagauuuuggugguuuuaauuuuucacaaauauuaccagauccaucaaaaccaagcaagaggucauuuauugaagaucuacuuuucaacaaagugacacuugcagaugcuggcuucaucaaacaauauggugauugccuuggugauauugcugcuagagaccucauuugugcacaaaaguuuaacggccuuacuguuuugccaccuuugcucacagaugaaaugauugcucaauacacuucugcacuguuagcggguacaaucacuucugguuggaccuuuggugcaggugcugcauuacaaauaccauuugcuaugcaaauggcuuauagguuuaaugguauuggaguuacacagaauguucucuaugagaaccaaaaauugauugccaaccaauuuaauagugcuauuggcaaaauucaagacucacuuucuuccacagcaagugcacuuggaaaacuucaagauguggucaaccaaaaugcacaagcuuuaaacacgcuuguuaaacaacuuagcuccaauuuuggugcaauuucaaguguuuuaaaugauauccuuucacgucuugacaaaguugaggcugaagugcaaauugauagguugaucacaggcagacuucaaaguuugcagacauaugugacucaacaauuaauuagagcugcagaaaucagagcuucugcuaaucuugcugcuacuaaaaugucagaguguguacuuggacaaucaaaaagaguugauuuuuguggaaagggcuaucaucuuauguccuucccucagucagcaccucaugguguagucuucuugcaugugacuuaugucccugcacaagaaaagaacuucacaacugcuccugccauuugucaugauggaaaagcacacuuuccucgugaaggugucuuuguuucaaauggcacacacugguuuguaacacaaaggaauuuuuaugaaccacaaaucauuacuacagacaacacauuugugucugguaacugugauguuguaauaggaauugucaacaacacaguuuaugauccuuugcaaccugaauuagacucauucaaggaggaguuagauaaauauuuuaagaaucauacaucaccagauguugauuuaggugacaucucuggcauuaaugcuucaguuguaaacauucaaaaagaaauugaccgccucaaugagguugccaagaauuuaaaugaaucucucaucgaucuccaagaacuuggaaaguaugagcaguauauaaaauggccaugguacauuuggcuagguuuuauagcuggcuugauugccauaguaauugugacaauuaugcuuugcuguaugaccaguugcuguaguugucucaagggcuguuguucuuguggauccugcugcaaauuugaugaagacgacucugagccagugcucaaaggagucaaauuacauuacacauaa

SEQ ID NO: 11718 - RNA, 3822 nt, Artificial Sequence
  SARS-CoV-2/Iceland/238/2020__EPI_ISL_417566 spike protein CDS wt (1-1273)
auguuuguuuuucuuguuuuauugccacuagucucuagucaguguguuaaucuuacaaccagaacucaauuacccccugcauacacuaauucuuucacacgugguguuuauuacccugacaaaguuuucagauccucaguuuuacauucaacucaggacuuguucuuaccuuucuuuuccaauguuacuugguuccaugcuauacaugucucugggaccaaugguacuaagagguuugauaacccuguccuaccauuuaaugaugguguuuauuuugcuuccacugagaagucuaacauaauaagaggcuggauuuuugguacuacuuuagauucgaagacccagucccuacuuauuguuaauaacgcuacuaauguuguuauuaaagucugugaauuucaauuuuguaaugauccauuuuuggguguuuauuaccacaaaaacaacaaaaguuggauggaaagugaguucagaguuuauucuagugcgaauaauugcacuuuugaauaugucucucagccuuuucuuauggaccuugaaggaaaacaggguaauuucaaaaaucuuagggaauuuguguuuaagaauauugaugguuauuuuaaaauauauucuaagcacacgccuauuaauuuagugcgugaucucccucaggguuuuucggcuuuagaaccauugguagauuugccaauagguauuaacaucacuagguuucaaacuuuacuugcuuuacauagaaguuauuugacuccuggugauucuucuucagguuggacagcuggugcugcagcuuauuauguggguuaucuucaaccuaggacuuuucuauuaaaauauaaugaaaauggaaccauuacagaugcuguagacugugcacuugacccucucucagaaacaaaguguacguugaaauccuucacuguagaaaaaggaaucuaucaaacuucuaacuuuagaguccaaccaacagaaucuauuguuagauuuccuaauauuacaaacuugugcccuuuuggugaaguuuuuaacgccaccagauuugcaucuguuuaugcuuggaacaggaagagaaucagcaacuguguugcugauuauucuguccuauauaauuccgcaucauuuuccacuuuuaaguguuauggagugucuccuacuaaauuaaaugaucucugcuuuacuaaugucuaugcagauucauuuguaauuagaggugaugaagucagacaaaucgcuccagggcaaacuggaaagauugcugauuauaauuauaaauuaccagaugauuuuacaggcugcguuauagcuuggaauucuaacaaucuugauucuaagguuggugguaauuauaauuaccuguauagauuguuuaggaagucuaaucucaaaccuuuugagagagauauuucaacugaaaucuaucaggccgguagcacaccuuguaaugguguugaagguuuuaauuguuacuuuccuuuacaaucauaugguuuccaacccacuaaugguguugguuaccaaccauacagaguaguaguacuuucuuuugaacuucuacaugcaccagcaacuguuuguggaccuaaaaagucuacuaauuugguuaaaaacaaaugugucaauuucaacuucaaugguuuaacaggcacagguguucuuacugagucuaacaaaaaguuucugccuuuccaacaauuuggcagagacauugcugacacuacugaugcuguccgugauccacagacacuugagauucuugacauuacaccauguucuuuugguggugucaguguuauaacaccaggaacaaauacuucuaaccagguugcuguucuuuaucaggguguuaacugcacagaagucccuguugcuauucaugcagaucaacuuacuccuacuuggcguguuuauucuacagguucuaauguuuuucaaacacgugcaggcuguuuaauaggggcugaacaugucaacaacucauaugagugugacauacccauuggugcagguauaugcgcuaguuaucagacucagacuaauucuccucggcgggcacguaguguagcuagucaauccaucauugccuacacuaugucacuuggugcagaaaauucaguugcuuacucuaauaacucuauugccauacccacaaauuuuacuauuaguguuaccacagaaauucuaccagugucuaugaccaagacaucaguagauuguacaauguacauuuguggugauucaacugaaugcagcaaucuuuuguugcaauauggcaguuuuuguacacaauuaaaccgugcuuuaacuggaauagcuguugaacaagacaaaaacacccaagaaguuuuugcacaagucaaacaaauuuacaaaacaccaccaauuaaagauuuuggugguuuuaauuuuucacaaauauuaccagauccaucaaaaccaagcaagaggucauuuauugaagaucuacuuuucaacaaagugacacuugcagauguuggcuucaucaaacaauauggugauugccuuggugauauugcugcuagagaccucauuugugcacaaaaguuuaacggccuuacuguuuugccaccuuugcucacagaugaaaugauugcucaauacacuucugcacuguuagcggguacaaucacuucugguuggaccuuuggugcaggugcugcauuacaaauaccauuugcuaugcaaauggcuuauagguuuaaugguauuggaguuacacagaauguucucuaugagaaccaaaaauugauugccaaccaauuuaauagugcuauuggcaaaauucaagacucacuuucuuccacagcaagugcacuuggaaaacuucaagauguggucaaccaaaaugcacaagcuuuaaacacgcuuguuaaacaacuuagcuccaauuuuggugcaauuucaaguguuuuaaaugauauccuuucacgucuugacaaaguugaggcugaagugcaaauugauagguugaucacaggcagacuucaaaguuugcagacauaugugacucaacaauuaauuagagcugcagaaaucagagcuucugcuaaucuugcugcuacuaaaaugucagaguguguacuuggacaaucaaaaagaguugauuuuuguggaaagggcuaucaucuuauguccuucccucagucagcaccucaugguguagucuucuugcaugugacuuaugucccugcacaagaaaagaacuucacaacugcuccugccauuugucaugauggaaaagcacacuuuccucgugaaggugucuuuguuucaaauggcacacacugguuuguaacacaaaggaauuuuuaugaaccacaaaucauuacuacagacaacacauuugugucugguaacugugauguuguaauaggaauugucaacaacacaguuuaugauccuuugcaaccugaauuagacucauucaaggaggaguuagauaaauauuuuaagaaucauacaucaccagauguugauuuaggugacaucucuggcauuaaugcuucaguuguaaacauucaaaaagaaauugaccgccucaaugagguugccaagaauuuaaaugaaucucucaucgaucuccaagaacuuggaaaguaugagcaguauauaaaauggccaugguacauuuggcuagguuuuauagcuggcuugauugccauaguaauggugacaauuaugcuuugcuguaugaccaguugcuguaguugucucaagggcuguuguucuuguggauccugcugcaaauuugaugaagacgacucugagccagugcucaaaggagucaaauuacauuacacauaa

SEQ ID NO: 11719 - RNA, 3822 nt, Artificial Sequence
  SARS-CoV-2/Greece/16/2020__EPI_ISL_418265 spike protein CDS wt (1-1273)
auguuuguuuuucuuguuuuauugccacuagucucuagucaguguguuaaucuuacaaccagaacucaauuacccccugcauacacuaauucuuucacacgugguguuuauuacccugacaaaguuuucagauccucaguuuuacauucaacucaggacuuguucuuaccuuucuuuuccaauguuacuugguuccaugcuauacaugucucugggaccaaugguacuaagagguuugauaacccuguccuaccauuuaaugaugguguuuauuuugcuuccacugagaagucuaacauaauaagaggcuggauuuuugguacuacuuuagauucgaagacccagucccuacuuauuguuaauaacgcuacuaauguuguuauuaaagucugugaauuucaauuuuguaaugauccauuuuuggguguuuauuaccacaaaaacaacaaaaguuggauggaaagugaguucagaguuuauucuagugcgaauaauugcacuuuugaauaugucucucagccuuuucuuauggaccuugaaggaaaacaggguaauuucaaaaaucuuagggaauuuguguuuaagaauguugaugguuauuuuaaaauauauucuaagcacacgccuauuaauuuagugcgugaucucccucaggguuuuucggcuuuagaaccauugguagauuugccaauagguauuaacaucacuagguuucaaacuuuacuugcuuuacauagaaguuauuugacuccuggugauucuucuucagguuggacagcuggugcugcagcuuauuauguggguuaucuucaaccuaggacuuuucuauuaaaauauaaugaaaauggaaccauuacagaugcuguagacugugcacuugacccucucucagaaacaaaguguacguugaaauccuucacuguagaaaaaggaaucuaucaaacuucuaacuuuagaguccaaccaacagaaucuauuguuagauuuccuaauauuacaaacuugugcccuuuuggugaaguuuuuaacgccaccagauuugcaucuguuuaugcuuggaacaggaagagaaucagcaacuguguugcugauuauucuguccuauauaauuccgcaucauuuuccacuuuuaaguguuauggagugucuccuacuaaauuaaaugaucucugcuuuacuaaugucuaugcagauucauuuguaauuagaggugaugaagucagacaaaucgcuccagggcaaacuggaaagauugcugauuauaauuauaaauuaccagaugauuuuacaggcugcguuauagcuuggaauucuaacaaucuugauucuaagguuggugguaauuauaauuaccuguauagauuguuuaggaagucuaaucucaaaccuuuugagagagauauuucaacugaaaucuaucaggccgguagcacaccuuguaaugguguugaagguuuuaauuguuacuuuccuuuacaaucauaugguuuccaacccacuaaugguguugguuaccaaccauacagaguaguaguacuuucuuuugaacuucuacaugcaccagcaacuguuuguggaccuaaaaagucuacuaauuugguuaaaaacaaaugugucaauuucaacuucaaugguuuaacaggcacagguguucuuacugagucuaacaaaaaguuucugccuuuccaacaauuuggcagagacauugcugacacuacugaugcuguccgugauccacagacacuugagauucuugacauuacaccauguucuuuugguggugucaguguuauaacaccaggaacaaauacuucuaaccagguugcuguucuuuaucaggauguuaacugcacagaagucccuguugcuauucaugcagaucaacuuacuccuacuuggcguguuuauucuacagguucuaauguuuuucaaacacgugcaggcuguuuaauaggggcugaacaugucaacaacucauaugagugugacauacccauuggugcagguauaugcgcuaguuaucagacucagacuaauucuccucggcgggcacguaguguagcuagucaauccaucauugccuacacuaugucacuuggugcagaaaauucaguugcuuacucuaauaacucuauugccauacccacaaauuuuacuauuaguguuaccacagaaauucuaccagugucuaugaccaagacaucaguagauuguacaauguacauuuguggugauucaacugaaugcagcaaucuuuuguugcaauauggcaguuuuuguacacaauuaaaccgugcuuuaacuggaauagcuguugaacaagacaaaaacacccaagaaguuuuugcacaagucaaacaaauuuacaaaacaccaccaauuaaagauuuuggugguuuuaauuuuucacaaauauuaccagauccaucaaaaccaagcaagaggucauuuauugaagaucuacuuuucaacaaagugacacuugcagaugcuggcuucaucaaacaauauggugauugccuuggugauauugcugcuagagaccucauuugugcacaaaaguuuaacggccuuacuguuuugccaccuuugcucacagaugaaaugauugcucaauacacuucugcacuguuagcggguacaaucacuucugguuggaccuuuggugcaggugcugcauuacaaauaccauuugcuaugcaaauggcuuauagguuuaaugguauuggaguuacacagaauguucucuaugagaaccaaaaauugauugccaaccaauuuaauagugcuauuggcaaaauucaagacucacuuucuuccacagcaagugcacuuggaaaacuucaagauguggucaaccaaaaugcacaagcuuuaaacacgcuuguuaaacaacuuagcuccaauuuuggugcaauuucaaguguuuuaaaugauauccuuucacgucuugacaaaguugaggcugaagugcaaauugauagguugaucacaggcagacuucaaaguuugcagacauaugugacucaacaauuaauuagagcugcagaaaucagagcuucugcuaaucuugcugcuacuaaaaugucagaguguguacuuggacaaucaaaaagaguugauuuuuguggaaagggcuaucaucuuauguccuucccucagucagcaccucaugguguagucuucuugcaugugacuuaugucccugcacaagaaaagaacuucacaacugcuccugccauuugucaugauggaaaagcacacuuuccucgugaaggugucuuuguuucaaauggcacacacugguuuguaacacaaaggaauuuuuaugaaccacaaaucauuacuacagacaacacauuugugucugguaacugugauguuguaauaggaauugucaacaacacaguuuaugauccuuugcaaccugaauuagacucauucaaggaggaguuagauaaauauuuuaagaaucauacaucaccagauguugauuuaggugacaucucuggcauuaaugcuucaguuguaaacauucaaaaagaaauugaccgccucaaugagguugccaagaauuuaaaugaaucucucaucgaucuccaagaacuuggaaaguaugagcaguauauaaaauggccaugguacauuuggcuagguuuuauagcuggcuugauugccauaguaauggugacaauuaugcuuugcuguaugaccaguugcuguaguugucucaagggcuguuguucuuguggauccugcugcaaauuugaugaagacgacucugagccagugcucaaaggagucaaauuacauuacacauaa

SEQ ID NO: 11720 - RNA, 3822 nt, Artificial Sequence
  SARS-CoV-2/Iceland/319/2020__EPI_ISL_417648 spike protein CDS wt (1-1273)
auguuuguuuuucuuguuuuauugccacuagucucuagucaguguguuaaucuuacaaccagaacucaauuacccccugcauacacuaauucuuucacacgugguguuuauuacccugacaaaguuuucagauccucaguuuuacauucaacucaggacuuguucuuaccuuucuuuuccaauguuacuugguuccaugcuauacaugucucugggaccaaugguacuaagagguuugauaacccuguccuaccauuuaaugaugguguuuauuuugcuuccacugagaagucuaacauaauaagaggcuggauuuuugguacuacuuuagauucgaagacccagucccuacuuauuguuaauaacgcuacuaauguuguuauuaaagucugugaauuucaauuuuguaaugauccauuuuuggguguuuauuaccacaaaaacaacaaaaguuggauggaaagugaguucagaguuuauucuagugcgaauaauugcacuuuugaauaugucucucagccuuuucuuauagaccuugaaggaaaacaggguaauuucaaaaaucuuagggaauuuguguuuaagaauauugaugguuauuuuaaaauauauucuaagcacacgccuauuaauuuagugcgugaucucccucaggguuuuucggcuuuagaaccauugguagauuugccaauagguauuaacaucacuagguuucaaacuuuacuugcuuuacauagaaguuauuugacuccuggugauucuucuucagguuggacagcuggugcugcagcuuauuauguggguuaucuucaaccuaggacuuuucuauuaaaauauaaugaaaauggaaccauuacagaugcuguagacugugcacuugacccucucucagaaacaaaguguacguugaaauccuucacuguagaaaaaggaaucuaucaaacuucuaacuuuagaguccaaccaacagaaucuauuguuagauuuccuaauauuacaaacuugugcccuuuuggugaaguuuuuaacgccaccagauuugcaucuguuuaugcuuggaacaggaagagaaucagcaacuguguugcugauuauucuguccuauauaauuccgcaucauuuuccacuuuuaaguguuauggagugucuccuacuaaauuaaaugaucucugcuuuacuaaugucuaugcagauucauuuguaauuagaggugaugaagucagacaaaucgcuccagggcaaacuggaaagauugcugauuauaauuauaaauuaccagaugauuuuacaggcugcguuauagcuuggaauucuaacaaucuugauucuaagguuggugguaauuauaauuaccuguauagauuguuuaggaagucuaaucucaaaccuuuugagagagauauuucaacugaaaucuaucaggccgguagcacaccuuguaaugguguugaagguuuuaauuguuacuuuccuuuacaaucauaugguuuccaacccacuaaugguguugguuaccaaccauacagaguaguaguacuuucuuuugaacuucuacaugcaccagcaacuguuuguggaccuaaaaagucuacuaauuugguuaaaaacaaaugugucaauuucaacuucaaugguuuaacaggcacagguguucuuacugagucuaacaaaaaguuucugccuuuccaacaauuuggcagagacauugcugacacuacugaugcuguccgugauccacagacacuugagauucuugacauuacaccauguucuuuugguggugucaguguuauaacaccaggaacaaauacuucuaaccagguugcuguucuuuaucaggguguuaacugcacagaagucccuguugcuauucaugcagaucaacuuacuccuacuuggcguguuuauucuacagguucuaauguuuuucaaacacgugcaggcuguuuaauaggggcugaacaugucaacaacucauaugagugugacauacccauuggugcagguauaugcgcuaguuaucagacucagacuaauucuccucggcgggcacguaguguagcuagucaauccaucauugccuacacuaugucacuuggugcagaaaauucaguugcuuacucuaauaacucuauugccauacccacaaauuuuacuauuaguguuaccacagaaauucuaccagugucuaugaccaagacaucaguagauuguacaauguacauuuguggugauucaacugaaugcagcaaucuuuuguugcaauauggcaguuuuuguacacaauuaaaccgugcuuuaacuggaauagcuguugaacaagacaaaaacacccaagaaguuuuugcacaagucaaacaaauuuacaaaacaccaccaauuaaagauuuuggugguuuuaauuuuucacaaauauuaccagauccaucaaaaccaagcaagaggucauuuauugaagaucuacuuuucaacaaagugacacuugcagaugcuggcuucaucaaacaauauggugauugccuuggugauauugcugcuagagaccucauuugugcacaaaaguuuaacggccuuacuguuuugccaccuuugcucacagaugaaaugauugcucaauacacuucugcacuguuagcggguacaaucacuucugguuggaccuuuggugcaggugcugcauuacaaauaccauuugcuaugcaaauggcuuauagguuuaaugguauuggaguuacacagaauguucucuaugagaaccaaaaauugauugccaaccaauuuaauagugcuauuggcaaaauucaagacucacuuucuuccacagcaagugcacuuggaaaacuucaagauguggucaaccaaaaugcacaagcuuuaaacacgcuuguuaaacaacuuagcuccaauuuuggugcaauuucaaguguuuuaaaugauauccuuucacgucuugacaaaguugaggcugaagugcaaauugauagguugaucacaggcagacuucaaaguuugcagacauaugugacucaacaauuaauuagagcugcagaaaucagagcuucugcuaaucuugcugcuacuaaaaugucagaguguguacuuggacaaucaaaaagaguugauuuuuguggaaagggcuaucaucuuauguccuucccucagucagcaccucaugguguagucuucuugcaugugacuuaugucccugcacaagaaaagaacuucacaacugcuccugccauuugucaugauggaaaagcacacuuuccucgugaaggugucuuuguuucaaauggcacacacugguuuguaacacaaaggaauuuuuaugaaccacaaaucauuacuacagacaacacauuugugucugguaacugugauguuguaauaggaauugucaacaacacaguuuaugauccuuugcaaccugaauuagacucauucaaggaggaguuagauaaauauuuuaagaaucauacaucaccagauguugauuuaggugacaucucuggcauuaaugcuucaguuguaaacauucaaaaagaaauugaccgccucaaugagguugccaagaauuuaaaugaaucucucaucgaucuccaagaacuuggaaaguaugagcaguauauaaaauggccaugguacauuuggcuagguuuuauagcuggcuugauugccauaguaauggugacaauuaugcuuugcuguaugaccaguugcuguaguugucucaagggcuguuguucuuguggauccugcugcaaauuugaugaagacgacucugagccagugcucaaaggagucaaauuacauuacacauaa

SEQ ID NO: 11721 - RNA, 3822 nt, Artificial Sequence
  SARS-CoV-2/Congo/94/2020__EPI_ISL_417947 spike protein CDS wt (1-1273)
auguuuguuuuucuuguuuuauugccacuagucucuagucaguguguuaaucuuacaaccagaacucaauuacccccugcauacacuaauucuuucacacgugguguuuauuacccugacaaaguuuucagauccucaguuuuacauucaacucaggacuuguucuuaccuuucuuuuccaauguuacuugguuccaugcuauacaugucucugggaccaaugguacuaagagguuugauaacccuguccuaccauuuaaugaugguguuuauuuugcuuccacugagaagucuaacauaauaagaggcuggauuuuugguacuacuuuagauucgaagacccagucccuacuuauuguuaauaacgcuacuaauguuguuauuaaagucugugaauuucaauuuuguaaugauccauuuuuggguguuuauuaccacaaaaacaacaaaaguuggauggaaagugaguucagaguuuauucuagugcgaauaauugcacuuuugaauaugucucucagccuuuucuuauggaccuugaaggaaaacaggguaauuucaaaaaucuuagggaauuuguguuuaagaauauugaugguuauuuuaaaauauauucuaagcacacgccuauuaauuuagugcgugaucucccucaggguuuuucggcuuuagaaccauugguagauuugccaauagguauuaacaucacuagguuucaaacuuuacuugcuuuacauagaaguuauuugacuccuggugauucuucuucagguuggacagcuggugcugcagcuuauuauguggguuaucuucaaccuaggacuuuucuauuaaaauauaaugaaaauggaaccauuacagaugcuguagacugugcacuugacccucucucagaaacaaaguguacguugaaauccuucacuguagaaaaaggaaucuaucaaacuucuaacuuuagaguccaaccaacagaaucuauuguuagauuuccuaauauuacaaacuugugcccuuuuggugaaguuuuuaacgccaccagauuugcaucuguuuaugcuuggaacaggaagagaaucagcaacuguguugcugauuauucuguccuauauaauuccgcaucauuuuccacuuuuaaguguuauggagugucuccuacuaaauuaaaugaucucugcuuuacuaaugucuaugcagauucauuuguaauuagaggugaugaagucagacaaaucgcuccagggcaaacuggaaagauugcugauuauaauuauaaauuaccagaugauuuuacaggcugcguuauagcuuggaauucuaacaaucuugauucuaagguuggugguaauuauaauuaccuguauagauuguuuaggaagucuaaucucaaaccuuuugagagagauauuucaacugaaaucuaucaggccgguagcacaccuuguaaugguguugaagguuuuaauuguuacuuuccuuuacaaucauaugguuuccaacccacuaaugguguugguuaccaaccauacagaguaguaguacuuucuuuugaacuucuacaugcaccagcaacuguuuguggaccuaaaaagucuacuaauuugguuaaaaacaaaugugucaauuucaacuucaaugguuuaacaggcacagguguucuuacugagucuaacaaaaaguuucugccuuuccaacaauuuggcagagacauugcugacacuacugaugcuguccgugauccacagacacuugagauucuugacauuacaccauguucuuuugguggugucaguguuauaacaccaggaacaaauacuucuaaccagguugcuguucuuuaucaggguguuaacugcacagaagucccuguugcuauucaugcagaucaacuuacuccuacuuggcguguuuauucuacagguucuaauguuuuucaaacacgugcaggcuguuuaauaggggcugaacaugucaacaacucauaugagugugacauacccauuggugcagguauaugcgcuaguuaucagacucagacuaauucuccucggcgggcacguaguguagcuagucaauccaucauugccuacacuaugucacuuggugcagaaaauucaguugcuuacucuaauaacucuauugccauacccacaaauuuuacuauuaguguuaccacagaaauucuaccagugucuaugaccaagacaucaguagauuguacaauguacauuuguggugauucaacugaaugcagcaaucuuuuguugcaauauggcaguuuuuguacacaauuaaaccgugcuuuaacuggaauagcuguugaacaagacaaaaacacccaagaaguuuuugcacaagucaaacaaauuuacaaaacaccaccaauuaaagauuuuggugguuuuaauuuuucacaaauauuaccagauccaucaaaaccaagcaagaggucauuuauugaagauauacuuuucaacaaagugacacuugcagaugcuggcuucaucaaacaauauggugauugccuuggugauauugcugcuagagaccucauuugugcacaaaaguuuaacggccuuacuguuuugccaccuuugcucacagaugaaaugauugcucaauacacuucugcacuguuagcggguacaaucacuucugguuggaccuuuggugcaggugcugcauuacaaauaccauuugcuaugcaaauggcuuauagguuuaaugguauuggaguuacacagaauguucucuaugagaaccaaaaauugauugccaaccaauuuaauagugcuauuggcaaaauucaagacucacuuucuuccacagcaagugcacuuggaaaacuucaagauguggucaaccaaaaugcacaagcuuuaaacacgcuuguuaaacaacuuagcuccaauuuuggugcaauuucaaguguuuuaaaugauauccuuucacgucuugacaaaguugaggcugaagugcaaauugauagguugaucacaggcagacuucaaaguuugcagacauaugugacucaacaauuaauuagagcugcagaaaucagagcuucugcuaaucuugcugcuacuaaaaugucagaguguguacuuggacaaucaaaaagaguugauuuuuguggaaagggcuaucaucuuauguccuucccucagucagcaccucaugguguagucuucuugcaugugacuuaugucccugcacaagaaaagaacuucacaacugcuccugccauuugucaugauggaaaagcacacuuuccucgugaaggugucuuuguuucaaauggcacacacugguuuguaacacaaaggaauuuuuaugaaccacaaaucauuacuacagacaacacauuugugucugguaacugugauguuguaauaggaauugucaacaacacaguuuaugauccuuugcaaccugaauuagacucauucaaggaggaguuagauaaauauuuuaagaaucauacaucaccagauguugauuuaggugacaucucuggcauuaaugcuucaguuguaaacauucaaaaagaaauugaccgccucaaugagguugccaagaauuuaaaugaaucucucaucgaucuccaagaacuuggaaaguaugagcaguauauaaaauggccaugguacauuuggcuagguuuuauagcuggcuugauugccauaguaauggugacaauuaugcuuugcuguaugaccaguugcuguaguugucucaagggcuguuguucuuguggauccugcugcaaauuugaugaagacgacucugagccagugcucaaaggagucaaauuacauuacacauaa

SEQ ID NO: 11722 - RNA, 3822 nt, Artificial Sequence
  SARS-CoV-2/Congo/158/2020__EPI_ISL_417950 spike protein CDS wt (1-1273)
auguuuguuuuucuuguuuuauugccacuagucucuagucaguguguuaaucuuacaaccagaacucaauuacccccugcauacacuaauucuuucacacgugguguuuauuacccugacaaaguuuucagauccucaguuuuacauucaacucaggacuuguucuuaccuuucuuuuccaauguuacuugguuccaugcuauacaugucucugggaccaaugguacuaagagguuugauaacccuguccuaccauuuaaugaugguguuuauuuugcuuccacugagaagucuaacauaauaagaggcuggauuuuugguacuacuuuagauucgaagacccagucccuacuuauuguuaauaacgcuacuaauguuguuauuaaagucugugaauuucaauuuuguaaugauccauuuuuggguguuuauuaccacaaaaacaacaaaaguuggauggaaagugaguucagaguuuauucuagugcgaauaauugcacuuuugaauaugucucucagccuuuucuuauggaccuugaaggaaaacaggguaauuucaaaaaucuuagggaauuuguguuuaagaauauugaugguuauuuuaaaauauauucuaagcacacgccuauuaauuuagugcgugaucucccucaggguuuuucggcuuuagaaccauugguagauuugccaauagguauuaacaucacuagguuucaaacuuuacuugcuuuacauagaaguuauuugacuccuggugauucuucuucagguuggacagcuggugcugcagcuuauuauguggguuaucuucaaccuaggacuuuucuauuaaaauauaaugaaaauggaaccauuacagaugcuguagacugugcacuugacccucucucagaaacaaaguguacguugaaauccuucacuguagaaaaaggaaucuaucaaacuucuaacuuuagaguccaaccaacagaaucuauuguuagauuuccuaauauuacaaacuugugcccuuuuggugaaguuuuuaacgccaccagauuugcaucuguuuaugcuuggaacaggaagagaaucagcaacuguguugcugauuauucuguccuauauaauuccgcaucauuuuccacuuuuaaguguuauggagugucuccuacuaaauuaaaugaucucugcuuuacuaaugucuaugcagauucauuuguaauuagaggugaugaagucagacaaaucgcuccagggcaaacuggaaagauugcugauuauaauuauaaauuaccagaugauuuuacaggcugcguuauagcuuggaauucuaacaaucuugauucuaagguuggugguaauuauaauuaccuguauagauuguuuaggaagucuaaucucaaaccuuuugagagagauauuucaacugaaaucuaucaggccgguagcacaccuuguaaugguguugaagguuuuaauuguuacuuuccuuuacaaucauaugguuuccaacccacuaaugguguugguuaccaaccauacagaguaguaguacuuucuuuugaacuucuacaugcaccagcaacuguuuguggaccuaaaaagucuacuaauuugguuaaaaacaaaugugucaauuucaacuucaaugguuuaacaggcacagguguucuuacugagucuaacaaaaaguuucugccuuuccaacaauuuggcagagacauugcugacacuacugaugcuguccgugauccacagacacuugagauucuugacauuacaccauguucuuuugguggugucaguguuauaacaccaggaacaaauacuucuaaccagguugcuguucuuuaucaggauguuaacugcacagaagucccuguugcuauucaugcagaucaacuuacuccuacuuggcguguuuauucuacagguucuaauguuuuucaaacacgugcaggcuguuuaauaggggcugaacaugucaacaacucauaugagugugacauacccauuggugcagguauaugcgcuaguuaucagacucagacuaauucuccucggcgggcacguaguguagcuagucaauccaucauugccuacacuaugucacuuggugcagaaaauucaguugcuuacucuaauaacucuauugccauacccacaaauuuuacuauuaguguuaccacagaaauucuaccagugucuaugaccaagacaucaguagauuguacaauguacauuuguggugauucaacugaaugcagcaaucuuuuguugcaauauggcaguuuuuguacacaauuaaaccgugcuuuaacuggaauagcuguugaacaagacaaaaacacccaagaaguuuuugcacaagucaaacaaauuuacaaaacaccaccaauuaaagauuuuggugguuuuaauuuuucacaaauauuaccagauccaucaaaaccaagcaagaggucauuuauugaagaucuacuuuucaacaaagugacacuugcagaugcuggcuucaucaaacaauauggugauugccuuggugauauugcugcuagagaccucauuugugcacaaaaguuuaacggccuuacuguuuugccaccuuugcucacagaugaaaugauugcucaauacacuucugcacuguuagcggguacaaucacuucugguuggaccuuuggugcaggugcugcauuacaaauaccauuugcuaugcaaauggcuuauagguuuaaugguauuggaguuacacagaauguucucuaugagaaccaaaaauugauugccaaccaauuuaauagugcuauuggcaaaauucaagacucacuuucuuccacagcaagugcacuuggaaaacuucaagauguggucaaccaaaaugcacaagcuuuaaacacgcuuguuaaacaacuuagcuccaauuuuggugcaauuucaaguguuuuaaaugauauccuuucacgucuugacaaaguugaggcugaagugcaaauugauagguugaucacaggcagacuucaaaguuugcagacauaugugacucaacaauuaauuagagcugcagaaaucagagcuucugcuaaucuugcugcuacuaaaaugucagaguguguacuuggacaaucaaaaagaguugauuuuuguggaaagggcuaucaucuuauguccuucccucagucagcaccucaugguguagucuucuugcaugugacuuaugucccugcacaagaaaagaacuucacaacugcuccugccauuugucaugauggaaaagcacacuuuccucgugaaggugucuuuguuucaaauggcacacacugguuuguaacacaaaggaauuuuuaugaaccacaaaucauuacuacagacaacacauuuuugucugguaacugugauguuguaauaggaauugucaacaacacaguuuaugauccuuugcaaccugaauuagacucauucaaggaggaguuagauaaauauuuuaagaaucauacaucaccagauguugauuuaggugacaucucuggcauuaaugcuucaguuguaaacauucaaaaagaaauugaccgccucaaugagguugccaagaauuuaaaugaaucucucaucgaucuccaagaacuuggaaaguaugagcaguauauaaaauggccaugguacauuuggcuagguuuuauagcuggcuugauugccauaguaauggugacaauuaugcuuugcuguaugaccaguugcuguaguugucucaagggcuguuguucuuguggauccugcugcaaauuugaugaagacgacucugagccagugcucaaaggagucaaauuacauuacacauaa

SEQ ID NO: 11723 - RNA, 3822 nt, Artificial Sequence
  SARS-CoV-2/USA/UT-00034/2020__EPI_ISL_417977 spike protein CDS wt (1-1273)
auguuuguuuuucuuguuuuauugccacuagucucuagucaguguguuaaucuuacaaccagaacucaauuacccccugcauacacuaauucuuucacacgugguguuuauuacccugacaaaguuuucagauccucaguuuuacauucaacucaggacuuguucuuaccuuucuuuuccaauguuacuugguuccaugcuauacaugucucugggaccaaugguacuaagagguuugauaacccuguccuaccauuuaaugaugguguuuauuuugcuuccacugagaagucuaacauaauaagaggcuggauuuuugguacuacuuuagauucgaagacccagucccuacuuauuguuaauaacgcuacuaauguuguuauuaaagucugugaauuucaauuuuguaaugauccauuuuuggguguuuauuacuacaaaaacaacaaaaguuggauggaaagugaguucagaguuuauucuagugcgaauaauugcacuuuugaauaugucucucagccuuuucuuauggaccuugaaggaaaacaggguaauuucaaaaaucuuagggaauuuguguuuaagaauauugaugguuauuuuaaaauauauucuaagcacacgccuauuaauuuagugcgugaucucccucaggguuuuucggcuuuagaaccauugguagauuugccaauagguauuaacaucacuagguuucaaacuuuacuugcuuuacauagaaguuauuugacuccuggugauucuucuucagguuggacagcuggugcugcagcuuauuauguggguuaucuucaaccuaggacuuuucuauuaaaauauaaugaaaauggaaccauuacagaugcuguagacugugcacuugacccucucucagaaacaaaguguacguugaaauccuucacuguagaaaaaggaaucuaucaaacuucuaacuuuagaguccaaccaacagaaucuauuguuagauuuccuaauauuacaaacuugugcccuuuuggugaaguuuuuaacgccaccagauuugcaucuguuuaugcuuggaacaggaagagaaucagcaacuguguugcugauuauucuguccuauauaauuccgcaucauuuuccacuuuuaaguguuauggagugucuccuacuaaauuaaaugaucucugcuuuacuaaugucuaugcagauucauuuguaauuagaggugaugaagucagacaaaucgcuccagggcaaacuggaaagauugcugauuauaauuauaaauuaccagaugauuuuacaggcugcguuauagcuuggaauucuaacaaucuugauucuaagguuggugguaauuauaauuaccuguauagauuguuuaggaagucuaaucucaaaccuuuugagagagauauuucaacugaaaucuaucaggccgguagcacaccuuguaaugguguugaagguuuuaauuguuacuuuccuuuacaaucauaugguuuccaacccacuaaugguguugguuaccaaccauacagaguaguaguacuuucuuuugaacuucuacaugcaccagcaacuguuuguggaccuaaaaagucuacuaauuugguuaaaaacaaaugugucaauuucaacuucaaugguuuaacaggcacagguguucuuacugagucuaacaaaaaguuucugccuuuccaacaauuuggcagagacauugcugacacuacugaugcuguccgugauccacagacacuugagauucuugacauuacaccauguucuuuugguggugucaguguuauaacaccaggaacaaauacuucuaaccagguugcuguucuuuaucaggguguuaacugcacagaagucccuguugcuauucaugcagaucaacuuacuccuacuuggcguguuuauucuacagguucuaauguuuuucaaacacgugcaggcuguuuaauaggggcugaacaugucaacaacucauaugagugugacauacccauuggugcagguauaugcgcuaguuaucagacucagacuaauucuccucggcgggcacguaguguagcuagucaauccaucauugccuacacuaugucacuuggugcagaaaauucaguugcuuacucuaauaacucuauugccauacccacaaauuuuacuauuaguguuaccacagaaauucuaccagugucuaugaccaagacaucaguagauuguacaauguacauuuguggugauucaacugaaugcagcaaucuuuuguugcaauauggcaguuuuuguacacaauuaaaccgugcuuuaacuggaauagcuguugaacaagacaaaaacacccaagaaguuuuugcacaagucaaacaaauuuacaaaacaccaccaauuaaagauuuuggugguuuuaauuuuucacaaauauuaccagauccaucaaaaccaagcaagaggucauuuauugaagaucuacuuuucaacaaagugacacuugcagaugcuggcuucaucaaacaauauggugauugccuuggugauauugcugcuagagaccucauuugugcacaaaaguuuaacggccuuacuguuuugccaccuuugcucacagaugaaaugauugcucaauacacuucugcacuguuagcggguacaaucacuucugguuggaccuuuggugcaggugcugcauuacaaauaccauuugcuaugcaaauggcuuauagguuuaaugguauuggaguuacacagaauguucucuaugagaaccaaaaauugauugccaaccaauuuaauagugcuauuggcaaaauucaagacucacuuucuuccacagcaagugcacuuggaaaacuucaagauguggucaaccaaaaugcacaagcuuuaaacacgcuuguuaaacaacuuagcuccaauuuuggugcaauuucaaguguuuuaaaugauauccuuucacgucuugacaaaguugaggcugaagugcaaauugauagguugaucacaggcagacuucaaaguuugcagacauaugugacucaacaauuaauuagagcugcagaaaucagagcuucugcuaaucuugcugcuacuaaaaugucagaguguguacuuggacaaucaaaaagaguugauuuuuguggaaagggcuaucaucuuauguccuucccucagucagcaccucaugguguagucuucuugcaugugacuuaugucccugcacaagaaaagaacuucacaacugcuccugccauuugucaugauggaaaagcacacuuuccucgugaaggugucuuuguuucaaauggcacacacugguuuguaacacaaaggaauuuuuaugaaccacaaaucauuacuacagacaacacauuugugucugguaacugugauguuguaauaggaauugucaacaacacaguuuaugauccuuugcaaccugaauuagacucauucaaggaggaguuagauaaauauuuuaagaaucauacaucaccagauguugauuuaggugacaucucuggcauuaaugcuucaguuguaaacauucaaaaagaaauugaccgccucaaugagguugccaagaauuuaaaugaaucucucaucgaucuccaagaacuuggaaaguaugagcaguauauaaaauggccaugguacauuuggcuagguuuuauagcuggcuugauugccauaguaauggugacaauuaugcuuugcuguaugaccaguugcuguaguugucucaagggcuguuguucuuguggauccugcugcaaauuugaugaagacgacucugagccagugcucaaaggagucaaauuacauuacacauaa

SEQ ID NO: 11724 - RNA, 3822 nt, Artificial Sequence
  SARS-CoV-2/USA/UT-00033/2020__EPI_ISL_417976 spike protein CDS wt (1-1273)
auguuuguuuuucuuguuuuauugccacuagucucuagucaguguguuaaucuuacaaccagaacucaauuacccccugcauacacuaauucuuucacacgugguguuuauuacccugacaaaguuuucagauccucaguuuuacauucaacucaggacuuguucuuaccuuucuuuuccaauguuacuugguuccaugcuauacaugucucugggaccaaugguacuaagagguuugauaacccuguccuaccauuuaaugaugguguuuauuuugcuuccacugagaagucuaacauaauaagaggcuggauuuuugguacuacuuuagauucgaagacccagucccuacuuauuguuaauaacgcuacuaauguuguuauuaaagucugugaauuucaauuuuguaaugauccauuuuuggguguuuauuaccacaaaaacaacaaaaguuggauggaaagugaguucagaguuuauucuagugcgaauaauugcacuuuugaauaugucucucagccuuuucuuauggaccuugaaggaaaacaggguaauuucaaaaaucuuagggaauuuguguuuaagaauauugaugguuauuuuaaaauauauucuaagcacacgccuauuaauuuagugcgugaucucccucaggguuuuucggcuuuagaaccauugguagauuugccaauagguauuaacaucacuagguuucaaacuuuacuugcuuuacauagaaguuauuugacuccuggugauucuucuucagguuugacagcuggugcugcagcuuauuauguggguuaucuucaaccuaggacuuuucuauuaaaauauaaugaaaauggaaccauuacagaugcuguagacugugcacuugacccucucucagaaacaaaguguacguugaaauccuucacuguagaaaaaggaaucuaucaaacuucuaacuuuagaguccaaccaacagaaucuauuguuagauuuccuaauauuacaaacuugugcccuuuuggugaaguuuuuaacgccaccagauuugcaucuguuuaugcuuggaacaggaagagaaucagcaacuguguugcugauuauucuguccuauauaauuccgcaucauuuuccacuuuuaaguguuauggagugucuccuacuaaauuaaaugaucucugcuuuacuaaugucuaugcagauucauuuguaauuagaggugaugaagucagacaaaucgcuccagggcaaacuggaaagauugcugauuauaauuauaaauuaccagaugauuuuacaggcugcguuauagcuuggaauucuaacaaucuugauucuaagguuggugguaauuauaauuaccuguauagauuguuuaggaagucuaaucucaaaccuuuugagagagauauuucaacugaaaucuaucaggccgguagcacaccuuguaaugguguugaagguuuuaauuguuacuuuccuuuacaaucauaugguuuccaacccacuaaugguguugguuaccaaccauacagaguaguaguacuuucuuuugaacuucuacaugcaccagcaacuguuuguggaccuaaaaagucuacuaauuugguuaaaaacaaaugugucaauuucaacuucaaugguuuaacaggcacagguguucuuacugagucuaacaaaaaguuucugccuuuccaacaauuuggcagagacauugcugacacuacugaugcuguccgugauccacagacacuugagauucuugacauuacaccauguucuuuugguggugucaguguuauaacaccaggaacaaauacuucuaaccagguugcuguucuuuaucaggguguuaacugcacagaagucccuguugcuauucaugcagaucaacuuacuccuacuuggcguguuuauucuacagguucuaauguuuuucaaacacgugcaggcuguuuaauaggggcugaacaugucaacaacucauaugagugugacauacccauuggugcagguauaugcgcuaguuaucagacucagacuaauucuccucggcgggcacguaguguagcuagucaauccaucauugccuacacuaugucacuuggugcagaaaauucaguugcuuacucuaauaacucuauugccauacccacaaauuuuacuauuaguguuaccacagaaauucuaccagugucuaugaccaagacaucaguagauuguacaauguacauuuguggugauucaacugaaugcagcaaucuuuuguugcaauauggcaguuuuuguacacaauuaaaccgugcuuuaacuggaauagcuguugaacaagacaaaaacacccaagaaguuuuugcacaagucaaacaaauuuacaaaacaccaccaauuaaagauuuuggugguuuuaauuuuucacaaauauuaccagauccaucaaaaccaagcaagaggucauuuauugaagaucuacuuuucaacaaagugacacuugcagaugcuggcuucaucaaacaauauggugauugccuuggugauauugcugcuagagaccucauuugugcacaaaaguuuaacggccuuacuguuuugccaccuuugcucacagaugaaaugauugcucaauacacuucugcacuguuagcggguacaaucacuucugguuggaccuuuggugcaggugcugcauuacaaauaccauuugcuaugcaaauggcuuauagguuuaaugguauuggaguuacacagaauguucucuaugagaaccaaaaauugauugccaaccaauuuaauagugcuauuggcaaaauucaagacucacuuucuuccacagcaagugcacuuggaaaacuucaagauguggucaaccaaaaugcacaagcuuuaaacacgcuuguuaaacaacuuagcuccaauuuuggugcaauuucaaguguuuuaaaugauauccuuucacgucuugacaaaguugaggcugaagugcaaauugauagguugaucacaggcagacuucaaaguuugcagacauaugugacucaacaauuaauuagagcugcagaaaucagagcuucugcuaaucuugcugcuacuaaaaugucagaguguguacuuggacaaucaaaaagaguugauuuuuguggaaagggcuaucaucuuauguccuucccucagucagcaccucaugguguagucuucuugcaugugacuuaugucccugcacaagaaaagaacuucacaacugcuccugccauuugucaugauggaaaagcacacuuuccucgugaaggugucuuuguuucaaauggcacacacugguuuguaacacaaaggaauuuuuaugaaccacaaaucauuacuacagacaacacauuugugucugguaacugugauguuguaauaggaauugucaacaacacaguuuaugauccuuugcaaccugaauuagacucauucaaggaggaguuagauaaauauuuuaagaaucauacaucaccagauguugauuuaggugacaucucuggcauuaaugcuucaguuguaaacauucaaaaagaaauugaccgccucaaugagguugccaagaauuuaaaugaaucucucaucgaucuccaagaacuuggaaaguaugagcaguauauaaaauggccaugguacauuuggcuagguuuuauagcuggcuugauugccauaguaauggugacaauuaugcuuugcuguaugaccaguugcuguaguugucucaagggcuguuguucuuguggauccugcugcaaauuugaugaagacgacucugagccagugcucaaaggagucaaauuacauuacacauaa

SEQ ID NO: 11725 - RNA, 3822 nt, Artificial Sequence
  SARS-CoV-2/USA/WI-13/2020__EPI_ISL_417516 spike protein CDS wt (1-1273)
auguuuguuuuucuuguuuuauugccacuagucucuagucaguguguuaaucuuacaaccagaacucaauuacccccugcauacacuaauucuuucacacgugguguuuauuacccugacaaaguuuucagauccucaguuuuacauucaacucaggacuuguucuuaccuuucuuuuccaauguuacuugguuccaugcuauacaugucucugggaccaaugguacuaagagguuugauaacccuguccuaccauuuaaugaugguguuuauuuugcuuccacugagaagucuaacauaauaagaggcuggauuuuugguacuacuuuagauucgaagacccagucccuacuuauuguuaauaacgcuacuaauguuguuauuaaagucugugaauuucaauuuuguaaugauccauuuuuggguguuuauuaccacaaaaacaacaaaaguuggauggaaagugaguucagaguuuauucuagugcgaauaauugcacuuuugaauaugucucucagccuuuucuuauggaccuugaaggaaaacaggguaauuucaaaaaucuuagggaauuuguguuuaagaauauugaugguuauuuuaaaauauauucuaagcacacgccuauuaauuuagugcgugaucucccucaggguuuuucggcuuuagaaccauugguagauuugccaauagguauuaacaucacuagguuucaaacuuuacuugcuuuacauagaaguuauuugacuccuggugauucuucuucagguuggacagcuggugcugcagcuuauuauguggguuaucuucaaccuaggacuuuucuauuaaaauauaaugaaaauggaaccauuacagaugcuguagacugugcacuugacccucucucagaaacaaaguguacguugaaauccuucacuguagaaaaaggaaucuaucaaacuucuaacuuuagaguccuaccaacagaaucuauuguuagauuuccuaauauuacaaacuugugcccuuuuggugaaguuuuuaacgccaccagauuugcaucuguuuaugcuuggaacaggaagagaaucagcaacuguguugcugauuauucuguccuauauaauuccgcaucauuuuccacuuuuaaguguuauggagugucuccuacuaaauuaaaugaucucugcuuuacuaaugucuaugcagauucauuuguaauuagaggugaugaagucagacaaaucgcuccagggcaaacuggaaagauugcugauuauaauuauaaauuaccagaugauuuuacaggcugcguuauagcuuggaauucuaacaaucuugauucuaagguuggugguaauuauaauuaccuguauagauuguuuaggaagucuaaucucaaaccuuuugagagagauauuucaacugaaaucuaucaggccgguagcacaccuuguaaugguguugaagguuuuaauuguuacuuuccuuuacaaucauaugguuuccaacccacuaaugguguugguuaccaaccauacagaguaguaguacuuucuuuugaacuucuacaugcaccagcaacuguuuguggaccuaaaaagucuacuaauuugguuaaaaacaaaugugucaauuucaacuucaaugguuuaacaggcacagguguucuuacugagucuaacaaaaaguuucugccuuuccaacaauuuggcagagacauugcugacacuacugaugcuguccgugauccacagacacuugagauucuugacauuacaccauguucuuuugguggugucaguguuauaacaccaggaacaaauacuucuaaccagguugcuguucuuuaucaggguguuaacugcacagaagucccuguugcuauucaugcagaucaacuuacuccuacuuggcguguuuauucuacagguucuaauguuuuucaaacacgugcaggcuguuuaauaggggcugaacaugucaacaacucauaugagugugacauacccauuggugcagguauaugcgcuaguuaucagacucagacuaauucuccucggcgggcacguaguguagcuagucaauccaucauugccuacacuaugucacuuggugcagaaaauucaguugcuuacucuaauaacucuauugccauacccacaaauuuuacuauuaguguuaccacagaaauucuaccagugucuaugaccaagacaucaguagauuguacaauguacauuuguggugauucaacugaaugcagcaaucuuuuguugcaauauggcaguuuuuguacacaauuaaaccgugcuuuaacuggaauagcuguugaacaagacaaaaacacccaagaaguuuuugcacaagucaaacaaauuuacaaaacaccaccaauuaaagauuuuggugguuuuaauuuuucacaaauauuaccagauccaucaaaaccaagcaagaggucauuuauugaagaucuacuuuucaacaaagugacacuugcagaugcuggcuucaucaaacaauauggugauugccuuggugauauugcugcuagagaccucauuugugcacaaaaguuuaacggccuuacuguuuugccaccuuugcucacagaugaaaugauugcucaauacacuucugcacuguuagcggguacaaucacuucugguuggaccuuuggugcaggugcugcauuacaaauaccauuugcuaugcaaauggcuuauagguuuaaugguauuggaguuacacagaauguucucuaugagaaccaaaaauugauugccaaccaauuuaauagugcuauuggcaaaauucaagacucacuuucuuccacagcaagugcacuuggaaaacuucaagauguggucaaccaaaaugcacaagcuuuaaacacgcuuguuaaacaacuuagcuccaauuuuggugcaauuucaaguguuuuaaaugauauccuuucacgucuugacaaaguugaggcugaagugcaaauugauagguugaucacaggcagacuucaaaguuugcagacauaugugacucaacaauuaauuagagcugcagaaaucagagcuucugcuaaucuugcugcuacuaaaaugucagaguguguacuuggacaaucaaaaagaguugauuuuuguggaaagggcuaucaucuuauguccuucccucagucagcaccucaugguguagucuucuugcaugugacuuaugucccugcacaagaaaagaacuucacaacugcuccugccauuugucaugauggaaaagcacacuuuccucgugaaggugucuuuguuucaaauggcacacacugguuuguaacacaaaggaauuuuuaugaaccacaaaucauuacuacagacaacacauuugugucugguaacugugauguuguaauaggaauugucaacaacacaguuuaugauccuuugcaaccugaauuagacucauucaaggaggaguuagauaaauauuuuaagaaucauacaucaccagauguugauuuaggugacaucucuggcauuaaugcuucaguuguaaacauucaaaaagaaauugaccgccucaaugagguugccaagaauuuaaaugaaucucucaucgaucuccaagaacuuggaaaguaugagcaguauauaaaauggccaugguacauuuggcuagguuuuauagcuggcuugauugccauaguaauggugacaauuaugcuuugcuguaugaccaguugcuguaguugucucaagggcuguuguucuuguggauccugcugcaaauuugaugaagacgacucugagccagugcucaaaggagucaaauuacauuacacauaa

SEQ ID NO: 11726 - RNA, 3819 nt, Artificial Sequence
  SARS-CoV-2/India/1-27/2020__EPI_ISL_413522 spike protein CDS wt (1-1272)
auguuuguuuuucuuguuuuauugccacuagucucuagucaguguguuaaucuuacaaccagaacucaauuacccccugcauacacuaauucuuucacacgugguguuuauuacccugacaaaguuuucagauccucaguuuuacauucaacucaggacuuguucuuaccuuucuuuuccaauguuacuugguuccaugcuauacaugucucugggaccaaugguacuaagagguuugauaacccuguccuaccauuuaaugaugguguuuauuuugcuuccacugagaagucuaacauaauaagaggcuggauuuuugguacuacuuuagauucgaagacccagucccuacuuauuguuaauaacgcuacuaauguuguuauuaaagucugugaauuucaauuuuguaaugauccauuuuuggguguuuaccacaaaaacaacaaaaguuggauggaaagugaguucagaguuuauucuagugcgaauaauugcacuuuugaauaugucucucagccuuuucuuauggaccuugaaggaaaacaggguaauuucaaaaaucuuagggaauuuguguuuaagaauauugaugguuauuuuaaaauauauucuaagcacacgccuauuaauuuagugcgugaucucccucaggguuuuucggcuuuagaaccauugguagauuugccaauagguauuaacaucacuagguuucaaacuuuacuugcuuuacauagaaguuauuugacuccuggugauucuucuucagguuggacagcuggugcugcagcuuauuauguggguuaucuucaaccuaggacuuuucuauuaaaauauaaugaaaauggaaccauuacagaugcuguagacugugcacuugacccucucucagaaacaaaguguacguugaaauccuucacuguagaaaaaggaaucuaucaaacuucuaacuuuagaguccaaccaacagaaucuauuguuagauuuccuaauauuacaaacuugugcccuuuuggugaaguuuuuaacgccaccagauuugcaucuguuuaugcuuggaacaggaagagaaucagcaacuguguugcugauuauucuguccuauauaauuccgcaucauuuuccacuuuuaaguguuauggagugucuccuacuaaauuaaaugaucucugcuuuacuaaugucuaugcagauucauuuguaauuagaggugaugaagucauacaaaucgcuccagggcaaacuggaaagauugcugauuauaauuauaaauuaccagaugauuuuacaggcugcguuauagcuuggaauucuaacaaucuugauucuaagguuggugguaauuauaauuaccuguauagauuguuuaggaagucuaaucucaaaccuuuugagagagauauuucaacugaaaucuaucaggccgguagcacaccuuguaaugguguugaagguuuuaauuguuacuuuccuuuacaaucauaugguuuccaacccacuaaugguguugguuaccaaccauacagaguaguaguacuuucuuuugaacuucuacaugcaccagcaacuguuuguggaccuaaaaagucuacuaauuugguuaaaaacaaaugugucaauuucaacuucaaugguuuaacaggcacagguguucuuacugagucuaacaaaaaguuucugccuuuccaacaauuuggcagagacauugcugacacuacugaugcuguccgugauccacagacacuugagauucuugacauuacaccauguucuuuugguggugucaguguuauaacaccaggaacaaauacuucuaaccagguugcuguucuuuaucaggauguuaacugcacagaagucccuguugcuauucaugcagaucaacuuacuccuacuuggcguguuuauucuacagguucuaauguuuuucaaacacgugcaggcuguuuaauaggggcugaacaugucaacaacucauaugagugugacauacccauuggugcagguauaugcgcuaguuaucagacucagacuaauucuccucggcgggcacguaguguagcuagucaauccaucauugccuacacuaugucacuuggugcagaaaauucaguugcuuacucuaauaacucuauugccauacccacaaauuuuacuauuaguguuaccacagaaauucuaccagugucuaugaccaagacaucaguagauuguacaauguacauuuguggugauucaacugaaugcagcaaucuuuuguugcaauauggcaguuuuuguacacaauuaaaccgugcuuuaacuggaauagcuguugaacaagacaaaaacacccaagaaguuuuugcacaagucaaacaaauuuacaaaacaccaccaauuaaagauuuuggugguuuuaauuuuucacaaauauuaccagauccaucaaaaccaagcaagaggucauuuauugaagaucuacuuuucaacaaagugacacuugcagaugcuggcuucaucaaacaauauggugauugccuuggugauauugcugcuagagaccucauuugugcacaaaaguuuaacggccuuacuguuuugccaccuuugcucacagaugaaaugauugcucaauacacuucugcacuguuagcggguacaaucacuucugguuggaccuuuggugcaggugcugcauuacaaauaccauuugcuaugcaaauggcuuauagguuuaaugguauuggaguuacacagaauguucucuaugagaaccaaaaauugauugccaaccaauuuaauagugcuauuggcaaaauucaagacucacuuucuuccacagcaagugcacuuggaaaacuucaagauguggucaaccaaaaugcacaagcuuuaaacacgcuuguuaaacaacuuagcuccaauuuuggugcaauuucaaguguuuuaaaugauauccuuucacgucuugacaaaguugaggcugaagugcaaauugauagguugaucacaggcagacuucaaaguuugcagacauaugugacucaacaauuaauuagagcugcagaaaucagagcuucugcuaaucuugcugcuacuaaaaugucagaguguguacuuggacaaucaaaaagaguugauuuuuguggaaagggcuaucaucuuauguccuucccucagucagcaccucaugguguagucuucuugcaugugacuuaugucccugcacaagaaaagaacuucacaacugcuccugccauuugucaugauggaaaagcacacuuuccucgugaaggugucuuuguuucaaauggcacacacugguuuguaacacaaaggaauuuuuaugaaccacaaaucauuacuacagacaacacauuugugucugguaacugugauguuguaauaggaauugucaacaacacaguuuaugauccuuugcaaccugaauuagacucauucaaggaggaguuagauaaauauuuuaagaaucauacaucaccagauguugauuuaggugacaucucuggcauuaaugcuucaguuguaaacauucaaaaagaaauugaccgccucaaugagguugccaagaauuuaaaugaaucucucaucgaucuccaagaacuuggaaaguaugagcaguauauaaaauggccaugguacauuuggcuagguuuuauagcuggcuugauugccauaguaauggugacaauuaugcuuugcuguaugaccaguugcuguaguugucucaagggcuguuguucuuguggauccugcugcaaauuugaugaagacgacucugagccagugcucaaaggagucaaauuacauuacacauaa

SEQ ID NO: 11727 - RNA, 3804 nt, Artificial Sequence
  SARS-CoV-2/pangolin/Guangxi/P4L/2017__EPI_ISL_410538 spike protein CDS wt (1-1267)
auguuuguuuuucuuuuugucuugccuuugguuuccagucaaugugucaauuugaccacaagaacuggaauaccgccagguuauaccaauucaucuacuagaggugucuauuauccagacaaaguuuuuaggucuucaauuuuacaucuuacacaagaccuuuucuuaccuuucuuuucuaauguuacuugguuuaacaccauaaauuaucaaggaggcuuuaagaaguuugacaauccuguuuuaccauuuaaugaugguguuuacuuugccuccacggaaaaguccaauauuauacgcgguuggauuuuuggaacaacacuugaugccagaacucaaucucuucuaauaguuaacaacgcaaccaauguuguuaucaaaguaugugaguuucaguuuugcacugauccauuuuuagguguuuacuaucauaacaacaauaaaacauggguugaaaaugaguuuagaguuuauucaagugccaacaauugcacuuucgaauacauuucucaaccuuuucuuauggaccuugaaggaaagcaagguaauuuuaagaaccuuagagaguuuguguuuaaaaauguugaugguuauuucaagauuuacucuaaacacacaccuauugauuuagugcgcgaccuccccagagguuuugcugcauuggaaccacugguggaccucccuauagguauuaauauuaccagauuccaaacauugcuugcuuuacauagaaguuaucuuacaccugguaaucuagaaaguggcuggacaacuggagcugcugcuuacuauguagguuaccuacaacagaggacuuuucucuuaaguuacaaucaaaauggaaccauuacagaugcuguugauuguucacuagacccucuuucagagacaaagugcacauuaaaaucccuaacaguugaaaaaggaauuuaccagacuucuaacuucagaguucaaccaacaaucaguauaguuagauuuccuaauauuacaaacuuauguccauuuggagaaguguuuaacgcauccaaauuugcaucaguuuaugcuuggaacaggaagagaauuagcaauuguguugcugauuacucuguacuuuauaacucuacaucauuuuccacuuuuaaauguuauggaguuucaccuacaaaacucaaugaccuuugcuucaccaauguguaugcagacucauuuguuguuaaaggugacgagguuagacaaauagcacccggacaaacugguguuauugcugauuauaacuauaagcugccagaugauuuuacugguuguguuauugcuuggaacucaguuaagcaagaugcuuugacuggugguaauuaugguuauuuguauagauuauuuagaaagucuaagcuuaaaccauuugagagagauauuuccacugaaauauaccaagccggcagcacacccuguaacggucaaguuggucuaaauuguuauuauccucuugaaagguaugguuuucacccaacuacagguguuaacuaccaaccuuuuagagugguuguuuuaucauuugaguuacuuaauggaccagcuacuguuuguggacccaaauugucuacaacacuaguuaaagacaaaugugucaauuucaacuuuaacgguuuaacuggcacagguguucuuacaacaucuaagaaacaguuucugccuuuucaacaauuugguagagacaucucugacacuacugaugcuguccgugacccacagacacuugaaauacuugacauuaccccuugcucuuuuggaggaguuagugugauaacaccagguacaaacacuucuaaucaaguggcuguacuuuaccaagauguuaacuguacugaagugccuauggccauucaugcagaacaacuuacaccugccuggcguguuuacucugcaggagcaaauguguuucaaacaagagcaggcuguuuaguaggugcugagcaugucaacaauucuuaugaaugugacauuccagucggugcuggcauaugugcaaguuaccauuccaugucaucauugcguagugucaaccagcguucaaucauugcuuacacuaugucuuuaggugcagaaaauucaguugcuuauucuaauaauucaauugccauaccuacuaauuuuacaauaaguguuaccacagaaauucuaccagugucaaugacuaagacuucuguagauuguacuauguacaucuguggagauucaauugaguguaguaauuuauugcuacaauauggcaguuuuugcacacaauuaaaccgugcuuugacugggauugcuguugaacaagacaaaaacacacaagaaguuuuugcccagguuaaacaaaucuacaaaacaccaccuauuaaagauuuugguggcuuuaacuuuucacaaauauugccagauccaucaaaaccaagcaagaggucauuuauugaggauuuacucuucaacaaagugacacuugcugaugcuggcuucaucaaacaauauggugauugccuuggugauauugcugcuagagaucucaucugugcacaaaaguucaauggacucacgguucuaccgccuuugcucacagaugaaaugauugcucaauacacuucugcacuacuugcuggaacaaucaccucagguuggaccuuuggugcaggagcugcuuuacaaauacccuuugcaaugcaaauggcuuacagguuuaauggcauuggagucacucagaauguucuauaugagaaucagaaauuaauugccaaucaguucaacagugcuauuggcaaaauacaggauucacuuucaucuacggcuagugcacuugguaaacuucaagacgucguaaaucaaaaugcacaggcuuuaaacacacuugucaaacaacuuaguuccaauuuuggagcuauuucgagugugcuuaaugauauucuuucacgucuugacaaaguugaggcugaagugcaaauugauagguuaaucacaggaagacuacagagucuucaaacuuaugugacacaacaauuaaucagagcagcagaaaucagagcuucugcuaaucuugcugcaacaaaaaugucugagugcguacucggacaaucuaaaagaguugauuuuuguggaaaaggcuaccauuuaaugucuuucccucaaucagcaccgcaugguguuguuuucuugcauguuacuuauguaccugcacaagaaaagaacuuuacuacugcuccugcuauuugucaugaaggaaaagcacacuucccucgugaaggugucuucguuucaaauggcacucauugguuuauuacacaaaggaauuuuuaugaaccucaaauuauuaccacugacaacacauucgucucugguagcugugauguuguaauuggaauagucaacaacacaguuuaugauccuuugcaacccgagcuugacucauuuaaggaggaguuagacaaauacuucaaaaaucacacaucaccagauguugaucuuggcgacauaucuggcauaaaugcuucggucgucaacauacaaaaagaaauugaccgccucaaugagguugccaaaaauuugaaugaaucacccauugaccuacaagagcuuggaaaauaugagcaauacaucaaauggccuugguacauuuggcuugguuuuauagcugggcuaauugcuaucauuauggucacaaucaugcuauguuguaugacuaguugcuguaguugccucaaggguuguugcucuugcgguuccugcugcaaauuugaugaagacgauucagaaccuguucugaaaggagucaaauuacauuacacauaa

SEQ ID NO: 11728 - RNA, 3804 nt, Artificial Sequence
  SARS-CoV-2/pangolin/Guangxi/P5L/2017__EPI_ISL_410540 spike protein CDS wt (1-1267)
auguuuguuuuucuuuuugucuugccuuugguuuccagucaaugugucaauuugaccacaagaacuggaauaccgccagguuauaccaauucaucuacuagaggugucuauuauccagacaaaguuuuuaggucuucaauuuuacaucuuacacaagaccuuuucuuaccuuucuuuucuaauguuacuugguuuaacaccauaaauuaucaaggaggcuuuaagaaguuugacaauccuguuuuaccauuuaaugaugguguuuacuuugccuccacggaaaaguccaauauuauacgcgguuggauuuuuggaacaacacuugaugccagaacucaaucucuucuaauaguuaacaacgcaaccaauguuguuaucaaaguaugugaguuucaguuuugcacugauccauuuuuagguguuuacuaucauaacaacaauaaaacauggguugaaaaugaguuuagaguuuauucaagugccaacaauugcacuuucgaauacauuucucaaccuuuucuuauggaccuugaaggaaagcaagguaauuuuaagaaccuuagagaguuuguguuuaaaaauguugaugguuauuucaagauuuacucuaaacacacaccuauugauuuagugcgcgaccuccccagagguuuugcugcauuggaaccacugguggaccucccuauagguauuaauauuaccagauuccaaacauugcuugcuuuacauagaaguuaucuuacaccugguaagcuagaaaguggcuggacaacuggagcugcugcuuacuauguagguuaccuacaacagaggacuuuucucuuaaguuacaaucaaaauggaaccauuacagaugcuguugauuguucacuagacccucuuucagagacaaagugcacauuaaaaucccuaacaguugaaaaaggaauuuaccagacuucuaacuucagaguucaaccaacaaucaguauaguuagauuuccuaauauuacaaacuuauguccauuuggagaaguguuuaacgcauccaaauuugcaucaguuuaugcuuggaacaggaagagaauuagcaauuguguugcugauuacucuguacuuuauaacucuacaucauuuuccacuuuuaaauguuauggaguuucaccuacaaaacucaaugaccuuugcuucaccaauguguaugcagacucauuuguuguuaaaggugacgagguuagacaaauagcacccggacaaacugguguuauugcugauuauaacuauaagcugccagaugauuuuacugguuguguuauugcuuggaacucaguuaagcaagaugcuuugacuggugguaauuaugguuauuuguauagauuauuuagaaagucuaagcuuaaaccauuugagagagauauuuccacugaaauauaccaagccggcagcacacccuguaacggucaaguuggucuaaauuguuauuauccucuugaaagguaugguuuucacccaacuacagguguuaacuaccaaccuuuuagagugguuguuuuaucauuugaguuacuuaauggaccagcuacuguuuguggacccaaauugucuacaacacuaguuaaagacaaaugugucaauuucaacuuuaacgguuuaacuggcacagguguucuuacaacaucuaagaaacaguuucugccuuuucaacaauuugguagagacaucucugacacuacugaugcuguccgugacccacagacacuugaaauacuugacauuaccccuugcucuuuuggaggaguuagugugauaacaccagguacaaacacuucuaaucaaguggcuguacuuuaccaagauguuaacuguacugaagugccuauggccauucaugcagaacaacuuacaccugccuggcguguuuacucugcaggagcaaauguguuucaaacaagagcaggcuguuuaguaggugcugagcaugucaacaauucuuaugaaugugacauuccagucggugcuggcauaugugcaaguuaccauuccaugucaucauuucguagugucaaccagcguucaaucauugcuuacacuaugucuuuaggugcagaaaauucaguugcuuauucuaauaauucaauugccauaccuacuaauuuuacaauaaguguuaccacagaaauucuaccagugucaaugacuaagacuucuguagauuguacuauguacaucuguggagauucaauugaguguaguaauuuauugcuacaauauggcaguuuuugcacacaauuaaaccgugcuuugacugggauugcuguugaacaagacaaaaacacacaagaaguuuuugcccagguuaaacaaaucuacaaaacaccaccuauuaaagauuuugguggcuuuaacuuuucacaaauauugccagauccaucaaaaccaagcaagaggucauuuauugaggauuuacucuucaacaaagugacacuugcugaugcuggcuucaucaaacaauauggugauugccuuggugauauugcugcuagagaucucaucugugcacaaaaguucaauggacucacgguucuaccgccuuugcucacagaugaaaugauugcucaauacacuucugcacuacuugcuggaacaaucaccucagguuggaccuuuggugcaggagcugcuuuacaaauacccuuugcaaugcaaauggcuuacagguuuaauggcauuggagucacucagaauguucuauaugagaaucagaaauuaauugccaaucaguucaacagugcuauuggcaaaauacaggauucacuuucaucuacggcuagugcacuugguaaacuucaagacgucguaaaucaaaaugcacaggcuuuaaacacacuugucaaacaacuuaguuccaauuuuggagcuauuucgagugugcuuaaugauauucuuucacgucuugacaaaguugaggcugaagugcaaauugauagguuaaucacaggaagacuacagagucuucaaacuuaugugacacaacaauuaaucagagcagcagaaaucagagcuucugcuaaucuugcugcaacaaaaaugucugagugcguacucggacaaucuaaaagaguugauuuuuguggaaaaggcuaccauuuaaugucuuucccucaaucagcaccgcaugguguuguuuucuugcauguuacuuauguaccugcacaagaaaagaacuuuacuacugcuccugcuauuugucaugaaggaaaagcacacuucccucgugaaggugucuucguuucaaauggcacucauugguuuauuacacaaaggaauuuuuaugaaccucaaauuauuaccacugacaacacauucgucucugguagcugugauguuguaauuggaauagucaacaacacaguuuaugauccuuugcaacccgagcuugacucauuuaaggaggaguuagacaaauacuucaaaaaucacacaucaccagauguugaucuuggcgacauaucuggcauaaaugcuucggucgucaacauacaaaaagaaauugaccgccucaaugagguugccaaaaauuugaaugaaucacucauugaccuacaagagcuuggaaaauaugagcaauacaucaaauggccuugguacauuuggcuugguuuuauagcugggcuaauugcuaucauuauggucacaaucaugcuauguuguaugacuaguugcuguaguugccucaaggguuguugcucuugcgguuccugcugcaaauuugaugaagacgauucagaaccuguucugaaaggagucaaauuacauuacacauaa

SEQ ID NO: 11729 - RNA, 3804 nt, Artificial Sequence
  SARS-CoV-2/pangolin/Guangxi/P5E/2017__EPI_ISL_410541 spike protein CDS wt (1-1267)
auguuuguuuuucuuuuugucuugccuuugguuuccagucaaugugucaauuugaccacaagaacuggaauaccgccagguuauaccaauucaucuacuagaggugucuauuauccagacaaaguuuuuaggucuucaauuuuacaucuuacacaagaccuuuucuuaccuuucuuuucuaauguuacuugguuuaacaccauaacuuaucaaggaggcucuaagaaguuugacaauccuguuuuaccauuuaaugaugguguuuacuuugccuccacggaaaaguccaauauuauacgcgguuggauuuuuggaacaacacuugaugccagaacucaaucucuucuaauaguuaacaacgcaaccaauguuguuaucaaaguaugugaguuucaguuuugcacugauccauuuuuagguguuuacuaucauaacaacaauaaaacauggguugaaaaugaguuuagaguuuauucaagugccaacaauugcacuuucgaauacauuucucaaccuuuucuuauggaccuugaaggaaagcaagguaauuuuaagaaccuuagagaguuuguguuuaaaaauguugaugguuauuucaagauuuacucuaaacacacaccuauugauuuagugcgcgaccuccccagagguuuugcugcauuggaaccacugguggaccucccuauagguauuaauauuaccagauuccaaacauugcuugcuuuacauagaaguuaucuuacaccugguaagcuagaaaguggcuggacaacuggagcugcugcuuacuauguagguuaccuacaacagaggacuuuucucuuaaguuacaaucaaaauggaaccauuacagaugcuguugauuguucacuagacccucuuucagagacaaagugcacauuaaaaucccuaacaguugaaaaaggaauuuaccagacuucuaacuucagaguucaaccaacaaucaguauaguuagauuuccuaauauuacaaacuuauguccauuuggagaaguguuuaacgcauccaaauuugcaucaguuuaugcuuggaacaggaagagaauuagcaauuguguugcugauuacucuguacuuuauaacucuacaucauuuuccacuuuuaaauguuauggaguuucaccuacaaaacucaaugaccuuugcuucaccaauguguaugcagacucauuuguuguuaaaggugacgagguuagacaaauagcacccggacaaacugguguuauugcugauuauaacuauaagcugccagaugauuuuacugguuguguuauugcuuggaacucaguuaagcaagaugcuuugacuggugauaauuaugguuauuuguauagauuauuuagaaagucuaagcuuaaaccauuugagagagauauuuccacugaaauauaccaagccggcagcacacccuguaacggucaaguuggucuaaauuguuauuauccucuugaaagguaugguuuucacccaacuacagguguuaacuaccaaccuuuuagagugguuguuuuaucauuugaguuacuuaauggaccagcuacuguuuguggacccaaauugucuacaacacuaguuaaagacaaaugugucaauuucaacuuuaacgguuuaacuggcacagguguucuuacaacaucuaagaaacaguuucugccuuuucaacaauuugguagagacaucucugacacuacugaugcuguccgugacccacagacacuugaaauacuugacauuaccccuugcucuuuuggaggaguuagugugauaacaccagguacaaacacuucuaaucaaguggcuguacuuuaccaagauguuaacuguacugaagugccuauggccauucaugcagaacaacuuacaccugccuggcguguuuacucugcaggagcaaauguguuucaaacaagagcaggcuguuuaguaggugcugagcaugucaacaauucuuaugaaugugacauuccagucggugcuggcauaugugcaaguuaccauuccaugucaucauuucguagugucaaccagcguucaaucauugcuuacacuaugucuuuaggugcagaaaauucaguugcuuauucuaauaauucaauugccauaccuacuaauuuuacaauaaguguuaccacagaaauucuaccagugucaaugacuaagacuucuguagauuguacuauguacaucuguggagauucaauugaguguaguaauuuauugcuacaauauggcaguuuuugcacacaauuaaaccgugcuuugacugggauugcuguugaacaagacaaaaacacacaagaaguuuuugcccagguuaaacaaaucuacaaaacaccaccuauuaaagauuuugguggcuuuaacuuuucacaaauauugccagauccaucaaaaccaagcaagaggucauuuauugaggauuuacucuucaacaaagugacacuugcugaugcuggcuucaucaaacaauauggugauugccuuggugauauugcugcuagagaucucaucugugcacaaaaguucaauggacucacgguucuaccgccuuugcucacagaugaaaugauugcucaauacacuucugcacuacuugcuggaacaaucaccucagguuggaccuuuggugcaggagcugcuuuacaaauacccuuugcaaugcaaauggcuuacagguuuaauggcauuggagucacucagaauguucuauaugagaaucagaaauuaauugccaaucaguucaacagugcuauuggcaaaauacaggauucacuuucaucuacggcuagugcacuugguaaacuucaagacgucguaaaucaaaaugcacaggcuuuaaacacacuugucaaacaacuuaguuccaauuuuggagcuauuucgagugugcuuaaugauauucuuucacgucuugacaaaguugaggcugaagugcaaauugauagguuaaucacaggaagacuacagagucuucaaacuuaugugacacaacaauuaaucagagcagcagaaaucagagcuucugcuaaucuugcugcaacaaaaaugucugagugcguacucggacaaucuaaaagaguugauuuuuguggaaaaggcuaccauuuaaugucuuucccucaaucagcaccgcaugguguuguuuucuugcauguuacuuauguaccugcacaagaaaagaacuuuacuacugcuccugcuauuugucaugaaggaaaagcacacuucccucgugaaggugucuucguuucaaauggcacucauugguuuauuacacaaaggaauuuuuaugaaccucaaauuauuaccacugacaacacauucgucucugguagcugugauguuguaauuggaauagucaacaacacaguuuaugauccuuugcaacccgagcuugacucauuuaaggaggaguuagacaaauacuucaaaaaucacacaucaccagauguugaucuuggcgacauaucuggcauaaaugcuucggucgucaacauacaaaaagaaauugaccgccucaaugagguugccaaaaauuugaaugaaucacucauugaccuacaagagcuuggaaaauaugagcaauacaucaaauggccuugguacauuuggcuugguuuuauagcugggcuaauugcuaucauuauggucacaaucaugcuauguuguaugacuaguugcuguaguugccucaaggguuguugcucuugcgguuccugcugcaaauuugaugaagacgauucagaaccuguucugaaaggagucaaauuacauuacacauaa

SEQ ID NO: 11730 - RNA, 3798 nt, Artificial Sequence
  SARS-CoV-2/pangolin/Guangxi/P1E/2017__EPI_ISL_410539 spike protein CDS wt (1-1265)
auguuuguuuuucuuuuugucuugccuuugguuuccagucaaugugucaauuugaccacaagaacuggaauacagccagguuauaccaauucaucuacuagaggugucuauuauccagacaaaguuuuuaggucuucaauuuuacaucuuacacaagaccuuuucuuaccuuucuuuucuaauguuacuugguuuaacaccauaaauuaucaaggaggcuuuaagaaguuugacaauccuguuuuaccauuuaaugaugguguuuacuuugccuccacggaaaaguccaauauuauacgcgguuggauuuuuggaacaacacuugaugccagaacucaaucucuucuaauaguuaacaacgcaaccaauguuguuaucaaaguaugugaguuucaguuuugcacugauccauuuuuagguguuuacuaucauaacaacaauaaaacauggguugaaaaugaguuuagaguuuauucaagugccaacaauugcacuuucgaauacauuucucaaccuuuucuuauggaccuugaaggaaagcaagguaauuuuaagaaccuuagagaguuuguguuuaaaaauguugaugguuauuucaagauuuacucuaaacacacaccuauugauuuagugcgcgaccuccccagagguuuugcugcauuggaaccacugguggaccucccuauagguauuaauauuaccagauuccaaacauugcuugcuuuacauagaaguuaucuuacaccugguaagcuagaaaguggcuggacaacuggagcugcugcuuacuauguagguuaccuacaacagaggacuuuucucuuaaguuacaaucaaaauggaaccauuacagaugcuguugauuguucacuagacccucuuucagagacaaagugcacauuaaaaucccuaacaguugaaaaaggaauuuaccagacuucuaacuucagaguucaaccaacaaucaguauaguuagauuuccuaauauuacaaacuuauguccauuuggagaaguguuuaacgcauccaaauuugcaucaguuuaugcuuggaacaggaagagaauuagcaauuguguugcugauuacucuguacuuuauaacucuacaucauuuuccacuuuuaaauguuauggaguuucaccuacaaaacucaaugaccuuugcuucaccaauguguaugcagacucauuuguuguuaaaggugacgagguuagacaaauagcacccggacaaacugguguuauugcugauuauaacuauaagcugccagaugauuuuacugguuguguuauugcuuggaacucaguuaagcaagaugcuuugacuggugguaauuauuuguauagauuauuuagaaagucuaagcuuaaaccauuugagagagauauuuccacugaaauauaccaagccggcagcacacccuguaacggucaaguuggucuaaauuguuauuauccucuugaaagguaugguuuucacccaacuacagguguuaacuaccaaccuuuuagagugguuguuuuaucauuugaguuacuuaauggaccagcuacuguuuguggacccaaauugucuacaacacuaguuaaagacaaaugugucaauuucaacuuuaacgguuuaacuggcacagguguucuuacaacaucuaagaaacaguuucugccuuuucaacaauuugguagagacaucucugacacuacugaugcuguccgugacccacagacacuugaaauacuugacauuaccccuugcucuuuuggaggaguuagugugauaacaccagguacaaacacuucuaaucaaguggcuguacuuuaccaagauguuaacuguacugaagugccuauggccauucaugcagaacaacuuacaccugccuggcguguuuacucugcaggagcaaauguguuucaaacaagagcaggcuguuuaguaggugcugagcaugucaacaauucuuaugaaugugacauuccagucggugcuggcauaugugcaaguuaccauuccaugucaucauugcguagugucaaccagcguucaaucauugcuuacacuaugucuuuaggugcagaaaauucaguugcuuauucuaauaauucaauugccauaccuacuaauuuuacaauaaguguuaccacagaaauucuaccagugucaaugacuaagacuucuguagauuguacuauguacaucuguggagauucaauugaguguaguaauuuauugcuacaauauggcaguuuuugcacacaauuaaaccgugcuuugacugggauugcuguugaacaagacaaaaacacacaagaaguuuuugcccagguuaaacaaaucuacaaaacaccaccuauuaaagauuuugguggcuuuaacuuuucacaaauauugccagauccaucaaaaccaagcaagaggucauuuauugaggauuuacucuucaacaaagugacacuugcugaugcuggcuucaucaaacaauauggugauugccuuggugauauugcugcuagagaucucaucugugcacaaaaguucaauggacucacgguucuaccgccuuugcucacagaugaaaugauugcucaauacacuucugcacuacuugcuggaacaaucaccucagguuggaccuuuggugcaggagcugcuuuacaaauacccuuugcaaugcaaauggcuuacagguuuaauggcauuggagucacucagaauguucuauaugagaaucagaaauuaauugccaaucaguucaacagugcuauuggcaaaauacaggauucacuuucaucuacggcuagugcacuugguaaacuucaagacgucguaaaucaaaaugcacaggcuuuaaacacacuugucaaacaacuuaguuccaauuuuggagcuauuucgagugugcuuaaugauauucuuucacgucuugacaaaguugaggcugaagugcaaauugauagguuaaucacaggaagacuacagagucuucaaacuuaugugacacaacaauuaaucagagcagcagaaaucagagcuucugcuaaucuugcugcaacaaaaaugucugagugcguacucggacaaucuaaaagaguugauuuuuguggaaaaggcuaccauuuaaugucuuucccucaaucagcaccgcaugguguuguuuucuugcauguuacuuauguaccugcacaagaaaagaacuuuacuacugcuccugcuauuugucaugaaggaaaagcacacuucccucgugaaggugucuucguuucaaauggcacucauugguuuauuacacaaaggaauuuuuaugaaccucaaauuauuaccacugacaacacauucgucucugguagcugugauguuguaauuggaauagucaacaacacaguuuaugauccuuugcaacccgagcuugacucauuuaaggaggaguuagacaaauacuucaaaaaucacacaucaccagauguugaucuuggcgacauaucuggcauaaaugcuucggucgucaacauacaaaaagaaauugaccgccucaaugagguugccaaaaauuugaaugaaucacucauugaccuacaagagcuuggaaaauaugagcaauacaucaaauggccuugguacauuuggcuugguuuuauagcugggcuaauugcuaucauuauggucacaaucaugcuauguuguaugacuaguugcuguaguugccucaaggguuguugcucuugcgguuccugcugcaaauuugaugaagacgauucagaaccuguucugaaaggagucaaauuacauuacacauaa

SEQ ID NO: 11731 - RNA, 3822 nt, Artificial Sequence; identical to SEQ ID NO: 136
  SARS-CoV-2/Wuhan/WIV05/2019__EPI_ISL_402128 spike protein CDS gc (1-1273)

SEQ ID NO: 11732 - RNA, 3810 nt, Artificial Sequence
  SARS-CoV-2/bat/Yunnan/RaTG13/2013__EPI_ISL_402131 spike protein CDS gc (1-1269)
auguucguguuccugguccuccugccccuggugagcucccagugcgugaaccucaccacccgcacgcagcugccgcccgccuacaccaacagcuccacccggggcgucuacuaccccgacaagguguuccgcagcuccgugcugcaccucacccaggaccuguuccugcccuucuucagcaacgucacgugguuccacgccauccacguguccgggaccaacggcaucaagcgguucgacaacccggugcuccccuucaacgacggggucuacuucgcgagcaccgagaaguccaacaucauccgcggcuggaucuucgggaccacgcuggacagcaagacccagucccugcucaucgugaacaacgccaccaacguggucaucaaggugugcgaguuccaguucugcaacgaccccuuccugggcguguacuaccacaagaacaacaagagcuggauggaguccgaguuccgggucuacagcuccgccaacaacugcaccuucgaguacgugagccagcccuuccugauggaccucgagggcaagcaggggaacuucaagaaccugcgcgaguucguguucaagaacaucgacggcuacuucaagaucuacuccaagcacacgccgaucaaccugguccgggaccucccgcccggguucagcgcccuggagccccugguggaccuccccaucggcaucaacaucacccgcuuccagacccugcuggcccuccaccgguccuaccugacccccggggacagcagcuccggcuggacggcgggcgccgccgccuacuacgugggguaccugcagccccgcaccuuccuccugaaguacaacgagaacggcaccaucaccgacgcggucgacugcgcccuggacccccucagcgagacgaagugcacccugaaguccuucaccguggagaaggggaucuaccagaccagcaacuuccgggugcagccgacggacuccaucguccgcuuccccaacaucaccaaccugugccccuucggcgagguguucaacgccaccaccuucgccagcgucuacgccuggaaccggaagcgcaucuccaacugcguggcggacuacagcgugcucuacaacuccacgagcuucuccaccuucaagugcuacggcgucagccccaccaagcugaacgaccugugcuucaccaacguguacgccgacuccuucgugaucacgggggacgagguccggcagaucgccccgggccagaccgggaagaucgccgacuacaacuacaagcuccccgacgacuucaccggcugcgugaucgccuggaacagcaagcacaucgacgcgaaggagggcgggaacuucaacuaccuguaccgccuguuccggaaggccaaccucaagcccuucgagcgcgacaucuccaccgagaucuaccaggccggcagcaagcccugcaacgggcagacgggccugaacugcuacuacccgcuguaccgguacggguucuaccccaccgacggcguggggcaccagcccuaccgcgucguggugcucuccuucgagcugcugaacgcccccgccaccgucugcggcccgaagaaguccaccaaccucgugaagaacaagugcgugaacuucaacuucaacggccugaccgggacgggcguccugaccgagagcaacaagaaguuccugcccuuccagcaguucgggcgggacaucgcggacaccaccgacgccgugcgcgacccccagacgcucgagauccuggacaucaccccgugcagcuucggcggggugagcgucaucacccccggcaccaacgccuccaaccagguggccgugcuguaccaggacgucaacugcacggaggugcccguggccauccacgcggaccagcucacccccaccuggcgcgucuacagcaccggcuccaacguguuccagacgcgggccgggugccugaucggcgccgagcacgugaacaacagcuacgagugcgacaucccgaucggggccggcaucugcgcguccuaccagacccagaccaacagccgcuccgucgccagccaguccaucaucgccuacaccaugagccugggcgccgagaacuccguggccuacagcaacaacuccaucgcgauccccacgaacuucaccaucagcgugaccaccgagauccuccccgucuccaugacgaagaccagcguggacugcaccauguacaucugcggggacuccaccgagugcagcaaccugcugcuccaguacggcagcuucugcacgcagcugaaccgggcccugaccgggaucgccguggagcaggacaagaacacccaggaggucuucgcccaggugaagcagaucuacaagacgcccccgaucaaggacuucggcggguucaacuucucccagauccuccccgaccccagcaagcccuccaagcgcagcuucaucgaggaccugcuguucaacaaggugacccucgccgacgcgggcuucaucaagcaguacggcgacugccugggggacaucgccgcccgggaccugaucugcgcccagaaguucaacggccucaccguccugccgccccugcucaccgacgagaugaucgcccaguacaccuccgcgcugcuggccgggacgaucaccagcggcuggaccuucggggccggcgccgcgcuccagauccccuucgccaugcagauggccuaccgcuucaacggcaucggggugacccagaacgugcuguacgagaaccagaagcugaucgccaaccaguucaacuccgccaucggcaagauccaggacagccucuccagcacggcguccgcccuggggaagcugcaggacgucgugaaccagaacgcccaggcccucaacacccuggugaagcagcugagcuccaacuucggcgccaucagcuccguccucaacgacauccugagccggcuggacaagguggaggcggaggugcagaucgaccgccucaucaccgggcggcugcagucccugcagaccuacgucacccagcagcucauccgcgccgccgagauccgggccagcgccaaccuggcggccacgaagauguccgagugcgugcugggccagagcaagcgcguggacuucugcggcaagggguaccaccucaugagcuucccccaguccgccccgcacggcgucguguuccugcacgugaccuacguccccgcccaggagaagaacuucaccaccgcgcccgccaucugccacgacgggaaggcccacuucccccgggagggcguguucgucagcaacgggacgcacugguucgugacccagcgcaacuucuacgagccgcagaucaucaccaccgacaacacguucguguccggcagcugcgacgucgugaucggcaucgugaacaacaccgucuacgacccccugcagcccgagcucgacuccuucaaggaggagcuggacaaguacuucaagaaccacaccagccccgacguggaccugggggacaucuccggcaucaacgccagcguggucaacauccagaaggagaucgaccggcucaacgagguggccaagaaccugaacgagucccugaucgaccuccaggagcuggggaaguacgagcaguacaucaaguggccgugguacaucuggcugggcuucaucgcgggccucaucgccaucaucauggugaccaucaugcugugcugcaugacgagcugcugcuccugccugaaggggugcugcagcugcggcuccugcugcaaguucgacgaggacgacagcgagcccguccucaagggggugaagcugcacuacaccuga

SEQ ID NO: 11733 - RNA, 3822 nt, Artificial Sequence
  SARS-CoV-2/Wuhan/HBCDC-HB-01/2019__EPI_ISL_402132 spike protein CDS gc (1-1273)
auguucguguuccugguccuccugccccuggugagcucccagugcgugaaccucaccacccgcacgcagcugccgcccgccuacaccaacagcaucacccggggcgucuacuaccccgacaagguguuccgcuccagcgugcugcacuccacccaggaccucuuccugcccuucuucagcaacgucacgugguuccacgccauccacguguccgggaccaacggcaccaagcgguucgacaacccggugcugcccuucaacgacggggucuacuucgcgagcaccgagaaguccaacaucauccgcggcuggaucuucgggacgacccucgacagcaagacccagucccugcugaucgugaacaacgccaccaacguggucaucaaggugugcgaguuccaguucugcaacgaccccuuccucggcguguacuaccacaagaacaacaagagcuggauggaguccgaguuccgggucuacagcuccgccaacaacugcacguucgaguacgugagccagcccuuccugauggaccuggagggcaagcaggggaacuucaagaaccuccgcgaguucguguucaagaacaucgacggcuacuucaagaucuacuccaagcacaccccgaucaaccugguccgggaccugccccagggguucagcgcccucgagccccugguggaccugcccaucggcaucaacaucacccgcuuccagacccuccuggcccugcaccgguccuaccucacgccgggggacagcagcuccggcuggaccgcgggcgccgccgccuacuacgugggguaccugcagccccgcaccuuccugcucaaguacaacgagaacggcaccaucacggacgcggucgacugcgcccuggacccccugagcgagaccaagugcacccucaaguccuucaccguggagaaggggaucuaccagacgagcaacuuccgggugcagcccaccgaguccaucguccgcuucccgaacaucaccaaccugugccccuucggcgagguguucaacgccacccgguucgccagcgucuacgccuggaaccgcaagcggaucuccaacugcguggcggacuacagcgugcuguacaacuccgccagcuucuccacguucaagugcuacggcgucagccccaccaagcucaacgaccugugcuucaccaacguguacgccgacuccuucgugauccgcggggacgagguccggcagaucgcccccggccagaccgggaagaucgccgacuacaacuacaagcugccggacgacuucacgggcugcgugaucgcguggaacagcaacaaccucgacuccaaggucgggggcaacuacaacuaccuguaccgccuguuccgcaagagcaaccucaagcccuucgagcgggacaucuccaccgagaucuaccaggccggcagcacccccugcaacgggguggagggcuucaacugcuacuucccccugcaguccuacggguuccagccgaccaacggcgugggguaccagcccuaccggguggucgugcugagcuucgagcuccugcacgcccccgccacggugugcggccccaagaaguccaccaaccuggucaagaacaagugcgugaacuucaacuucaacggccucaccgggaccggcgugcugaccgagagcaacaagaaguuccugccguuccagcaguucgggcgcgacaucgccgacacgaccgacgcgguccgcgacccccagacccuggagauccucgacaucacccccugcagcuucggcgggguguccgugaucacgccgggcaccaacaccagcaaccaggucgccgugcuguaccaggacgugaacugcaccgagguccccguggccauccacgccgaccagcugacgcccaccuggcggguguacuccaccggcagcaacgucuuccagacccgcgccgggugccucaucggcgcggagcacgugaacaacuccuacgagugcgacauccccaucggggccggcaucugcgccagcuaccagacgcagaccaacuccccgcggcgcgcccggagcguggcgucccagagcaucaucgccuacaccaugucccugggcgccgagaacagcgucgccuacuccaacaacagcaucgccauccccaccaacuucacgaucuccgugaccaccgagauccugcccgugagcaugaccaagacgagcgucgacugcaccauguacaucugcggggacuccaccgagugcagcaaccuccugcugcaguacggcuccuucugcacccagcucaaccgcgcgcugacggggaucgccguggagcaggacaagaacacccaggagguguucgcccaggucaagcagaucuacaagacgcccccgaucaaggacuucggcggguucaacuucagccagauccugcccgaccccuccaagcccagcaagcgguccuucaucgaggaccuccuguucaacaaggugacccuggccgacgccggcuucaucaagcaguacggcgacugccucggggacaucgcggcccgcgaccugaucugcgcccagaaguucaacggccugaccgugcucccgccccugcugaccgacgagaugaucgcccaguacaccagcgcccuccuggcggggaccaucacguccggcuggaccuucggggccggcgccgcccugcagauccccuucgcgaugcagauggccuaccgguucaacggcaucggggucacccagaacgugcucuacgagaaccagaagcugaucgccaaccaguucaacagcgccaucggcaagauccaggacucccugagcuccaccgccagcgcgcucgggaagcugcaggacguggucaaccagaacgcccaggcccugaacacgcucgugaagcagcuguccagcaacuucggcgccaucuccagcgugcugaacgacauccucucccgccuggacaaggucgaggccgaggugcagaucgaccggcugaucaccgggcgccuccagagccugcagaccuacgugacccagcagcugauccgggcggccgagauccgcgccagcgccaaccucgccgcgaccaagauguccgagugcguccugggccagagcaagcggguggacuucugcggcaagggguaccaccugauguccuucccccagagcgccccgcacggcguggucuuccuccacgugacguacguccccgcccaggagaagaacuucaccaccgcccccgcgaucugccacgacgggaaggcccacuucccccgcgagggcguguucguguccaacgggacccacugguucgucacgcagcggaacuucuacgagccgcagaucaucaccaccgacaacaccuucgugagcggcaacugcgacguggucaucggcaucgugaacaacacgguguacgacccccugcagcccgagcuggacuccuucaaggaggagcucgacaaguacuucaagaaccacaccagccccgacgucgaccugggggacaucuccggcaucaacgccagcguggugaacauccagaaggagaucgaccgccugaacgaggucgccaagaaccucaacgagucccugaucgaccugcaggagcucgggaaguacgagcaguacaucaaguggccgugguacaucuggcugggcuucaucgccggccugaucgcgaucgugauggugaccaucaugcucugcugcaugaccagcugcugcuccugccugaaggggugcugcagcugcggcuccugcugcaaguucgacgaggacgacagcgagcccguccugaagggggugaagcuccacuacacguga

SEQ ID NO: 11734 - RNA, 3822 nt, Artificial Sequence
  SARS-CoV-2/Guangdong/20SF028/2020__EPI_ISL_403936 spike protein CDS gc (1-1273)
auguucguguuccugguccuccugccccuggugagcucccagugcgugaaccucaccacccgcacgcagcugccgcccgccuacaccaacagcuucacccggggcgucuacuaccccgacaagguguuccgcuccagcgugcuguacuccacccaggaccucuuccugcccuucuucagcaacgucacgugguuccacgccauccacguguccgggaccaacggcaccaagcgguucgacaacccggugcugcccuucaacgacggggucuacuucgcgagcaccgagaaguccaacaucauccgcggcuggaucuucgggacgacccucgacagcaagacccagucccugcugaucgugaacaacgccaccaacguggucaucaaggugugcgaguuccaguucugcaacgaccccuuccucggcguguacuaccacaagaacaacaagagcuggauggaguccgaguuccgggucuacagcuccgccaacaacugcacguucgaguacgugagccagcccuuccugauggaccuggagggcaagcaggggaacuucaagaaccuccgcgaguucguguucaagaacaucgacggcuacuucaagaucuacuccaagcacaccccgaucaaccugguccgggaccugccccagggguucagcgcccucgagccccugguggaccugcccaucggcaucaacaucacccgcuuccagacccuccuggcccugcaccgguccuaccucacgccgggggacagcagcuccggcuggaccgcgggcgccgccgccuacuacgugggguaccugcagccccgcaccuuccugcucaaguacaacgagaacggcaccaucacggacgcggucgacugcgcccuggacccccugagcgagaccaagugcacccucaaguccuucaccguggagaaggggaucuaccagacgagcaacuuccgggugcagcccaccgaguccaucguccgcuucccgaacaucaccaaccugugccccuucggcgagguguucaacgccacccgguucgccagcgucuacgccuggaaccgcaagcggaucuccaacugcguggcggacuacagcgugcuguacaacuccgccagcuucuccacguucaagugcuacggcgucagccccaccaagcucaacgaccugugcuucaccaacguguacgccgacuccuucgugauccgcggggacgagguccggcagaucgcccccggccagaccgggaagaucgccgacuacaacuacaagcugccggacgacuucacgggcugcgugaucgcguggaacagcaacaaccucgacuccaaggucgggggcaacuacaacuaccuguaccgccuguuccgcaagagcaaccucaagcccuucgagcgggacaucuccaccgagaucuaccaggccggcagcacccccugcaacgggguggagggcuucaacugcuacuucccccugcaguccuacggguuccagccgaccaacggcgugggguaccagcccuaccggguggucgugcugagcuucgagcuccugcacgcccccgccacggugugcggccccaagaaguccaccaaccuggucaagaacaagugcgugaacuucaacuucaacggccucaccgggaccggcgugcugaccgagagcaacaagaaguuccugccguuccagcaguucgggcgcgacaucgccgacacgaccgacgcgguccgcgacccccagacccuggagauccucgacaucacccccugcagcuucggcgggguguccgugaucacgccgggcaccaacaccagcaaccaggucgccgugcuguaccaggacgugaacugcaccgagguccccguggccauccacgccgaccagcugacgcccaccuggcggguguacuccaccggcagcaacgucuuccagacccgcgccgggugccucaucggcgcggagcacgugaacaacuccuacgagugcgacauccccaucggggccggcaucugcgccagcuaccagacgcagaccaacuccccgcggcgcgcccggagcguggcgucccagagcaucaucgccuacaccaugucccugggcgccgagaacagcgucgccuacuccaacaacagcaucgccauccccaccaacuucacgaucuccgugaccaccgagauccugcccgugagcaugaccaagacgagcgucgacugcaccauguacaucugcggggacuccaccgagugcagcaaccuccugcugcaguacggcuccuucugcacccagcucaaccgcgcgcugacggggaucgccguggagcaggacaagaacacccaggagguguucgcccaggucaagcagaucuacaagacgcccccgaucaaggacuucggcggguucaacuucagccagauccugcccgaccccuccaagcccagcaagcgguccuucaucgaggaccuccuguucaacaaggugacccuggccgacgccggcuucaucaagcaguacggcgacugccucggggacaucgcggcccgcgaccugaucugcgcccagaaguucaacggccugaccgugcucccgccccugcugaccgacgagaugaucgcccaguacaccagcgcccuccuggcggggaccaucacguccggcuggaccuucggggccggcgccgcccugcagauccccuucgcgaugcagauggccuaccgguucaacggcaucggggucacccagaacgugcucuacgagaaccagaagcugaucgccaaccaguucaacagcgccaucggcaagauccaggacucccugagcuccaccgccagcgcgcucgggaagcugcaggacguggucaaccagaacgcccaggcccugaacacgcucgugaagcagcuguccagcaacuucggcgccaucuccagcgugcugaacgacauccucucccgccuggacaaggucgaggccgaggugcagaucgaccggcugaucaccgggcgccuccagagccugcagaccuacgugacccagcagcugauccgggcggccgagauccgcgccagcgccaaccucgccgcgaccaagauguccgagugcguccugggccagagcaagcggguggacuucugcggcaagggguaccaccugauguccuucccccagagcgccccgcacggcguggucuuccuccacgugacguacguccccgcccaggagaagaacuucaccaccgcccccgcgaucugccacgacgggaaggcccacuucccccgcgagggcguguucguguccaacgggacccacugguucgucacgcagcggaacuucuacgagccgcagaucaucaccaccgacaacaccuucgugagcggcaacugcgacguggucaucggcaucgugaacaacacgguguacgacccccugcagcccgagcuggacuccuucaaggaggagcucgacaaguacuucaagaaccacaccagccccgacgucgaccugggggacaucuccggcaucaacgccagcguggugaacauccagaaggagaucgaccgccugaacgaggucgccaagaaccucaacgagucccugaucgaccugcaggagcucgggaaguacgagcaguacaucaaguggccgugguacaucuggcugggcuucaucgccggccugaucgcgaucgugauggugaccaucaugcucugcugcaugaccagcugcugcuccugccugaaggggugcugcagcugcggcuccugcugcaaguucgacgaggacgacagcgagcccguccugaagggggugaagcuccacuacacguga

SEQ ID NO: 11735 - RNA, 3822 nt, Artificial Sequence
  SARS-CoV-2/Shenzhen/SZTH-001/2020__EPI_ISL_406592 spike protein CDS gc (1-1273)
auguucguguuccugguccuccugccccuggugagcucccagugcgugaaccucaccacccgcacgcagcugccgcccgccuacaccaacagcuucacccggggcgucuacuaccccgacaagguguuccgcuccagcgugcugcacuccacccaggaccucuuccugcccuucuucagcaacgucacgugguuccacgccauccacguguccgggaccaacggcaccaagcgguucgacaacccggugcugcccuucaacgacggggucuacuucgcgagcaccgagaaguccaacaucauccgcggcuggaucuucgggacgacccucgacagcaagacccagucccugcugaucgugaacaacgccaccaacguggucaucaaggugugcgaguuccaguucugcaacgaccccuuccucggcguguacuaccacaagaacaacaagagcuggauggaguccgaguuccgggucuacagcuccgccaacaacugcacguucgaguacgugagccagcccuuccugauggaccuggagggcaagcaggggaacuucaagaaccuccgcgaguucguguucaagaacaucgacggcuacuucaagaucuacuccaagcacaccccgaucaaccugguccgggaccugccccagggguucagcgcccucgagccccugguggaccugcccaucggcaucaacaucacccgcuuccagacccuccuggcccugcaccgguccuaccucacgccgggggacagcagcuccggcuggaccgcgggcgccgccgccuacuacgugggguaccugcagccccgcaccuuccugcucaaguacaacgagaacggcaccaucacggacgcggucgacugcgcccuggacccccugagcgagaccaagugcacccucaaguccuucaccguggagaaggggaucuaccagacgagcaacuuccgggugcagcccaccgaguccaucguccgcuucccgaacaucaccaaccugugccccuucggcgagguguucaacgccacccgguucgccagcgucuacgccuggaaccgcaagcggaucuccaacugcguggcggacuacagcgugcuguacaacuccgccagcuucuccacguucaagugcuacggcgucagccccaccaagcucaacgaccugugcuucaccaacguguacgccgacuccuucgugauccgcggggacgagguccggcagaucgcccccggccagaccgggaagaucgccgacuacaacuacaagcugccggacgacuucacgggcugcgugaucgcguggaacagcaacaaccucgacuccaaggucgggggcaacuacaacuaccuguaccgccuguuccgcaagagcaaccucaagcccuucgagcgggacaucuccaccgagaucuaccaggccggcagcacccccugcaacgggguggagggcuucaacugcuacuucccccugcaguccuacggguuccagccgaccaacggcgugggguaccagcccuaccggguggucgugcugagcuucgagcuccugcacgcccccgccacggugugcggccccaagaaguccaccaaccuggucaagaacaagugcgugaacuucaacuucaacggccucaccgggaccggcgugcugaccgagagcaacaagaaguuccugccguuccagcaguucgggcgcgacaucgccgacacgaccgacgcgguccgcgacccccagacccuggagauccucgacaucacccccugcagcuucggcgggguguccgugaucacgccgggcaccaacaccagcaaccaggucgccgugcuguaccaggacgugaacugcaccgagguccccguggccauccacgccgaccagcugacgcccaccuggcggguguacuccaccggcagcaacgucuuccagacccgcgccgggugccucaucggcgcggagcacgugaacaacuccuacgagugcgacauccccaucggggccggcaucugcgccagcuaccagacgcagaccaacuccccgcggcgcgcccggagcguggcgucccagagcaucaucgccuacaccaugucccugggcgccgagaacagcgucgccuacuccaacaacagcaucgccauccccaccaacuucacgaucuccgugaccaccgagauccugcccgugagcaugaccaagacgagcgucgacugcaccauguacaucugcggggacuccaccgagugcagcaaccuccugcugcaguacggcuccuucugcacccagcucaaccgcgcgcugacggggaucgccguggagcaggacaagaacacccaggagguguucgcccaggucaagcagaucuacaagacgcccccgaucaaggacuucggcggguucaacuucagccagauccugcccgaccccuccaagcccagcaagcgguccuucaucgaggaccuccuguucaacaaggugacccuggccgacgccggcuucaucaagcaguacggcgacugccucggggacaucgcggcccgcgaccugaucugcgcccagaaguucaacggccugaccgugcucccgccccugcugaccgacgagaugaucgcccaguacaccagcgcccuccuggcggggaccaucacguccggcuggaccuucggggccggcgccgcccugcagauccccuucgcgaugcagauggccuaccgguucaacggcaucggggucacccagaacgugcucuacgagaaccagaagcugaucgccaaccaguucaacagcgccaucggcaagauccaggacucccugagcuccaccgccagcgcgcucgggaagcugcaggacguggucaaccagaacgcccaggcccugaacacgcucgugaagcagcuguccagcaacuucggcgccaucuccagcgugcugaacgacauccucucccgccuggacaaggucgaggccgaggugcagaucgaccggcugaucaccgggcgccuccagagccugcagaccuacgugacccagcagcugauccgggcggccgagauccgcgccagcgccaaccucgccgcgaccaagauguccgagugcguccugggccagagcaagcggguggacuucugcggcaagggguaccaccugauguccuucccccagagcgccccgcacggcguggucuuccuccacgugacguacguccccgcccaggagaagaacuucaccaccgcccccgcgaucugccacgacgggaaggcccacuucccccgcgagggcguguucguguccaacgggacccacugguucgucacgcagcggaacuucuacgagccgcagaucaucaccaccgacaacaccuucgugagcggcaacugcgacgugcugaucggcaucgucaacaacacgguguacgacccccugcagcccgagcucgacuccuucaaggaggagcuggacaaguacuucaagaaccacaccagccccgacguggaccugggggacaucuccggcaucaacgccagcgucgugaacauccagaaggagaucgaccgccucaacgagguggccaagaaccugaacgagucccugaucgaccuccaggagcuggggaaguacgagcaguacaucaaguggccgugguacaucuggcugggcuucaucgccggccucaucgcgaucgucauggugaccaucaugcugugcugcaugaccagcugcugcuccugccugaaggggugcugcagcugcggcuccugcugcaaguucgacgaggacgacagcgggcccgugcucaagggcgucaagcugcacuacacguga

SEQ ID NO: 11736 - RNA, 3822 nt, Artificial Sequence
  SARS-CoV-2/Shenzhen/SZTH-004/2020__EPI_ISL_406595 spike protein CDS gc (1-1273)
auguucguguuccugguccuccugccccuggugagcucccagugcgugaaccucaccacccgcacgcagcugccgcccgccuacaccaacagcuucacccggggcgucuacuaccccgacaagguguuccgcuccagcgugcugcacuccacccaggaccucuuccugcccuucuucagcaacgucacgugguuccacgccauccacguguccgggaccaacggcaccaagcgguucgacaacccggugcugcccuucaacgacggggucuacuucgcgagcaccgagaaguccaacaucauccgcggcuggaucuucgggacgacccucgacagcaagacccagucccugcugaucgugaacaacgccaccaacguggucaucaaggugugcgaguuccaguucugcaacgaccccuuccucggcguguacuaccacaagaacaacaagagcuggauggaguccgaguuccgggucuacagcuccgccaacaacugcacguucgaguacgugagccagcccuuccugauggaccuggagggcaagcaggggaacuucaagaaccuccgcgaguucguguucaagaacaucgacggcuacuucaagaucuacuccaagcacaccccgaucaaccugguccgggaccugccccagggguucagcgcccucgagccccugguggaccugcccaucggcaucaacaucacccgcuuccagacccuccuggcccugcaccgguccuaccucacgccgggggacagcagcuccggcuggaccgcgggcgccgccgccuacuacgugggguaccugcagccccgcaccuuccugcucaaguacaacgagaacggcaccaucacggacgcggucgacugcgcccuggacccccugagcgagaccaagugcacccucaaguccuucaccguggagaaggggaucuaccagacgagcaacuuccgggugcagcccaccgaguccaucguccgcuucccgaacaucaccaaccugugccccuucggcgagguguucaacgccacccgguucgccagcgucuacgccugggaccgcaagcggaucuccaacugcguggcguacuacagcgugcuguacaacuccgccagcuucuccacguucaagugcuacggcgucagccccaccaagcucaacgaccugugcuucaccaacguguacgccgacuccuucgugauccgcggggacgagguccggcagaucgcccccggccagaccgggaagaucgccgacuacaacuacaagcugccggacgacuucacgggcugcgugaucgcguggaacagcaacaaccucgacuccaaggucgggggcaacuacaacuaccuguaccgccuguuccgcaagagcaaccucaagcccuucgagcgggacaucuccaccgagaucuaccaggccggcagcacccccugcaacgggguggagggcuucaacugcuacuucccccugcaguccuacggguuccagccgaccaacggcgugggguaccagcccuaccggguggucgugcugagcuucgagcuccugcacgcccccgccacggugugcggccccaagaaguccaccaaccuggucaagaacaagugcgugaacuucaacuucaacggccucaccgggaccggcgugcugaccgagagcaacaagaaguuccugccguuccagcaguucgggcgcgacaucgccgacacgaccgacgcgguccgcgacccccagacccuggagauccucgacaucacccccugcagcuucggcgggguguccgugaucacgccgggcaccaacaccagcaaccaggucgccgugcuguaccaggacgugaacugcaccgagguccccguggccauccacgccgaccagcugacgcccaccuggcggguguacuccaccggcagcaacgucuuccagacccgcgccgggugccucaucggcgcggagcacgugaacaacuccuacgagugcgacauccccaucggggccggcaucugcgccagcuaccagacgcagaccaacuccccgcggcgcgcccggagcguggcgucccagagcaucaucgccuacaccaugucccugggcgccgagaacagcgucgccuacuccaacaacagcaucgccauccccaccaacuucacgaucuccgugaccaccgagauccugcccgugagcaugaccaagacgagcgucgacugcaccauguacaucugcggggacuccaccgagugcagcaaccuccugcugcaguacggcuccuucugcacccagcucaaccgcgcgcugacggggaucgccguggagcaggacaagaacacccaggagguguucgcccaggucaagcagaucuacaagacgcccccgaucaaggacuucggcggguucaacuucagccagauccugcccgaccccuccaagcccagcaagcgguccuucaucgaggaccuccuguucaacaaggugacccuggccgacgccggcuucaucaagcaguacggcgacugccucggggacaucgcggcccgcgaccugaucugcgcccagaaguucaacggccugaccgugcucccgccccugcugaccgacgagaugaucgcccaguacaccagcgcccuccuggcggggaccaucacguccggcuggaccuucggggccggcgccgcccugcagauccccuucgcgaugcagauggccuaccgguucaacggcaucggggucacccagaacgugcucuacgagaaccagaagcugaucgccaaccaguucaacagcgccaucggcaagauccaggacucccugagcuccaccgccagcgcgcucgggaagcugcaggacguggucaaccagaacgcccaggcccugaacacgcucgugaagcagcuguccagcaacuucggcgccaucuccagcgugcugaacgacauccucucccgccuggacaaggucgaggccgaggugcagaucgaccggcugaucaccgggcgccuccagagccugcagaccuacgugacccagcagcugauccgggcggccgagauccgcgccagcgccaaccucgccgcgaccaagauguccgagugcguccugggccagagcaagcggguggacuucugcggcaagggguaccaccugauguccuucccccagagcgccccgcacggcguggucuuccuccacgugacguacguccccgcccaggagaagaacuucaccaccgcccccgcgaucugccacgacgggaaggcccacuucccccgcgagggcguguucguguccaacgggacccacugguucgucacgcagcggaacuucuacgagccgcagaucaucaccaccgacaacaccuucgugagcggcaacugcgacguggucaucggcaucgugaacaacacgguguacgacccccugcagcccgagcuggacuccuucaaggaggagcucgacaaguacuucaagaaccacaccagccccgacgucgaccugggggacaucuccggcaucaacgccagcguggugaacauccagaaggagaucgaccgccugaacgaggucgccaagaaccucaacgagucccugaucgaccugcaggagcucgggaaguacgagcaguacaucaaguggccgugguacaucuggcugggcuucaucgccggccugaucgcgaucgugauggugaccaucaugcucugcugcaugaccagcugcugcuccugccugaaggggugcugcagcugcggcuccugcugcaaguucgacgaggacgacagcgagcccguccugaagggggugaagcuccacuacacguga

SEQ ID NO: 11737 - RNA, 3822 nt, Artificial Sequence
  SARS-CoV-2/France/IDF0372/2020__EPI_ISL_406596 spike protein CDS gc (1-1273)
auguucguguuccugguccuccugccccuggugagcucccagugcgugaaccucaccacccgcacgcagcugccgcccgccuacaccaacagcuucacccggggcgucuacuaccccgacaagguguuccgcuccagcgugcugcacuccacccaggaccucuuccugcccuucuucagcaacgucacgugguuccacgccauccacguguccgggaccaacggcaccaagcgguucgacaacccggugcugcccuucaacgacggggucuacuucgcgagcaccgagaaguccaacaucauccgcggcuggaucuucgggacgacccucgacagcaagacccagucccugcugaucgugaacaacgccaccaacguggucaucaaggugugcgaguuccaguucugcaacgaccccuuccucggcguguacuaccacaagaacaacaagagcuggauggaguccgaguuccgggucuacagcuccgccaacaacugcacguucgaguacgugagccagcccuuccugauggaccuggagggcaagcaggggaacuucaagaaccuccgcgaguucguguucaagaacaucgacggcuacuucaagaucuacuccaagcacaccccgaucaaccugguccgggaccugccccagggguucagcgcccucgagccccugguggaccugcccaucggcaucaacaucacccgcuuccagacccuccuggcccugcaccgguccuaccucacgccgggggacagcagcuccggcuggaccgcgggcgccgccgccuacuacgugggguaccugcagccccgcaccuuccugcucaaguacaacgagaacggcaccaucacggacgcggucgacugcgcccuggacccccugagcgagaccaagugcacccucaaguccuucaccguggagaaggggaucuaccagacgagcaacuuccgggugcagcccaccgaguccaucguccgcuucccgaacaucaccaaccugugccccuucggcgagguguucaacgccacccgguucgccagcgucuacgccuggaaccgcaagcggaucuccaacugcguggcggacuacagcuuccuguacaacuccgccagcuucuccacguucaagugcuacggcgugagccccaccaagcucaacgaccugugcuucaccaacgucuacgccgacuccuucgugauccgcggggacgaggugcggcagaucgcccccggccagaccgggaagaucgccgacuacaacuacaagcugccggacgacuucacgggcugcgucaucgcguggaacagcaacaaccucgacuccaaggucgggggcaacuacaacuaccuguaccgccuguuccgcaagagcaaccucaagcccuucgagcgggacaucuccaccgagaucuaccaggccggcagcacccccugcaacgggguggagggcuucaacugcuacuucccccugcaguccuacggguuccagccgaccaacggcgugggguaccagcccuaccggguggugguccugagcuucgagcuccugcacgcccccgccacggugugcggccccaagaaguccaccaaccuggugaagaacaagugcgucaacuucaacuucaacggccucaccgggaccggcgugcugaccgagagcaacaagaaguuccugccguuccagcaguucgggcgcgacaucgccgacacgaccgacgcggugcgcgacccccagacccuggagauccucgacaucacccccugcagcuucggcggggucuccgugaucacgccgggcaccaacaccagcaaccagguggccguccuguaccaggacgugaacugcaccgaggugcccgucgccauccacgccgaccagcugacgcccaccuggcggguguacuccaccggcagcaacguguuccagacccgcgccgggugccucaucggcgcggagcacgucaacaacuccuacgagugcgacauccccaucggggccggcaucugcgccagcuaccagacgcagaccaacuccccgcggcgcgcccggagcguggcgucccagagcaucaucgccuacaccaugucccugggcgccgagaacagcguggccuacuccaacaacagcaucgccauccccaccaacuucacgaucuccgucaccaccgagauccugcccgugagcaugaccaagacgagcguggacugcaccauguacaucugcggggacuccaccgagugcagcaaccuccugcugcaguacggcuccuucugcacccagcucaaccgcgcgcugacggggaucgccgucgagcaggacaagaacacccaggagguguucgcccaggugaagcagaucuacaagacgcccccgaucaaggacuucggcggguucaacuucagccagauccugcccgaccccuccaagcccagcaagcgguccuucaucgaggaccuccuguucaacaaggucacccuggccgacgccggcuucaucaagcaguacggcgacugccucggggacaucgcggcccgcgaccugaucugcgcccagaaguucaacggccugaccgugcucccgccccugcugaccgacgagaugaucgcccaguacaccagcgcccuccuggcggggaccaucacguccggcuggaccuucggggccggcgccgcccugcagauccccuucgcgaugcagauggccuaccgguucaacggcaucggggugacccagaacguccucuacgagaaccagaagcugaucgccaaccaguucaacagcgccaucggcaagauccaggacucccugagcuccaccgccagcgcgcucgggaagcugcaggacguggugaaccagaacgcccaggcccugaacacgcucgucaagcagcuguccagcaacuucggcgccaucuccagcgugcugaacgacauccucucccgccuggacaagguggaggccgagguccagaucgaccggcugaucaccgggcgccuccagagccugcagaccuacgugacccagcagcugauccgggcggccgagauccgcgccagcgccaaccucgccgcgaccaagauguccgagugcgugcugggccagagcaagcgggucgacuucugcggcaagggguaccaccugauguccuucccccagagcgccccgcacggcgugguguuccuccacgucacguacgugcccgcccaggagaagaacuucaccaccgcccccgcgaucugccacgacgggaaggcccacuucccccgcgagggcgucuucguguccaacgggacccacugguucgugacgcagcggaacuucuacgagccgcagaucaucaccaccgacaacaccuucgucagcggcaacugcgacguggugaucggcaucgucaacaacacgguguacgacccccugcagcccgagcuggacuccuucaaggaggagcucgacaaguacuucaagaaccacaccagccccgacguggaccugggggacaucuccggcaucaacgccagcgucgugaacauccagaaggagaucgaccgccugaacgagguggccaagaaccucaacgagucccugaucgaccugcaggagcucgggaaguacgagcaguacaucaaguggccgugguacaucuggcugggcuucaucgccggccugaucgcgaucgucauggugaccaucaugcucugcugcaugaccagcugcugcuccugccugaaggggugcugcagcugcggcuccugcugcaaguucgacgaggacgacagcgagcccgugcugaagggggucaagcuccacuacacguga

SEQ ID NO: 11738 - RNA, 3822 nt, Artificial Sequence
  SARS-CoV-2/Australia/VIC01/2020__EPI_ISL_406844 spike protein CDS gc (1-1273)
auguucguguuccugguccuccugccccuggugagcucccagugcgugaaccucaccacccgcacgcagcugccgcccgccuacaccaacagcuucacccggggcgucuacuaccccgacaagguguuccgcuccagcgugcugcacuccacccaggaccucuuccugcccuucuucagcaacgucacgugguuccacgccauccacguguccgggaccaacggcaccaagcgguucgacaacccggugcugcccuucaacgacggggucuacuucgcgagcaccgagaaguccaacaucauccgcggcuggaucuucgggacgacccucgacagcaagacccagucccugcugaucgugaacaacgccaccaacguggucaucaaggugugcgaguuccaguucugcaacgaccccuuccucggcguguacuaccacaagaacaacaagagcuggauggaguccgaguuccgggucuacagcuccgccaacaacugcacguucgaguacgugagccagcccuuccugauggaccuggagggcaagcaggggaacuucaagaaccuccgcgaguucguguucaagaacaucgacggcuacuucaagaucuacuccaagcacaccccgaucaaccugguccgggaccugccccagggguucagcgcccucgagccccugguggaccugcccaucggcaucaacaucacccgcuuccagacccuccuggcccugcaccggcgcuaccucacgccgggggacuccagcagcggcuggaccgcgggcgccgccgccuacuacgugggguaccugcagccccggaccuuccugcucaaguacaacgagaacggcaccaucacggacgcggucgacugcgcccuggacccccuguccgagaccaagugcacccucaagagcuucaccguggagaaggggaucuaccagacguccaacuuccgcgugcagcccaccgagagcaucguccgguucccgaacaucaccaaccugugccccuucggcgagguguucaacgccacccgcuucgccuccgucuacgccuggaaccggaagcgcaucagcaacugcguggcggacuacuccgugcuguacaacagcgccuccuucagcacguucaagugcuacggcgucucccccaccaagcucaacgaccugugcuucaccaacguguacgccgacagcuucgugauccgcggggacgagguccggcagaucgcccccggccagaccgggaagaucgccgacuacaacuacaagcugccggacgacuucacgggcugcgugaucgcguggaacuccaacaaccucgacagcaaggucgggggcaacuacaacuaccuguaccggcuguuccgcaaguccaaccucaagcccuucgagcgggacaucagcaccgagaucuaccaggccggcuccacccccugcaacgggguggagggcuucaacugcuacuucccccugcagagcuacggguuccagccgaccaacggcgugggguaccagcccuaccgcguggucgugcuguccuucgagcuccugcacgcccccgccacggugugcggccccaagaaguccaccaaccuggucaagaacaagugcgugaacuucaacuucaacggccucaccgggaccggcgugcugaccgagagcaacaagaaguuccugccguuccagcaguucgggcgcgacaucgccgacacgaccgacgcgguccgggacccccagacccuggagauccucgacaucacccccugcagcuucggcggggugagcgugaucacgccgggcaccaacaccuccaaccaggucgccgugcuguaccaggacgugaacugcaccgagguccccguggccauccacgccgaccagcugacgcccaccuggcgcguguacagcaccggcuccaacgucuuccagacccgggccgggugccucaucggcgcggagcacgugaacaacagcuacgagugcgacauccccaucggggccggcaucugcgccuccuaccagacgcagaccaacagcccgcgccgggcccgcuccguggcgagccaguccaucaucgccuacaccaugagccugggcgccgagaacuccgucgccuacagcaacaacuccaucgccauccccaccaacuucacgaucagcgugaccaccgagauccugcccguguccaugaccaagacgagcgucgacugcaccauguacaucugcggggacagcaccgagugcuccaaccuccugcugcaguacggcagcuucugcacccagcucaaccgggcgcugacggggaucgccguggagcaggacaagaacacccaggagguguucgcccaggucaagcagaucuacaagacgcccccgaucaaggacuucggcggguucaacuucucccagauccugcccgaccccagcaagcccuccaagcgcagcuucaucgaggaccuccuguucaacaaggugacccuggccgacgccggcuucaucaagcaguacggcgacugccucggggacaucgcggcccgggaccugaucugcgcccagaaguucaacggccugaccgugcucccgccccugcugaccgacgagaugaucgcccaguacaccuccgcccuccuggcggggaccaucacgagcggcuggaccuucggggccggcgccgcccugcagauccccuucgcgaugcagauggccuaccgcuucaacggcaucggggucacccagaacgugcucuacgagaaccagaagcugaucgccaaccaguucaacuccgccaucggcaagauccaggacagccuguccagcaccgccuccgcgcucgggaagcugcaggacguggucaaccagaacgcccaggcccugaacacgcucgugaagcagcugagcuccaacuucggcgccaucagcuccgugcugaacgacauccucagccggcuggacaaggucgaggccgaggugcagaucgaccgccugaucaccgggcggcuccagucccugcagaccuacgugacccagcagcugauccgcgcggccgagauccgggccagcgccaaccucgccgcgaccaagaugagcgagugcguccugggccaguccaagcgcguggacuucugcggcaagggguaccaccugaugagcuucccccaguccgccccgcacggcguggucuuccuccacgugacguacguccccgcccaggagaagaacuucaccaccgcccccgcgaucugccacgacgggaaggcccacuucccccgggagggcguguucgugagcaacgggacccacugguucgucacgcagcgcaacuucuacgagccgcagaucaucaccaccgacaacaccuucguguccggcaacugcgacguggucaucggcaucgugaacaacacgguguacgacccccugcagcccgagcuggacagcuucaaggaggagcucgacaaguacuucaagaaccacaccucccccgacgucgaccugggggacaucagcggcaucaacgccuccguggugaacauccagaaggagaucgaccggcugaacgaggucgccaagaaccucaacgagagccugaucgaccugcaggagcucgggaaguacgagcaguacaucaaguggccgugguacaucuggcugggcuucaucgccggccugaucgcgaucgugauggugaccaucaugcucugcugcaugaccuccugcugcagcugccugaaggggugcugcuccugcggcagcugcugcaaguucgacgaggacgacuccgagcccguccugaagggggugaagcuccacuacacguga

SEQ ID NO: 11739 - RNA, 3822 nt, Artificial Sequence
  SARS-CoV-2/Germany/BavPat1/2020__EPI_ISL_406862 spike protein CDS gc (1-1273)
auguucguguuccugguccuccugccccuggugagcucccagugcgugaaccucaccacccgcacgcagcugccgcccgccuacaccaacagcuucacccggggcgucuacuaccccgacaagguguuccgcuccagcgugcugcacuccacccaggaccucuuccugcccuucuucagcaacgucacgugguuccacgccauccacguguccgggaccaacggcaccaagcgguucgacaacccggugcugcccuucaacgacggggucuacuucgcgagcaccgagaaguccaacaucauccgcggcuggaucuucgggacgacccucgacagcaagacccagucccugcugaucgugaacaacgccaccaacguggucaucaaggugugcgaguuccaguucugcaacgaccccuuccucggcguguacuaccacaagaacaacaagagcuggauggaguccgaguuccgggucuacagcuccgccaacaacugcacguucgaguacgugagccagcccuuccugauggaccuggagggcaagcaggggaacuucaagaaccuccgcgaguucguguucaagaacaucgacggcuacuucaagaucuacuccaagcacaccccgaucaaccugguccgggaccugccccagggguucagcgcccucgagccccugguggaccugcccaucggcaucaacaucacccgcuuccagacccuccuggcccugcaccgguccuaccucacgccgggggacagcagcuccggcuggaccgcgggcgccgccgccuacuacgugggguaccugcagccccgcaccuuccugcucaaguacaacgagaacggcaccaucacggacgcggucgacugcgcccuggacccccugagcgagaccaagugcacccucaaguccuucaccguggagaaggggaucuaccagacgagcaacuuccgggugcagcccaccgaguccaucguccgcuucccgaacaucaccaaccugugccccuucggcgagguguucaacgccacccgguucgccagcgucuacgccuggaaccgcaagcggaucuccaacugcguggcggacuacagcgugcuguacaacuccgccagcuucuccacguucaagugcuacggcgucagccccaccaagcucaacgaccugugcuucaccaacguguacgccgacuccuucgugauccgcggggacgagguccggcagaucgcccccggccagaccgggaagaucgccgacuacaacuacaagcugccggacgacuucacgggcugcgugaucgcguggaacagcaacaaccucgacuccaaggucgggggcaacuacaacuaccuguaccgccuguuccgcaagagcaaccucaagcccuucgagcgggacaucuccaccgagaucuaccaggccggcagcacccccugcaacgggguggagggcuucaacugcuacuucccccugcaguccuacggguuccagccgaccaacggcgugggguaccagcccuaccggguggucgugcugagcuucgagcuccugcacgcccccgccacggugugcggccccaagaaguccaccaaccuggucaagaacaagugcgugaacuucaacuucaacggccucaccgggaccggcgugcugaccgagagcaacaagaaguuccugccguuccagcaguucgggcgcgacaucgccgacacgaccgacgcgguccgcgacccccagacccuggagauccucgacaucacccccugcagcuucggcgggguguccgugaucacgccgggcaccaacaccagcaaccaggucgccgugcuguaccagggcgugaacugcaccgagguccccguggccauccacgccgaccagcugacgcccaccuggcggguguacuccaccgggagcaacgucuuccagacccgcgccggcugccucaucggggcggagcacgugaacaacuccuacgagugcgacauccccaucggcgccggcaucugcgccagcuaccagacgcagaccaacuccccgcggcgcgcccggagcguggcgucccagagcaucaucgccuacaccaugucccugggggccgagaacagcgucgccuacuccaacaacagcaucgccauccccaccaacuucacgaucuccgugaccaccgagauccugcccgugagcaugaccaagacgagcgucgacugcaccauguacaucugcggcgacuccaccgagugcagcaaccuccugcugcaguacggguccuucugcacccagcucaaccgcgcgcugacgggcaucgccguggagcaggacaagaacacccaggagguguucgcccaggucaagcagaucuacaagacgcccccgaucaaggacuucgggggcuucaacuucagccagauccugcccgaccccuccaagcccagcaagcgguccuucaucgaggaccuccuguucaacaaggugacccuggccgacgccggcuucaucaagcaguacggggacugccucggcgacaucgcggcccgcgaccugaucugcgcccagaaguucaacgggcugaccgugcucccgccccugcugaccgacgagaugaucgcccaguacaccagcgcccuccuggcgggcaccaucacguccggguggaccuucggcgccggcgccgcccugcagauccccuucgcgaugcagauggccuaccgguucaacgggaucggcgucacccagaacgugcucuacgagaaccagaagcugaucgccaaccaguucaacagcgccaucgggaagauccaggacucccugagcuccaccgccagcgcgcucggcaagcugcaggacguggucaaccagaacgcccaggcccugaacacgcucgugaagcagcuguccagcaacuucggggccaucuccagcgugcugaacgacauccucucccgccuggacaaggucgaggccgaggugcagaucgaccggcugaucaccggccgccuccagagccugcagaccuacgugacccagcagcugauccgggcggccgagauccgcgccagcgccaaccucgccgcgaccaagauguccgagugcguccugggccagagcaagcggguggacuucugcgggaagggcuaccaccugauguccuucccccagagcgccccgcacgggguggucuuccuccacgugacguacguccccgcccaggagaagaacuucaccaccgcccccgcgaucugccacgacggcaaggcccacuucccccgcgaggggguguucguguccaacggcacccacugguucgucacgcagcggaacuucuacgagccgcagaucaucaccaccgacaacaccuucgugagcggcaacugcgacguggucaucgggaucgugaacaacacgguguacgacccccugcagcccgagcuggacuccuucaaggaggagcucgacaaguacuucaagaaccacaccagccccgacgucgaccugggcgacaucuccgggaucaacgccagcguggugaacauccagaaggagaucgaccgccugaacgaggucgccaagaaccucaacgagucccugaucgaccugcaggagcucggcaaguacgagcaguacaucaaguggccgugguacaucuggcugggcuucaucgccgggcugaucgcgaucgugauggugaccaucaugcucugcugcaugaccagcugcugcuccugccugaagggcugcugcagcugcggguccugcugcaaguucgacgaggacgacagcgagcccguccugaagggcgugaagcuccacuacacguga

SEQ ID NO: 11740 - RNA, 3822 nt, Artificial Sequence
  SARS-CoV-2/Wuhan/HBCDC-HB-02/2020__EPI_ISL_412978 spike protein CDS gc (1-1273)
auguucguguuccugguccuccugccccuggugagcucccagugcgugaaccucaccacccgcacgcagcugccgcccgccuacaccaacagcuucacccggggcgucuacuaccccgacaagguguuccgcuccagcgugcugcacuccacccaggaccucuuccugcccuucuucagcaacgucacgugguuccacgccauccacguguccgggaccaacggcaccaagcgguucgacaacccggugcugcccuucaacgacggggucuacuucgcgagcaccgagaaguccaacaucauccgcggcuggaucuucgggacgacccucgacagcaagacccagucccugcugaucgugaacaacgccaccaacguggucaucaaggugugcgaguuccaguucugcaacgaccccuuccucggcguguacuaccacaagaacaacaagagcuggauggaguccgaguuccgggucuacagcuccgccaacaacugcacguucgaguacgugagccagcccuuccugauggaccuggagggcaagcaggggaacuucaagaaccuccgcgaguucguguucaagaacaucgacggcuacuucaagaucuacuccaagcacaccccgaucaaccugguccgggaccugccccagggguucagcgcccucgagccccugguggaccugcccaucggcaucaacaucacccgcuuccagacccuccuggcccugcaccgguccuaccucacgccgggggacagcagcuccggcuggaccgcgggcgccgccgccuacuacgugggguaccugcagccccgcaccuuccugcucaaguacaacgagaacggcaccaucacggacgcggucgacugcgcccuggacccccugagcgagaccaagugcacccucaaguccuucaccguggagaaggggaucuaccagacgagcaacuuccgggugcagcccaccgaguccaucguccgcuucccgaacaucaccaaccugugccccuucggcgagguguucaacgccacccgguucgccagcgucuacgccuggaaccgcaagcggaucuccaacugcguggcggacuacagcgugcuguacaacuccgccagcuucuccacguucaagugcuacggcgucagccccaccaagcucaacgaccugugcuucaccaacguguacgccgacuccuucgugauccgcggggacgagguccggcagaucgcccccggccagaccgggaagaucgccgacuacaacuacaagcugccggacgacuucacgggcugcgugaucgcguggaacagcaacaaccucgacuccaaggucgggggcaacuacaacuaccuguaccgccuguuccgcaagagcaaccucaagcccuucgagcgggacaucuccaccgagaucuaccaggccggcagcacccccugcaacgggguggagggcuucaacugcuacuucccccugcaguccuacggguuccagccgaccaacggcgugggguaccagcccuaccggguggucgugcugagcuucgagcuccugcacgcccccgccacggugugcggccccaagaaguccaccaaccuggucaagaacaagugcgugaacuucaacuucaacggccucaccgggaccggcgugcugaccgagagcaacaagaaguuccugccguuccagcaguucgggcgcgacaucgccgacacgaccgacgcgguccgcgacccccagacccuggagauccucgacaucacccccugcagcuucggcgggguguccgugaucacgccgggcaccaacaccagcaaccaggucgccgugcuguaccaggacgugaacugcaccgagguccccguggccauccacgccgaccagcugacgcccaccuggcggguguacuccaccggcagcaacgucuuccagacccgcgccgggugccucaucggcgcggagcacgugaacaacuccuacgagugcgacauccccaucggggccggcaucugcgccagcuaccagacgcagaccaacuccccgcggcgcgcccggagcguggcgucccagagcaucaucgccuacaccaugucccugggcgccgagaacagcgucgccuacuccaacaacagcaucgccauccccaccaacuucacgaucuccgugaccaccgagauccugcccgugagcaugaccaagacgagcgucgacugcaccauguacaucugcggggacuccaccgagugcagcaacuuccuccugcaguacggcuccuucugcacccagcugaaccgcgcgcucacggggaucgccguggagcaggacaagaacacccaggagguguucgcccaggucaagcagaucuacaagacgcccccgaucaaggacuucggcggguucaacuucagccagauccugcccgaccccuccaagcccagcaagcgguccuucaucgaggaccuccuguucaacaaggugacccuggccgacgccggcuucaucaagcaguacggcgacugccugggggacaucgcggcccgcgaccucaucugcgcccagaaguucaacggccugaccgugcugccgccccuccugaccgacgagaugaucgcccaguacaccagcgcccugcucgcggggaccaucacguccggcuggaccuucggggccggcgccgcccugcagauccccuucgcgaugcagauggccuaccgguucaacggcaucggggucacccagaacgugcuguacgagaaccagaagcucaucgccaaccaguucaacagcgccaucggcaagauccaggacucccugagcuccaccgccagcgcgcuggggaagcuccaggacguggucaaccagaacgcccaggcccugaacacgcuggugaagcagcucuccagcaacuucggcgccaucuccagcgugcugaacgacauccugucccgccucgacaaggucgaggccgaggugcagaucgaccggcugaucaccgggcgccugcagagccuccagaccuacgugacccagcagcugauccgggcggccgagauccgcgccagcgccaaccuggccgcgaccaagauguccgagugcguccucggccagagcaagcggguggacuucugcggcaagggguaccaccugauguccuucccccagagcgccccgcacggcguggucuuccugcacgugacguacguccccgcccaggagaagaacuucaccaccgcccccgcgaucugccacgacgggaaggcccacuucccccgcgagggcguguucguguccaacgggacccacugguucgucacgcagcggaacuucuacgagccgcagaucaucaccaccgacaacaccuucgugagcggcaacugcgacguggucaucggcaucgugaacaacacgguguacgacccccuccagcccgagcuggacuccuucaaggaggagcuggacaaguacuucaagaaccacaccagccccgacgucgaccucggggacaucuccggcaucaacgccagcguggugaacauccagaaggagaucgaccgccugaacgaggucgccaagaaccugaacgagucccucaucgaccugcaggagcuggggaaguacgagcaguacaucaaguggccgugguacaucuggcucggcuucaucgccggccugaucgcgaucgugauggugaccaucaugcugugcugcaugaccagcugcugcuccugccucaaggggugcugcagcugcggcuccugcugcaaguucgacgaggacgacagcgagcccguccugaagggggugaagcugcacuacacguga

SEQ ID NO: 11741 - RNA, 3822 nt, Artificial Sequence
  SARS-CoV-2/Australia/QLD02/2020__EPI_ISL_407896 spike protein CDS gc (1-1273)
auguucguguuccugguccuccugccccuggugagcucccagugcgugaaccucaccacccgcacgcagcugccgcccgccuacaccaacagcuucacccggggcgucuacuaccccgacaagguguuccgcuccagcgugcugcacuccacccaggaccucuuccugcccuucuucagcaacgucacgugguuccacgccauccacguguccgggaccaacggcaccaagcgguucgacaacccggugcugcccuucaacgacggggucuacuucgcgagcaccgagaaguccaacaucauccgcggcuggaucuucgggacgacccucgacagcaagacccagucccugcugaucgugaacaacgccaccaacguggucaucaaggugugcgaguuccaguucugcaacgaccccuuccucggcguguacuaccacaagaacaacaagagcuggauggaguccgaguuccgggucuacagcuccgccaacaacugcacguucgaguacgugagccagcccuuccugauggaccuggagggcaagcaggggaacuucaagaaccuccgcgaguucguguucaagaacaucgacggcuacuucaagaucuacuccaagcacaccccgaucaaccugguccgggaccugccccagggguucagcgcccucgagccccugguggaccugcccaucggcaucaacaucacccgcuuccagacccuccuggcccugcaccgguccuaccucacgccgggggacagcagcuccggcuggaccgcgggcgccgccgccuacuacgugggguaccugcagccccgcaccuuccugcucaaguacaacgagaacggcaccaucacggacgcggucgacugcgcccuggacccccugagcgagaccaagugcacccucaaguccuucaccguggagaaggggaucuaccagacgagcaacuuccgggugcagcccaccgaguccaucguccgcuucccgaacaucaccaaccugugccccuucggcgagguguucaacgccacccgguucgccagcgucuacgccuggaaccgcaagcggaucuccaacugcguggcggacuacagcgugcuguacaacuccgccagcuucuccacguucaagugcuacggcgucagccccaccaagcucaacgaccugugcuucaccaacguguacgccgacuccuucgugauccgcggggacgagguccggcagaucgcccccggccagaccgggaagaucgccgacuacaacuacaagcugccggacgacuucacgggcugcgugaucgcguggaacagcaacaaccucgacuccaaggucgggggcaacuacaacuaccuguaccgccuguuccgcaagagcaaccucaagcccuucgagcgggacaucuccaccgagaucuaccaggccggcagcacccccugcaacgggguggagggcuucaacugcuacuucccccugcaguccuacggguuccagccgaccaacggcgugggguaccagcccuaccggguggucgugcugagcuucgagcuccugcacgcccccgccacggugugcggccccaagaaguccaccaaccuggucaagaacaagugcgugaacuucaacuucaacggccucaccgggaccggcgugcugaccgagagcaacaagaaguuccugccguuccagcaguucgggcgcgacaucgccgacacgaccgacgcgguccgcgacccccagacccuggagauccucgacaucacccccugcagcuucggcgggguguccgugaucacgccgggcaccaacaccagcaaccaggucgccgugcuguaccaggacgugaacugcaccgagguccccguggccauccacgccgaccagcugacgcccaccuggcggguguacuccaccggcagcaacgucuuccagacccgcgccgggugccucaucggcgcggagcacgugaacaacuccuacgagugcgacauccccaucggggccggcaucugcgccagcuaccagacgcagaccaacuccccgcggcgcgcccggagcguggcgucccagagcaucaucgccuacaccaugucccugggcgccgagaacagcgucgccuacuccaacaacagcaucgccauccccaccaacuucacgaucuccgugaccaccgagauccugcccgugagcaugaccaagacgagcgucgacugcaccauguacaucugcggggacuccaccgagugcagcaaccuccugcugcaguacggcuccuucugcacccagcucaaccgcgcgcugacggggaucgccguggagcaggacaagaacacccaggagguguucgcccaggucaagcagaucuacaagacgcccccgaucaaggacuucggcggguucaacuucagccagauccugcccgaccccuccaagcccagcaagcgguccuucaucgaggaccuccuguucaacaaggugacccuggccgacgccggcuucaucaagcaguacggcgacugccucggggacaucgcggcccgcgaccugaucugcgcccagaaguucaacggccugaccgugcucccgccccugcugaccgacgagaugaucgcccaguacaccagcgcccuccuggcggggaccaucacguccggcuggaccuucggggccggcgccgcccugcagauccccuucgcgaugcagauggccuaccgguucaacggcaucggggucacccagaacgugcucuacgagaaccagaagcugaucgccaaccaguucaacagcgccaucggcaagauccaggacucccugagcuccaccgccagcgcgcucgggaagcugcaggacguggucaaccagaacgcccaggcccugaacacgcucgugaagcagcuguccagcaacuucggcgccaucuccagcgugcugaacgacauccucucccgccuggacaaggucgaggccgaggugcagaucgaccggcugaucaccgggcgccuccagagccugcagaccuacgugacccagcagcugauccgggcggccgagauccgcgccagcgccaaccucgccgcgaccaagauguccgagugcguccugggccagagcaagcggguggacuucugcggcaagggguaccaccugauguccuucccccagagcgccccgcacggcguggucuuccuccacgugacguacguccccgcccaggagaagaacuucaccaccgcccccgcgaucugccacgacgggaaggcccacuucccccgcgagggcguguucguguccaacgggacccacugguucgucacgcagcggaacuucuacgagccgcagaucaucaccaccgacaacaccuucgugagcggcaacugcgacguggucaucggcaucgugaacaacacgguguacgacccccugcagcuggagcucgacuccuucaaggaggagcuggacaaguacuucaagaaccacaccagccccgacgucgaccugggggacaucuccggcaucaacgccagcguggugaacauccagaaggagaucgaccgccucaacgaggucgccaagaaccugaacgagucccugaucgaccuccaggagcuggggaaguacgagcaguacaucaaguggcccugguacaucuggcugggcuucaucgccggccucaucgcgaucgugauggugaccaucaugcugugcugcaugaccagcugcugcuccugccugaaggggugcugcagcugcggcuccugcugcaaguucgacgaggacgacagcgagccgguccucaagggggugaagcugcacuacacguga

SEQ ID NO: 11742 - RNA, 3822 nt, Artificial Sequence
  SARS-CoV-2/India/1-31/2020__EPI_ISL_413523 spike protein CDS gc (1-1273)
auguucguguuccugguccuccugccccuggugagcucccagugcgugaaccucaccacccgcacgcagcugccgcccgccuacaccaacagcuucacccggggcgucuacuaccccgacaagguguuccgcuccagcgugcugcacuccacccaggaccucuuccugcccuucuucagcaacgucacgugguuccacgccauccacguguccgggaccaacggcaccaagcgguucgacaacccggugcugcccuucaacgacggggucuacuucgcgagcaccgagaaguccaacaucauccgcggcuggaucuucgggacgacccucgacagcaagacccagucccugcugaucgugaacaacgccaccaacguggucaucaaggugugcgaguuccaguucugcaacgaccccuuccucggcguguacuaccacaagaacaacaagagcuggauggaguccgaguuccgggucuacagcuccgccaacaacugcacguucgaguacgugagccagcccuuccugauggaccuggagggcaagcaggggaacuucaagaaccuccgcgaguucguguucaagaacaucgacggcuacuucaagaucuacuccaagcacaccccgaucaaccugguccgggaccugccccagggguucagcgcccucgagccccugguggaccugcccaucggcaucaacaucacccgcuuccagacccuccuggcccugcaccgguccuaccucacgccgggggacagcagcuccggcuggaccgcgggcgccgccgccuacuacgugggguaccugcagccccgcaccuuccugcucaaguacaacgagaacggcaccaucacggacgcggucgacugcgcccuggacccccugagcgagaccaagugcacccucaaguccuucaccguggagaaggggaucuaccagacgagcaacuuccgggugcagcccaccgaguccaucguccgcuucccgaacaucaccaaccugugccccuucggcgagguguucaacgccacccgguucgccagcgucuacgccuggaaccgcaagcggaucuccaacugcguggcggacuacagcgugcuguacaacuccgccagcuucuccacguucaagugcuacggcgucagccccaccaagcucaacgaccugugcuucaccaacguguacgccgacuccuucgugauccgcggggacgagguccggcagaucgcccccggccagaccgggaagaucgccgacuacaacuacaagcugccggacgacuucacgggcugcgugaucgcguggaacagcaacaaccucgacuccaaggucgggggcaacuacaacuaccuguaccgccuguuccgcaagagcaaccucaagcccuucgagcgggacaucuccaccgagaucuaccaggccggcagcacccccugcaacgggguggagggcuucaacugcuacuucccccugcaguccuacggguuccagccgaccaacggcgugggguaccagcccuaccggguggucgugcugagcuucgagcuccugcacgcccccgccacggugugcggccccaagaaguccaccaaccuggucaagaacaagugcgugaacuucaacuucaacggccucaccgggaccggcgugcugaccgagagcaacaagaaguuccugccguuccagcaguucgggcgcgacaucgccgacacgaccgacgcgguccgcgacccccagacccuggagauccucgacaucacccccugcagcuucggcgggguguccgugaucacgccgggcaccaacaccagcaaccaggucgccgugcuguaccaggacgugaacugcaccgagguccccguggccauccacgccgaccagcugacgcccaccuggcggguguacuccaccggcagcaacgucuuccagacccgcgccgggugccucaucggcgcggagcacgugaacaacuccuacgagugcgacauccccaucggggccggcaucugcgccagcuaccagacgcagaccaacuccccgcggcgcgcccggagcguggcgucccagagcaucaucgccuacaccaugucccugggcgccgagaacagcgucgccuacuccaacaacagcaucgccauccccaccaacuucacgaucuccgugaccaccgagauccugcccgugagcaugaccaagacgagcgucgacugcaccauguacaucugcggggacuccaccgagugcagcaaccuccugcugcaguacggcuccuucugcacccagcucaaccgcgcgcugacggggaucgccguggagcaggacaagaacacccaggagguguucgcccaggucaagcagaucuacaagacgcccccgaucaaggacuucggcggguucaacuucagccagauccugcccgaccccuccaagcccagcaagcgguccuucaucgaggaccuccuguucaacaaggugacccuggccgacgccggcuucaucaagcaguacggcgacugccucggggacaucgcggcccgcgaccugaucugcgcccagaaguucaacggccugaccgugcucccgccccugcugaccgacgagaugaucgcccaguacaccagcgcccuccuggcggggaccaucacguccggcuggaccuucggggccggcgccgcccugcagauccccuucgcgaugcagauggccuaccgguucaacggcaucggggucacccagaacgugcucuacgagaaccagaagcugaucgccaaccaguucaacagcgugaucggcaagauccaggacucccugagcuccaccgccagcgcccucgggaagcugcaggacgucgugaaccagaacgcgcaggcccugaacacgcucgugaagcagcuguccagcaacuucggcgccaucuccagcguccugaacgacauccucucccgccuggacaagguggaggccgaggugcagaucgaccggcugaucaccgggcgccuccagagccugcagaccuacgucacccagcagcugauccgggccgcggagauccgcgccagcgccaaccucgccgccaccaagauguccgagugcgugcugggccagagcaagcggguggacuucugcggcaagggguaccaccugauguccuucccccagagcgcgccgcacggcgucguguuccuccacgucacguacgugcccgcccaggagaagaacuucaccaccgcccccgccaucugccacgacgggaaggcgcacuucccccgcgagggcguguucgucuccaacgggacccacugguucgugacgcagcggaacuucuacgagccgcagaucaucaccaccgacaacaccuucgugagcggcaacugcgacgucgugaucggcaucgugaacaacacggucuacgacccccugcagcccgagcuggacuccuucaaggaggagcucgacaaguacuucaagaaccacaccagccccgacguggaccugggggacaucuccggcaucaacgccagcguggucaacauccagaaggagaucgaccgccugaacgagguggccaagaaccucaacgagucccugaucgaccugcaggagcucgggaaguacgagcaguacaucaaguggccgugguacaucuggcugggcuucaucgccggccugaucgccaucgugauggucaccaucaugcucugcugcaugaccagcugcugcuccugccugaaggggugcugcagcugcggcuccugcugcaaguucgacgaggacgacagcgagcccgugcugaagggggugaagcuccacuacacguga

SEQ ID NO: 11743 - RNA, 3822 nt, Artificial Sequence
  SARS-CoV-2/Guangdong/GD2020087-P0008/2020__EPI_ISL_413863 spike protein CDS gc (1-1273)
auguucguguuccugguccuccugccccuggugagcucccagugcgugaaccucaccacccgcacgcagcugccgcccgccuacaccaacagcuucacccggggcgucuacuaccccgacaagguguuccgcuccagcgugcugcacuccacccaggaccucuuccugcccuucuucagcaacgucacgugguuccacgccauccacguguccgggaccaacggcaccaagcgguucgacaacccggugcugcccuucaacgacggggucuacuucgcgagcaccgagaaguccaacaucauccgcggcuggaucuucgggacgacccucgacagcaagacccagucccugcugaucgugaacaacgccaccaacguggucaucaaggugugcgaguuccaguucugcaacgaccccuuccucggcguguacuaccacaagaacaacaagagcuggauggaguccgaguuccgggucuacagcuccgccaacaacugcacguucgaguacgugagccagcccuuccugauggaccuggagggcaagcaggggaacuucaagaaccuccgcgaguucguguucaagaacaucgacggcuacuucaagaucuacuccaagcacaccccgaucaaccugguccgggaccugccccagggguucagcgcccucgagccccugguggaccugcccaucggcaucaacaucacccgcuuccagacccuccuggcccugcaccgguccuaccucacgccgggggacagcagcuccggcuggaccgcgggcgccgccgccuacuacgugggguaccugcagccccgcaccuuccugcucaaguacaacgagaacggcaccaucacggacgcggucgacugcgcccuggacccccugagcgagaccaagugcacccucaaguccuucaccguggagaaggggaucuaccagacgagcaacuuccgggugcagcccaccgaguccaucguccgcuucccgaacaucaccaaccugugccccuucggcgagguguucaacgccacccgguucgccagcgucuacgccuggaaccgcaagcggaucuccaacugcguggcggacuacagcgugcuguacaacuccgccagcuucuccacguucaagugcuacggcgucagccccaccaagcucaacgaccugugcuucaccaacguguacgccgacuccuucgugauccgcggggacgagguccgggagaucgcccccggccagaccgggaagaucgccgacuacaacuacaagcugccggacgacuucacgggcugcgugaucgcguggaacagcaacaaccucgacuccaaggucgggggcaacuacaacuaccuguaccgccuguuccgcaagagcaaccucaagcccuucgagcgggacaucuccaccgagaucuaccaggccggcagcacccccugcaacgggguggagggcuucaacugcuacuucccccugcaguccuacggguuccagccgaccaacggcgugggguaccagcccuaccggguggucgugcugagcuucgagcuccugcacgcccccgccacggugugcggccccaagaaguccaccaaccuggucaagaacaagugcgugaacuucaacuucaacggccucaccgggaccggcgugcugaccgagagcaacaagaaguuccugccguuccagcaguucgggcgcgacaucgccgacacgaccgacgcgguccgcgacccccagacccuggagauccucgacaucacccccugcagcuucggcgggguguccgugaucacgccgggcaccaacaccagcaaccaggucgccgugcuguaccaggacgugaacugcaccgagguccccguggccauccacgccgaccagcugacgcccaccuggcggguguacuccaccggcagcaacgucuuccagacccgcgccgggugccucaucggcgcggagcacgugaacaacuccuacgagugcgacauccccaucggggccggcaucugcgccagcuaccagacgcagaccaacuccccgcggcgcgcccggagcguggcgucccagagcaucaucgccuacaccaugucccugggcgccgagaacagcgucgccuacuccaacaacagcaucgccauccccaccaacuucacgaucuccgugaccaccgagauccugcccgugagcaugaccaagacgagcgucgacugcaccauguacaucugcggggacuccaccgagugcagcaaccuccugcugcaguacggcuccuucugcacccagcucaaccgcgcgcugacggggaucgccguggagcaggacaagaacacccaggagguguucgcccaggucaagcagaucuacaagacgcccccgaucaaggacuucggcggguucaacuucagccagauccugcccgaccccuccaagcccagcaagcgguccuucaucgaggaccuccuguucaacaaggugacccuggccgacgccggcuucaucaagcaguacggcgacugccucggggacaucgcggcccgcgaccugaucugcgcccagaaguucaacggccugaccgugcucccgccccugcugaccgacgagaugaucgcccaguacaccagcgcccuccuggcggggaccaucacguccggcuggaccuucggggccggcgccgcccugcagauccccuucgcgaugcagauggccuaccgguucaacggcaucggggucacccagaacgugcucuacgagaaccagaagcugaucgccaaccaguucaacagcgccaucggcaagauccaggacucccugagcuccaccgccagcgcgcucgggaagcugcaggacguggucaaccagaacgcccaggcccugaacacgcucgugaagcagcuguccagcaacuucggcgccaucuccagcgugcugaacgacauccucucccgccuggacaaggucgaggccgaggugcagaucgaccggcugaucaccgggcgccuccagagccugcagaccuacgugacccagcagcugauccgggcggccgagauccgcgccagcgccaaccucgccgcgaccaagauguccgagugcguccugggccagagcaagcggguggacuucugcggcaagggguaccaccugauguccuucccccagagcgccccgcacggcguggucuuccuccacgugacguacguccccgcccaggagaagaacuucaccaccgcccccgcgaucugccacgacgggaaggcccacuucccccgcgagggcguguucguguccaacgggacccacugguucgucacgcagcggaacuucuacgagccgcagaucaucaccaccgacaacaccuucgugagcggcaacugcgacguggucaucggcaucgugaacaacacgguguacgacccccugcagcccgagcuggacuccuucaaggaggagcucgacaaguacuucaagaaccacaccagccccgacgucgaccugggggacaucuccggcaucaacgccagcguggugaacauccagaaggagaucgaccgccugaacgaggucgccaagaaccucaacgagucccugaucgaccugcaggagcucgggaaguacgagcaguacaucaaguggccgugguacaucuggcugggcuucaucgccggccugaucgcgaucgugauggugaccaucaugcucugcugcaugaccagcugcugcuccugccugaaggggugcugcagcugcggcuccugcugcaaguucgacgaggacgacagcgagcccguccugaagggggugaagcuccacuacacguga

SEQ ID NO: 11744 - RNA, 3822 nt, Artificial Sequence
  SARS-CoV-2/Sweden/01/2020__EPI_ISL_411951 spike protein CDS gc (1-1273)
auguucguguuccugguccuccugccccuggugagcucccagugcgugaaccucaccacccgcacgcagcugccgcccgccuacaccaacagcuucacccggggcgucuacuaccccgacaagguguuccgcuccagcgugcugcacuccacccaggaccucuuccugcccuucuucagcaacgucacgugguuccacgccauccacguguccgggaccaacggcaccaagcgguucgacaacccggugcugcccuucaacgacggggucuacuucgcgagcaccgagaaguccaacaucauccgcggcuggaucuucgggacgacccucgacagcaagacccagucccugcugaucgugaacaacgccaccaacguggucaucaaggugugcgaguuccaguucugcaacgaccccuuccucggcguguacuaccacaagaacaacaagagcuggauggaguccgaguuccgggucuacagcuccgccaacaacugcacguucgaguacgugagccagcccuuccugauggaccuggagggcaagcaggggaacuucaagaaccuccgcgaguucguguucaagaacaucgacggcuacuucaagaucuacuccaagcacaccccgaucaaccugguccgggaccugccccagggguucagcgcccucgagccccugguggaccugcccaucggcaucaacaucacccgcuuccagacccuccuggcccugcaccgguccuaccucacgccgggggacagcagcuccggcuggaccgcgggcgccgccgccuacuacgugggguaccugcagccccgcaccuuccugcucaaguacaacgagaacggcaccaucacggacgcggucgacugcgcccuggacccccugagcgagaccaagugcacccucaaguccuucaccguggagaaggggaucuaccagacgagcaacuuccgggugcagcccaccgaguccaucguccgcuucccgaacaucaccaaccugugccccuucggcgagguguucaacgccacccgguucgccagcgucuacgccuggaaccgcaagcggaucuccaacugcguggcggacuacagcgugcuguacaacuccgccagcuucuccacguucaagugcuacggcgucagccccaccaagcucaacgaccugugcuucaccaacguguacgccgacuccuucgugauccgcggggacgagguccggcagaucgcccccggccagaccgggaagaucgccgacuacaacuacaagcugccggacgacuucacgggcugcgugaucgcguggaacagcaacaaccucgacuccaaggucgggggcaacuacaacuaccuguaccgccuguuccgcaagagcaaccucaagcccuucgagcgggacaucuccaccgagaucuaccaggccggcagcacccccugcaacgggguggagggcuucaacugcuacuucccccugcaguccuacggguuccagccgaccaacggcgugggguaccagcccuaccggguggucgugcugagcuucgagcuccugcacgcccccgccacggugugcggccccaagaaguccaccaaccuggucaagaacaagugcgugaacuucaacuucaacggccucaccgggaccggcgugcugaccgagagcaacaagaaguuccugccguuccagcaguucgggcgcgacaucgccgacacgaccgacgcgguccgcgacccccagacccuggagauccucgacaucacccccugcagcuucggcgggguguccgugaucacgccgggcaccaacaccagcaaccaggucgccgugcuguaccaggacgugaacugcaccgagguccccguggccauccacgccgaccagcugacgcccaccuggcggguguacuccaccggcagcaacgucuuccagacccgcgccgggugccucaucggcgcggagcacgugaacaacuccuacgagugcgacauccccaucggggccggcaucugcgccagcuaccagacgcagaccaacuccccgcggcgcgcccggagcguggcgucccagagcaucaucgccuacaccaugucccugggcgccgagaacagcgucgccuacuccaacaacagcaucgccauccccaccaacuucacgaucuccgugaccaccgagauccugcccgugagcaugaccaagacgagcgucgacugcaccauguacaucugcggggacuccaccgagugcagcaaccuccugcugcaguacggcuccuucugcacccagcucaaccgcgcgcugacggggaucgccguggagcaggacaagaacacccaggagguguucgcccaggucaagcagaucuacaagacgcccccgaucaaggacugcggcggguucaacuucagccagauccugcccgaccccuccaagcccagcaagcgguccuucaucgaggaccuccuguucaacaaggugacccuggccgacgccggcuucaucaagcaguacggcgacugccucggggacaucgcggcccgcgaccugaucugcgcccagaaguucaacggccugaccgugcucccgccccugcugaccgacgagaugaucgcccaguacaccagcgcccuccuggcggggaccaucacguccggcuggaccuucggggccggcgccgcccugcagauccccuucgcgaugcagauggccuaccgguucaacggcaucggggucacccagaacgugcucuacgagaaccagaagcugaucgccaaccaguucaacagcgccaucggcaagauccaggacucccugagcuccaccgccagcgcgcucgggaagcugcaggacguggucaaccagaacgcccaggcccugaacacgcucgugaagcagcuguccagcaacuucggcgccaucuccagcgugcugaacgacauccucucccgccuggacaaggucgaggccgaggugcagaucgaccggcugaucaccgggcgccuccagagccugcagaccuacgugacccagcagcugauccgggcggccgagauccgcgccagcgccaaccucgccgcgaccaagauguccgagugcguccugggccagagcaagcggguggacuucugcggcaagggguaccaccugauguccuucccccagagcgccccgcacggcguggucuuccuccacgugacguacguccccgcccaggagaagaacuucaccaccgcccccgcgaucugccacgacgggaaggcccacuucccccgcgagggcguguucguguccaacgggacccacugguucgucacgcagcggaacuucuacgagccgcagaucaucaccaccgacaacaccuucgugagcggcaacugcgacguggucaucggcaucgugaacaacacgguguacgacccccugcagcccgagcuggacuccuucaaggaggagcucgacaaguacuucaagaaccacaccagccccgacgucgaccugggggacaucuccggcaucaacgccagcguggugaacauccagaaggagaucgaccgccugaacgaggucgccaagaaccucaacgagucccugaucgaccugcaggagcucgggaaguacgagcaguacaucaaguggccgugguacaucuggcugggcuucaucgccggccugaucgcgaucgugauggugaccaucaugcucugcugcaugaccagcugcugcuccugccugaaggggugcugcagcugcggcuccugcugcaaguucgacgaggacgacagcgagcccguccugaagggggugaagcuccacuacacguga

SEQ ID NO: 11745 - RNA, 3822 nt, Artificial Sequence
  SARS-CoV-2/Tianmen/HBCDC-HB-07/2020__EPI_ISL_412983 spike protein CDS gc (1-1273)
auguucguguuccugguccuccugccccuggugagcucccagugcgugaaccucaccacccgcacgcagcugccgcccgccuacaccaacagcuucacccggggcgucuacuaccccgacaagguguuccgcuccagcgugcugcacuccacccaggaccucuuccugcccuucuucagcaacgucacgugguuccacgccauccacguguccgggaccaacggcaccaagcgguucgacaacccggugcugcccuucaacgacggggucuacuucgcgagcaccgagaaguccaacaucauccgcggcuggaucuucgggacgacccucgacagcaagacccagucccugcugaucgugaacaacgccaccaacguggucaucaaggugugcgaguuccaguucugcaacgaccccuuccucggcguguacuaccacaagaacaacaagagcuggauggaguccgaguuccgggucuacagcuccgccaacaacugcacguucgaguacgugagccagcccuuccugauggaccuggagggcaagcaggggaacuucaagaaccuccgcgaguucguguucaagaacaucgacggcuacuucaagaucuacuccaagcacaccccgaucaaccugguccgggaccugccccagggguucagcgcccucgagccccugguggaccugcccaucggcaucaacaucacccgcuuccagacccuccuggcccugcaccgguccuaccucacgccgggggacagcagcuccggcuggaccgcgggcgccgccgccuacuacgugggguaccugcagccccgcaccuuccugcucaaguacaacgagaacggcaccaucacggacgcggucgacugcgcccuggacccccugagcgagaccaagugcacccucaaguccuucaccguggagaaggggaucuaccagacgagcaacuuccgggugcagcccaccgaguccaucguccgcuucccgaacaucaccaaccugugccccuucggcgagguguucaacgccacccgguucgccagcgucuacgccuggaaccgcaagcggaucuccaacugcguggcggacuacagcgugcuguacaacuccgccagcuucuccacguucaagugcuacggcgucagccccaccaagcucaacgaccugugcuucaccaacguguacgccgacuccuucgugauccgcggggacgagguccggcagaucgcccccggccagaccgggaagaucgccgacuacaacuacaagcugccggacgacuucacgggcugcgugaucgcguggaacagcaacaaccucgacuccaaggucgggggcaacuacaacuaccuguaccgccuguuccgcaagagcaaccucaagcccuucgagcgggacaucuccaccgagaucuaccaggccggcagcacccccugcaacgggguggagggcuucaacugcuacuucccccugcaguccuacggguuccagccgaccaacggcgugggguaccagcccuaccggguggucgugcugagcuucgagcuccugcacgcccccgccacggugugcggccccaagaaguccaccaaccuggucaagaacaagugcgugaacuucaacuucaacggccucaccgggaccggcgugcugaccgagagcaacaagaaguuccugccguuccagcaguucgggcgcgacaucgccgacacgaccgacgcgguccgcgacccccagacccuggagauccucgacaucacccccugcagcuucggcgggguguccgugaucacgccgggcaccaacaccagcaaccaggucgccgugcuguaccaggaccugaacugcaccgaggugcccgucgccauccacgccgaccagcucacgcccaccuggcggguguacuccaccggcagcaacguguuccagacccgcgccgggugccugaucggcgcggagcacgucaacaacuccuacgagugcgacauccccaucggggccggcaucugcgccagcuaccagacgcagaccaacuccccgcggcgcgcccggagcguggcgucccagagcaucaucgccuacaccaugucccugggcgccgagaacagcguggccuacuccaacaacagcaucgccauccccaccaacuucacgaucuccgucaccaccgagauccuccccgugagcaugaccaagacgagcguggacugcaccauguacaucugcggggacuccaccgagugcagcaaccugcugcuccaguacggcuccuucugcacccagcugaaccgcgcgcugacggggaucgccgucgagcaggacaagaacacccaggagguguucgcccaggugaagcagaucuacaagacgcccccgaucaaggacuucggcggguucaacuucagccagauccuccccgaccccuccaagcccagcaagcgguccuucaucgaggaccugcuguucaacaaggucacccucgccgacgccggcuucaucaagcaguacggcgacugccugggggacaucgcggcccgcgaccugaucugcgcccagaaguucaacggccucaccgugcugccgccccugcucaccgacgagaugaucgcccaguacaccagcgcccugcuggcggggaccaucacguccggcuggaccuucggggccggcgccgcccuccagauccccuucgcgaugcagauggccuaccgguucaacggcaucggggugacccagaacguccuguacgagaaccagaagcugaucgccaaccaguucaacagcgccaucggcaagauccaggacucccucagcuccaccgccagcgcgcuggggaagcugcaggacguggugaaccagaacgcccaggcccucaacacgcuggucaagcagcuguccagcaacuucggcgccaucuccagcgugcucaacgacauccugucccgccuggacaagguggaggccgagguccagaucgaccggcucaucaccgggcgccugcagagccugcagaccuacgugacccagcagcucauccgggcggccgagauccgcgccagcgccaaccuggccgcgaccaagauguccgagugcgugcugggccagagcaagcgggucgacuucugcggcaagggguaccaccucauguccuucccccagagcgccccgcacggcgugguguuccugcacgucacguacgugcccgcccaggagaagaacuucaccaccgcccccgcgaucugccacgacgggaaggcccacuucccccgcgagggcgucuucguguccaacgggacccacugguucgugacgcagcggaacuucuacgagccgcagaucaucaccaccgacaacaccuucgucagcggcaacugcgacguggugaucggcaucgucaacaacacgguguacgacccccugcagcccgagcucgacuccuucaaggaggagcuggacaaguacuucaagaaccacaccagccccgacguggaccugggggacaucuccggcaucaacgccagcgucgugaacauccagaaggagaucgaccgccucaacgagguggccaagaaccugaacgagucccugaucgaccuccaggagcuggggaaguacgagcaguacaucaaguggccgugguacaucuggcugggcuucaucgccggccucaucgcgaucgucauggugaccaucaugcugugcugcaugaccagcugcugcuccugccugaaggggugcugcagcugcggcuccugcugcaaguucgacgaggacgacagcgagcccgugcucaagggggucaagcugcacuacacguga

SEQ ID NO: 11746 - RNA, 3822 nt, Artificial Sequence
  SARS-CoV-2/Hong Kong/case42_VM20002493/2020__EPI_ISL_414527 spike protein CDS gc (1-1273)
auguucguguuccugguccuccugccccuggugagcucccagugcgugaaccucaccacccgcacgcagcugccgcccgccuacaccaacagcuucacccggggcgucuacuaccccgacaagguguuccgcuccagcgugcugcacuccacccaggaccucuuccugcccuucuucagcaacgucacgugguuccacgccauccacguguccgggaccaacggcaccaagcgguucgacaacccggugcugcccuucaacgacggggucuacuucgcgagcaccgagaaguccaacaucauccgcggcuggaucuucgggacgacccucgacagcaagacccagucccugcugaucgugaacaacgccaccaacguggucaucaaggugugcgaguuccaguucugcaacgaccccuuccucggcguguacuaccacaagaacaacaagagcuggauggaguccgaguuccgggucuacagcuccgccaacaacugcacguucgaguacgugagccagcccuuccugauggaccuggagggcaagcaggggaacuucaagaaccuccgcgaguucguguucaagaacaucgacggcuacuucaagaucuacuccaagcacaccccgaucaaccugguccgggaccugccccagggguucagcgcccucgagccccugguggaccugcccaucggcaucaacaucacccgcuuccagacccuccuggcccugcaccgguccuaccucacgccgggggacagcagcuccggcuggaccgcgggcgccgccgccuacuacgugggguaccugcagccccgcaccuuccugcucaaguacaacgagaacggcaccaucacggacgcggucgacugcgcccuggacccccugagcgagaccaagugcacccucaaguccuucaccguggagaaggggaucuaccagacgagcaacuuccgggugcagcccaccgaguccaucguccgcuucccgaacaucaccaaccugugccccuucggcgagguguucaacgccacccgguucgccagcgucuacgccuggaaccgcaagcggaucuccaacugcguggcggacuacagcgugcuguacaacuccgccagcuucuccacguucaagugcuacggcgucagccccaccaagcucaacgaccugugcuucaccaacguguacgccgacuccuucgugauccgcggggacgagguccggcagaucgcccccggccagaccgggaagaucgccgacuacaacuacaagcugccggacgacuucacgggcugcgugaucgcguggaacagcaacaaccucgacuccaaggucgggggcaacuacaacuaccuguaccgccuguuccgcaagagcaaccucaagcccuucgagcgggacaucuccaccgagaucuaccaggccggcagcacccccugcaacgggguggagggcuucaacugcuacuucccccugcaguccuacggguuccagccgaccaacggcgugggguaccagcccuaccggguggucgugcugagcuucgagcuccugcacgcccccgccacggugugcggccccaagaaguccaccaaccuggucaagaacaagugcgugaacuucaacuucaacggccucaccgggaccggcgugcugaccgagagcaacaagaaguuccugccguuccagcaguucgggcgcgacaucgccgacacgaccgacgcgguccgcgacccccagacccuggagauccucgacaucacccccugcagcuucggcgggguguccgugaucacgccgggcaccaacaccagcaaccaggucgccgugcuguaccaggacgugaacugcaccgagguccccguggccauccacgccgaccagcugacgcccaccuggcggguguacuccaccggcagcaacgucuuccagacccgcgccgggugccucaucggcgcggagcacgugaacaacuccuacgagugcgacauccccaucggggccggcaucugcgccagcuaccagacgcagaccaacuccccgcggcgcgcccggagcguggcgucccagagcaucaucgccuacaccaugucccugggcgccgagaacagcgucgccuacuccaacaacagcaucgccauccccaccaacuucgcgaucuccgugacgaccgagauccugcccgugagcaugaccaagaccagcgucgacugcacgauguacaucugcggggacuccaccgagugcagcaaccuccugcugcaguacggcuccuucugcacccagcucaaccgcgcccugaccgggaucgccguggagcaggacaagaacacgcaggagguguucgcccaggucaagcagaucuacaagacgcccccgaucaaggacuucggcggguucaacuucagccagauccugcccgaccccuccaagcccagcaagcgguccuucaucgaggaccuccuguucaacaaggugacccuggccgacgcgggcuucaucaagcaguacggcgacugccucggggacaucgccgcccgcgaccugaucugcgcccagaaguucaacggccugaccgugcucccgccccugcugaccgacgagaugaucgcccaguacaccagcgcgcuccuggccgggaccaucaccuccggcuggacguucggggccggcgccgcgcugcagauccccuucgccaugcagauggccuaccgguucaacggcaucggggucacccagaacgugcucuacgagaaccagaagcugaucgccaaccaguucaacagcgccaucggcaagauccaggacucccugagcuccaccgcgagcgcccucgggaagcugcaggacguggucaaccagaacgcccaggcccugaacacccucgugaagcagcuguccagcaacuucggcgccaucuccagcgugcugaacgacauccucucccgccuggacaaggucgaggcggaggugcagaucgaccggcugaucacggggcgccuccagagccugcagaccuacgugacccagcagcugauccgggccgccgagauccgcgccagcgccaaccucgcggccaccaagauguccgagugcguccugggccagagcaagcggguggacuucugcggcaagggguaccaccugauguccuucccccagagcgccccgcacggcguggucuuccuccacgugaccuacguccccgcccaggagaagaacuucacgaccgcgcccgccaucugccacgacgggaaggcccacuucccccgcgagggcguguucguguccaacgggacccacugguucgucacccagcggaacuucuacgagccgcagaucaucacgaccgacaacaccuucgugagcggcaacugcgacguggucaucggcaucgugaacaacaccguguacgacccccugcagcccgagcuggacuccuucaaggaggagcucgacaaguacuucaagaaccacacgagccccgacgucgaccugggggacaucuccggcaucaacgccagcguggugaacauccagaaggagaucgaccgccugaacgaggucgccaagaaccucaacgagucccugaucgaccugcaggagcucgggaaguacgagcaguacaucaaguggccgugguacaucuggcugggcuucaucgcgggccugaucgccaucgugauggugaccaucaugcucugcugcaugaccagcugcugcuccugccugaaggggugcugcagcugcggcuccugcugcaaguucgacgaggacgacagcgagcccguccugaagggggugaagcuccacuacaccuga

SEQ ID NO: 11747 - RNA, 3822 nt, Artificial Sequence
  SARS-CoV-2/USA/CruiseA-23/2020__EPI_ISL_414482 spike protein CDS gc (1-1273)
auguucguguuccugguccuccugccccuggugagcucccagugcgugaaccucaccacccgcacgcagcugccgcccgccuacaccaacagcuucacccggggcgucuacuaccccgacaagguguuccgcuccagcgugcugcacuccacccaggaccucuuccugcccuucuucagcaacgucacgugguuccacgccauccacguguccgggaccaacggcaccaagcgguucgacaacccggugcugcccuucaacgacggggucuacuucgcgagcaccgagaaguccaacaucauccgcggcuggaucuucgggacgacccucgacagcaagacccagucccugcugaucgugaacaacgccaccaacguggucaucaaggugugcgaguuccaguucugcaacgaccccuuccucggcguguacuaccacaagaacaacaagagcuggauggaguccgaguuccgggucuacagcuccgccaacaacugcacguucgaguacgugagccagcccuuccugauggaccuggaggugaagcagggcaacuucaagaaccuccgcgaguucgucuucaagaacaucgacggguacuucaagaucuacuccaagcacaccccgaucaaccuggugcgggaccugccccagggcuucagcgcccucgagccccugguggaccugcccaucgggaucaacaucacccgcuuccagacccuccuggcccugcaccgguccuaccucacgccgggcgacagcagcuccggguggaccgcgggcgccgccgccuacuacgucggcuaccugcagccccgcaccuuccugcucaaguacaacgagaacgggaccaucacggacgcgguggacugcgcccuggacccccugagcgagaccaagugcacccucaaguccuucaccguggagaagggcaucuaccagacgagcaacuuccggguccagcccaccgaguccaucgugcgcuucccgaacaucaccaaccugugccccuucggggaggucuucaacgccacccgguucgccagcguguacgccuggaaccgcaagcggaucuccaacugcguggcggacuacagcguccuguacaacuccgccagcuucuccacguucaagugcuacggcgugagccccaccaagcucaacgaccugugcuucaccaacguguacgccgacuccuucgucauccgcggcgacgaggugcggcagaucgcccccgggcagaccggcaagaucgccgacuacaacuacaagcugccggacgacuucacggggugcgugaucgcguggaacagcaacaaccucgacuccaaggucggcgggaacuacaacuaccuguaccgccuguuccgcaagagcaaccucaagcccuucgagcgggacaucuccaccgagaucuaccaggccggcagcacccccugcaacggcguggagggguucaacugcuacuucccccugcaguccuacggcuuccagccgaccaacggggugggcuaccagcccuaccgggucguggugcugagcuucgagcuccugcacgcccccgccacggucugcgggcccaagaaguccaccaaccuggugaagaacaagugcgugaacuucaacuucaacggccucaccggcaccgggguccugaccgagagcaacaagaaguuccugccguuccagcaguucggccgcgacaucgccgacacgaccgacgcggugcgcgacccccagacccuggagauccucgacaucacccccugcagcuucgggggcguguccgucaucacgccggggaccaacaccagcaaccagguggccgugcuguaccaggacgucaacugcaccgaggugcccguggccauccacgccgaccagcugacgcccaccuggcgggucuacuccaccggcagcaacguguuccagacccgcgccggcugccucaucggggcggagcacgugaacaacuccuacgagugcgacauccccaucggcgccgggaucugcgccagcuaccagacgcagaccaacuccccgcggcgcgcccggagcgucgcgucccagagcaucaucgccuacaccaugucccugggcgccgagaacagcguggccuacuccaacaacagcaucgccauccccaccaacuucacgaucuccgugaccaccgagauccugcccgucagcaugaccaagacgagcguggacugcaccauguacaucugcggcgacuccaccgagugcagcaaccuccugcugcaguacggguccuucugcacccagcucaaccgcgcgcugacgggcaucgccguggagcaggacaagaacacccaggaggucuucgcccaggugaagcagaucuacaagacgcccccgaucaaggacuucgggggcuucaacuucagccagauccugcccgaccccuccaagcccagcaagcgguccuucaucgaggaccuccuguucaacaaggugacccuggccgacgccggguucaucaagcaguacggcgacugccucggcgacaucgcggcccgcgaccugaucugcgcccagaaguucaacgggcugaccguccucccgccccugcugaccgacgagaugaucgcccaguacaccagcgcccuccuggcgggcaccaucacguccggguggaccuucggcgccggggccgcccugcagauccccuucgcgaugcagauggccuaccgguucaacggcaucggcgugacccagaacgugcucuacgagaaccagaagcugaucgccaaccaguucaacagcgccaucgggaagauccaggacucccugagcuccaccgccagcgcgcucggcaagcugcaggacgucgugaaccagaacgcccaggcccugaacacgcucgugaagcagcuguccagcaacuucggggccaucuccagcguccugaacgacauccucucccgccuggacaagguggaggccgaggugcagaucgaccggcugaucaccggccgccuccagagccugcagaccuacgucacccagcagcugauccgggcggccgagauccgcgccagcgccaaccucgccgcgaccaagauguccgagugcgugcuggggcagagcaagcggguggacuucugcggcaagggcuaccaccugauguccuucccccagagcgccccgcacggggucguguuccuccacgucacguacgugcccgcccaggagaagaacuucaccaccgcccccgcgaucugccacgacggcaaggcccacuucccccgcgaggggguguucgucuccaacggcacccacugguucgugacgcagcggaacuucuacgagccgcagaucaucaccaccgacaacaccuucgugagcgggaacugcgacgucgugaucggcaucgugaacaacacggucuacgacccccugcagcccgagcuggacuccuucaaggaggagcucgacaaguacuucaagaaccacaccagccccgacguggaccugggcgacaucuccgggaucaacgccagcguggucaacauccagaaggagaucgaccgccugaacgagguggccaagaaccucaacgagucccugaucgaccugcaggagcucggcaaguacgagcaguacaucaaguggccgugguacaucuggcugggguucaucgccggccugaucgcgaucgugauggucaccaucaugcucugcugcaugaccagcugcugcuccugccugaagggcugcugcagcugcggguccugcugcaaguucgacgaggacgacagcgagcccgugcugaagggcgugaagcuccacuacacguga

SEQ ID NO: 11748 - RNA, 3822 nt, Artificial Sequence
  SARS-CoV-2/Hong Kong/case85_VM20002868/2020__EPI_ISL_414519 spike protein CDS gc (1-1273)
auguucguguuccugguccucgugccccuggugagcucccagugcgucaaccugaccacccgcacgcagcucccgcccgccuacaccaacagcuucacccggggcguguacuaccccgacaagguguuccgcuccagcguccugcacuccacccaggaccuguuccuccccuucuucagcaacgugacgugguuccacgccauccacguguccgggaccaacggcaccaagcgguucgacaacccgguccugcccuucaacgacgggguguacuucgcgagcaccgagaaguccaacaucauccgcggcuggaucuucgggacgacccuggacagcaagacccagucccuccugaucgugaacaacgccaccaacgucgugaucaaggugugcgaguuccaguucugcaacgaccccuuccugggcgucuacuaccacaagaacaacaagagcuggauggaguccgaguuccggguguacagcuccgccaacaacugcacguucgaguacgugagccagcccuuccucauggaccuggagggcaagcaggggaacuucaagaaccugcgcgaguucgucuucaagaacaucgacggcuacuucaagaucuacuccaagcacaccccgaucaaccucgugcgggaccugccccagggguucagcgcccuggagccccucguggaccugcccaucggcaucaacaucacccgcuuccagacccugcucgcccugcaccgguccuaccugacgccgggggacagcagcuccggcuggaccgcgggcgccgccgccuacuacgucggguaccuccagccccgcaccuuccugcugaaguacaacgagaacggcaccaucacggacgcgguggacugcgcccucgacccccugagcgagaccaagugcacccugaaguccuucaccguggagaaggggaucuaccagacgagcaacuuccggguccagcccaccgaguccaucgugcgcuucccgaacaucaccaaccucugccccuucggcgaggucuucaacgccacccgguucgccagcguguacgccuggaaccgcaagcggaucuccaacugcguggcggacuacagcguccuguacaacuccgccagcuucuccacguucaagugcuacggcgugagccccaccaagcugaacgaccucugcuucaccaacguguacgccgacuccuucgucauccgcggggacgaggugcggcagaucgcccccggccagaccgggaagaucgccgacuacaacuacaagcugccggacgacuucacgggcugcgugaucgcguggaacagcaacaaccuggacuccaaggucgggggcaacuacaacuaccucuaccgccuguuccgcaagagcaaccugaagcccuucgagcgggacaucuccaccgagaucuaccaggccggcagcacccccugcaacgggguggagggcuucaacugcuacuucccccuccaguccuacggguuccagccgaccaacggcgugggguaccagcccuaccgggucguggugcugagcuucgagcugcuccacgcccccgccacggucugcggccccaagaaguccaccaaccuggugaagaacaagugcgugaacuucaacuucaacggccugaccgggaccggcguccucaccgagagcaacaagaaguuccugccguuccagcaguucgggcgcgacaucgccgacacgaccgacgcggugcgcgacccccagacccuggagauccuggacaucacccccugcagcuucggcgggguguccgucaucacgccgggcaccaacaccagcaaccagguggccgugcucuaccaggacgucaacugcaccgaggugcccguggccauccacgccgaccagcugacgcccaccuggcgggucuacuccaccggcagcaacguguuccagacccgcgccgggugccugaucggcgcggagcacgugaacaacuccuacgagugcgacauccccaucggggccggcaucugcgccagcuaccagacgcagaccaacuccccgcggcgcgcccggagcgucgcgucccagagcaucaucgccuacaccaugucccucggcgccgagaacagcguggccuacuccaacaacagcaucgccauccccaccaacuucacgaucuccgugaccaccgagauccugcccgucagcaugaccaagacgagcguggacugcaccauguacaucugcggggacuccaccgagugcagcaaccugcuccugcaguacggcuccuucugcacccagcugaaccgcgcgcucacggggaucgccguggagcaggacaagaacacccaggaggucuucgcccaggugaagcagaucuacaagacgcccccgaucaaggacuucggcggguucaacuucagccagauccugcccgaccccuccaagcccagcaagcgguccuucaucgaggaccuccuguucaacaaggugacccuggccgacgccggcuucaucaagcaguacggcgacugccugggggacaucgcggcccgcgaccucaucugcgcccagaaguucaacggccugaccguccugccgccccuccugaccgacgagaugaucgcccaguacaccagcgcccugcucgcggggaccaucacguccggcuggaccuucggggccggcgccgcccugcagauccccuucgcgaugcagauggccuaccgguucaacggcaucggggugacccagaacgugcuguacgagaaccagaagcucaucgccaaccaguucaacagcgccaucggcaagauccaggacucccugagcuccaccgccagcgcgcuggggaagcuccaggacgucgugaaccagaacgcccaggcccugaacacgcuggugaagcagcucuccagcaacuucggcgccaucuccagcguccugaacgacauccugucccgccucgacaagguggaggccgaggugcagaucgaccggcugaucaccgggcgccugcagagccuccagaccuacgucacccagcagcugauccgggcggccgagauccgcgccagcgccaaccuggccgcgaccaagauguccgagugcgugcucggccagagcaagcggguggacuucugcggcaagggguaccaccugauguccuucccccagagcgccccgcacggcgucguguuccugcacgucacguacgugcccgcccaggagaagaacuucaccaccgcccccgcgaucugccacgacgggaaggcccacuucccccgcgagggcguguucgucuccaacgggacccacugguucgugacgcagcggaacuucuacgagccgcagaucaucaccaccgacaacaccuucgugagcggcaacugcgacgucgugaucggcaucgugaacaacacggucuacgacccccuccagcccgagcuggacuccuucaaggaggagcuggacaaguacuucaagaaccacaccagccccgacguggaccucggggacaucuccggcaucaacgccagcguggucaacauccagaaggagaucgaccgccugaacgagguggccaagaaccugaacgagucccucaucgaccugcaggagcuggggaaguacgagcaguacaucaaguggccgugguacaucuggcucggcuucaucgccggccugaucgcgaucgugauggucaccaucaugcugugcugcaugaccagcugcugcuccugccucaaggggugcugcagcugcggcuccugcugcaaguucgacgaggacgacagcgagcccgugcugaagggggugaagcugcacuacacguga

SEQ ID NO: 11749 - RNA, 3822 nt, Artificial Sequence
  SARS-CoV-2/England/200990660/2020__EPI_ISL_414523 spike protein CDS gc (1-1273)
auguucguguuccugguccuccugccccuggugagcucccagugcgugaaccucaccacccgcacgcagcugccgcccgccuacaccaacagcuucacccggggcgucuacuaccccgacaagguguuccgcuccagcgugcugcacuccacccaggaccucuuccugcccuucuucagcaacgucacgugguuccacgccauccacguguccgggaccaacggcaccaagcgguucgacaacccggugcugcccuucaacgacggggucuacuucgcgagcaccgagaaguccaacaucauccgcggcuggaucuucgggacgacccucgacagcaagacccagucccugcugaucgugaacaacgccaccaacguggucaucaaggugugcgaguuccaguucugcaacgaccccuuccucggcguguacuaccacaagaacaacaagagcuggauggaguccgaguuccgggucuacagcuccgccaacaacugcacguucgaguacgugagccagcccuuccugauggaccuggagggcaagcaggggaacuucaagaaccuccgcgaguucguguucaagaacaucgacggcuacuucaagaucuacuccaagcacaccccgaucaaccugguccgggaccugccccagggguucagcgcccucgagccccugguggaccugcccaucggcaucaacaucacccgcuuccagacccuccuggcccugcaccgguccuaccucacgccgggggacagcagcuccggcuggaccgcgggcgccgccgccuacuacgugggguaccugcagccccgcaccuuccugcucaaguacaacgagaacggcaccaucacggacgcggucgacugcgcccuggacccccugagcgagaccaagugcacccucaaguccuucaccguggagaaggggaucuaccagacgagcaacuuccgggugcagcccaccgaguccaucguccgcuucccgaacaucaccaaccugugccccuucggcgagguguucaacgccacccgguucgccagcgucuacgccuggaaccgcaagcggaucuccaacugcguggcggacuacagcgugcuguacaacuccgccagcuucuccacguucaagugcuacggcgucagccccaccaagcucaacgaccugugcuucaccaacguguacgccgacuccuucgugauccgcggggacgagguccggcagaucgcccccggccagaccgggaagaucgccgacuacaacuacaagcugccggacgacuucacgggcugcgugaucgcguggaacagcaacaaccucgacuccaaggucgggggcaacuacaacuaccuguaccgccuguuccgcaagagcaaccucaagcccuucgagcgggacaucuccaccgagaucuaccaggccggcagcacccccugcaacgggguggagggcuucaacugcuacuucccccugcaguccuacggguuccagccgaccaacggcgugggguaccagcccuaccggguggucgugcugagcuucgagcuccugcacgcccccgccacggugugcggccccaagaaguccaccaaccuggucaagaacaagugcgugaacuucaacuucaacggccucaccgggaccggcgugcugaccgagagcaacaagaaguuccugccguuccagcaguucgggcgcgacaucgccgacacgaccgacgcgguccgcgacccccagacccuggagauccucgacaucacccccugcagcuucggcgggguguccgugaucacgccgggcaccaacaccagcaaccaggucgccgugcuguaccagggcgugaacugcaccgagguccccguggccauccacgccgaccagcugacgcccaccuggcggguguacuccaccgggagcaacgucuuccagacccgcgccggcugccucaucggggcggagcacgugaacaacuccuacgagugcgacauccccaucggcgccggcaucugcgccagcuaccagacgcagaccaacuccccgcggcgcgcccggagcguggcgucccagagcaucaucgccuacaccaugucccugggggccgagaacagcgucgccuacuccaacaacagcaucgccauccccaccaacuucacgaucuccgugaccaccgagauccugcccgugagcaugaccaagacgagcgucgacugcaccauguacaucugcggcgacuccaccgagugcagcaaccuccugcugcaguacggguccuucugcacccagcucaaccgcgcgcugacgggcaucgccguggagcaggacaagaacacccaggagguguucgcccaggucaagcagaucuacaagacgcccccgaucaaggacuucgggggcuucaacuucagccagauccugcccgaccccuccaagcccagcaagcgguccuucaucgaggaccuccuguucaacaaggugacccuggccgacgccggcuucaucaagcaguacggggacugccucggcgacaucgcggcccgcgaccugaucugcgcccagaaguucaacgggcugaccgugcucccgccccugcugaccgacgagaugaucgcccaguacaccagcgcccuccuggcgggcaccaucacguccggguggaccuucggcgccggcgccgcccugcagauccccuucgcgaugcagauggccuaccgguucaacgggaucggcgucacccagaacgugcucuacgagaaccagaagcugaucgccaaccaguucaacagcgccaucgggaagauccaggacucccugagcuccaccgccagcgcgcucggcaagcugcaggacguggucaaccagaacgcccaggcccugaacacgcucgugaagcagcuguccagcaacuucggggccaucuccagcgugcugaacgacauccucucccgccuggacaaggucgaggccgaggugcagaucgaccggcugaucaccggccgccuccagagccugcagaccuacgugacccagcagcugauccgggcggccgagauccgcgccagcgccaaccucgccgcgaccaagauguccgagugcguccugggccagagcaagcggguggacuucugcgggaagggcuaccaccugauguccuucccccagagcgccccgcacgggguggucuuccuccacgugacguacguccccgcccaggagaagaacuucaccaccgcccccgcgaucugccacgacggcaaggcccacuucccccgcgaggggguguucguguccaacggcacccacugguucgucacgcagcggaacuucuacgagccgcagaucaucaccaccgacaacaccuucgugagcggcaacugcgacguggucaucgggaucgugaacaacacgguguacgacccccugcagcccgagcuggacuccuucaaggaggagcucgacaaguacuucaagaaccacaccagccccgacgucgaccugggcgacaucuccgggaucaacgccagcguggugaacauccagaaggagaucgaccgccugaacgaggucgccaagaaccucaacgagucccugaucgaccugcaggagcucggcaaguacgagcaguacaucaaguggccgugguacaucuggcugggcuucaucgccgggcugaucgcgaucgugauggugaccaucaugcucugcugcaugaccagcugcugcuccugccugaagggcugcugcagcugcggguccugcugcaaguucgacgaggacgacagcgagcugguccucaagggcgugaagcugcacuacacguga

SEQ ID NO: 11750 - RNA, 3822 nt, Artificial Sequence
  SARS-CoV-2/Australia/NSW09/2020__EPI_ISL_413595 spike protein CDS gc (1-1273)
auguucguguuccugguccuccugccccuggugagcucccagugcgugaaccucaccacccgcacgcagcugccgcccgccuacaccaacagcuucacccggggcgucuacuaccccgacaagguguuccgcuccagcgugcugcacuccacccaggaccucuuccugcccuucuucagcaacgucacgugguuccacgccauccacguguccgggaccaacggcaccaagcgguucgacaacccggugcugcccuucaacgacggggucuacuucgcgagcaccgagaaguccaacaucauccgcggcuggaucuucgggacgacccucgacagcaagacccagucccugcugaucgugaacaacgccaccaacguggucaucaaggugugcgaguuccaguucugcaacgaccccuuccucggcguguacuaccacaagaacaacaagagcuggauggaguccgaguuccgggucuacagcuccgccaacaacugcacguucgaguacgugagccagcccuuccugauggaccuggagggcaagcaggggaacuucaagaaccuccgcgaguucguguucaagaacaucgacggcuacuucaagaucuacuccaagcacaccccgaucaaccugguccgggaccugccccagggguucagcgcccucgagccccugguggaccugcccaucggcaucaacaucacccgcuuccagacccuccuggcccugcaccgguccuaccucacgccgggggacagcagcuccggcuggaccgcgggcgccgccgccuacuacgugggguaccugcagccccgcaccuuccugcucaaguacaacgagaacggcaccaucacggacgcggucgacugcgcccuggacccccugagcgagaccaagugcacccucaaguccuucaccguggagaaggggaucuaccagacgagcaacuuccgggugcagcccaccgaguccaucguccgcuucccgaacaucaccaaccugugccccuucggcgagguguucaacgccacccgguucgccagcgucuacgccuggaaccgcaagcggaucuccaacugcguggcggacuacagcgugcuguacaacuccgccagcuucuccacguucaagugcuacggcgucagccccaccaagcucaacgaccugugcuucaccaacguguacgccgacuccuucgugauccgcggggacgagguccggcagaucgcccccggccagaccgggaagaucgccgacuacaacuacaagcugccggacgacuucacgggcugcgugaucgcguggaacagcaacaaccucgacuccaaggucgggggcaacuacaacuaccuguaccgccuguuccgcaagagcaaccucaagcccuucgagcgggacaucuccaccgagaucuaccaggccggcagcacccccugcaacgggguggagggcuucaacugcuacuucccccugcaguccuacggguuccagccgaccaacggcgugggguaccagcccuaccggguggucgugcugagcuucgagcuccugcacgcccccgccacggugugcggccccaagaaguccaccaaccuggucaagaacaagugcgugaacuucaacuucaacggccucaccgggaccggcgugcugaccgagagcaacaagaaguuccugccguuccagcaguucgggcgcgacaucgccgacacgaccgacgcgguccgcgacccccagacccuggagauccucgacaucacccccugcagcuucggcgggguguccgugaucacgccgggcaccaacaccagcaaccaggucgccgugcuguaccaggacgugaacugcaccgagguccccguggccauccacgccgaccagcugacgcccaccuggcggguguacuccaccggcagcaacgucuuccagacccgcgccgggugccucaucggcgcggagcacgugaacaacuccuacgagugcgacauccccaucggggccggcaucugcgccagcuaccagacgcagaccaacuccccgcggcgcgcccggagcguggcgucccagagcaucaucgccuacaccaugucccugggcgccgagaacagcgucgccuacuccaacaacagcaucgccauccccaccaacuucacgaucuccgugaccaccgagauccugcccgugagcaugaccaagacgagcgucgacugcaccauguacaucugcggggacuccaccgagugcagcaaccuccugcugcaguacggcuccuucugcacccagcucaaccgcgcgcugacggggaucgccguggagcaggacaagaacacccaggagguguucgcccaggucaagcagaucuacaagacgcccccgaucaaggacuucggcggguucaacuucagccagauccugcccgaccccuccaagcccagcaagcgguccuucaucgaggaccuccuguucaacaaggugacccuggccgacgccggcuucaucaagcaguacggcgacugccucggggacaucgcggcccgcgaccugaucugcgcccagaaguucaacggccugaccgugcucccgccccugcugaccgacgagaugaucgcccaguacaccagcgcccuccuggcggggaccaucacguccggcuggaccuucggggccggcgccgcccugcagauccccuucgcgaugcagauggccuaccgguucaacggcaucggggucacccagaacgugcucuacgagaaccagaagcugaucgccaaccaguucaacagcgccaucggcaagauccaggacucccugagcuucaccgccuccgcgcucgggaagcugcaggacguggucaaccagaacgcccaggcccugaacacgcucgugaagcagcugagcuccaacuucggcgccaucagcuccgugcugaacgacauccucagccgccuggacaaggucgaggccgaggugcagaucgaccggcugaucaccgggcgccuccagucccugcagaccuacgugacccagcagcugauccgggcggccgagauccgcgccagcgccaaccucgccgcgaccaagaugagcgagugcguccugggccaguccaagcggguggacuucugcggcaagggguaccaccugaugagcuucccccaguccgccccgcacggcguggucuuccuccacgugacguacguccccgcccaggagaagaacuucaccaccgcccccgcgaucugccacgacgggaaggcccacuucccccgcgagggcguguucgugagcaacgggacccacugguucgucacgcagcggaacuucuacgagccgcagaucaucaccaccgacaacaccuucguguccggcaacugcgacguggucaucggcaucgugaacaacacgguguacgacccccugcagcccgagcuggacagcuucaaggaggagcucgacaaguacuucaagaaccacaccucccccgacgucgaccugggggacaucagcggcaucaacgccuccguggugaacauccagaaggagaucgaccgccugaacgaggucgccaagaaccucaacgagagccugaucgaccugcaggagcucgggaaguacgagcaguacaucaaguggccgugguacaucuggcugggcuucaucgccggccugaucgcgaucgugauggugaccaucaugcucugcugcaugaccuccugcugcagcugccugaaggggugcugcuccugcggcagcugcugcaaguucgacgaggacgacuccgagcccguccugaagggggugaagcuccacuacacguga

SEQ ID NO: 11751 - RNA, 3822 nt, Artificial Sequence
  SARS-CoV-2/Australia/NSW10/2020__EPI_ISL_413596 spike protein CDS gc (1-1273)
auguucguguuccugguccuccugccccuggugagcucccagugcgugaaccucaccacccgcacgcagcugccgcccgccuacaccaacagcuucacccggggcgucuacuaccccgacaagguguuccgcuccagcgugcugcacuccacccaggaccucuuccugcccuucuucagcaacgucacgugguuccacgccauccacguguccgggaccaacggcaccaagcgguucgacaacccggugcugcccuucaacgacggggucuacuucgcgagcaccgagaaguccaacaucauccgcggcuggaucuucgggacgacccucgacagcaagacccagucccugcugaucgugaacaacgccaccaacguggucaucaaggugugcgaguuccaguucugcaacgaccccuuccucggcguguacuaccacaagaacaacaagagcuggauggaguccgaguuccgggucuacagcuccgccaacaacugcacguucgaguacgugagccagcccuuccugauggaccuggagggcaagcaggggaacuucaagaaccuccgcgaguucguguucaagaacaucgacggcuacuucaagaucuacuccaagcacaccccgaucaaccugguccgggaccugccccagggguucagcgcccucgagccccugguggaccugcccaucggcaucaacaucacccgcuuccagacccuccuggcccugcaccgguccuaccucacgccgggggacagcagcuccggcuggaccgcgggcgccgccgccuacuacgugggguaccugcagccccgcaccuuccugcucaaguacaacgagaacggcaccaucacggacgcggucgacugcgcccuggacccccugagcgagaccaagugcacccucaaguccuucaccguggagaaggggaucuaccagacgagcaacuuccgggugcagcccaccgaguccaucguccgcuucccgaacaucaccaaccugugccccuucggcgagguguucaacgccacccgguucgccagcgucuacgccuggaaccgcaagcggaucuccaacugcguggcggacuacagcgugcuguacaacuccgccagcuucuccacguucaagugcuacggcgucagccccaccaagcucaacgaccugugcuucaccaacguguacgccgacuccuucgugauccgcggggacgagguccggcagaucgcccccggccagaccgggaagaucgccgacuacaacuacaagcugccggacgacuucacgggcugcgugaucgcguggaacagcaacaaccucgacuccaaggucgggggcaacuacaacuaccuguaccgccuguuccgcaagagcaaccucaagcccuucgagcgggacaucuccaccgagaucuaccaggccggcagcacccccugcaacgggguggagggcuucaacugcuacuucccccugcaguccuacggguuccagccgaccaacggcgugggguaccagcccuaccggguggucgugcugagcuucgagcuccugcacgcccccgccacggugugcggccccaagaaguccaccaaccuggucaagaacaagugcgugaacuucaacuucaacggccucaccgggaccggcgugcugaccgagagcaacaagaaguuccugccguuccagcaguucgggcgcgacaucgccgacacgaccgacgcgguccgcgacccccagacccuggagauccucgacaucacccccugcagcuucggcgggguguccgugaucacgccgggcaccaacaccagcaaccaggucgccgugcuguaccaggacgugaacugcaccgagguccccguggccauccacgccgaccagcugacgcccaccuggcggguguacuccaccggcagcaacgucuuccagacccgcgccgggugccucaucggcgcggagcacgugaacaacuccuacgagugcgacauccccaucggggccggcaucugcgccagcuaccagacgcagaccaacuccccgcggcgcgcccggagcguggcgucccagagcaucaucgccuacaccaugucccugggcgccgagaacagcgucgccuacuccaacaacagcaucgccauccccaccaacuucacgaucuccgugaccaccgagauccugcccgugagcaugaccaagacgagcgucgacugcaccauguacaucugcggggacuccaccgagugcagcaaccuccugcugcaguacggcuccuucugcacccagcucaaccgcgcgcugacggggaucgccguggagcaggacaagaacacccaggagguguucgcccaggucaagcagaucuacaagacgcccccgaucaaggacuucggcggguucaacuucagccagauccugcccgaccccuccaagcccagcaagcgguccuucaucgaggaccuccuguucaacaaggugacccuggccgacgccggcuucaucaagcaguacggcgacugccucggggacaucgcggcccgcgaccugaucugcgcccagaaguucaacggccugaccgugcucccgccccugcugaccgacgagaugaucgcccaguacaccagcgcccuccuggcggggaccaucacguccggcuggaccuucggggccggcgccgcccugcagauccccuucgcgaugcagauggccuaccgguucaacggcaucggggucacccagaacgugcucuacgagaaccagaagcugaucgccaaccaguucaacagcgccaucggcaagauccaggacucccugagcuccaccgccagcgcgcucgggaagcugcaggacguggucaaccagaacgcccaggcccugaacacgcucgugaagcagcuguccagcaacuucggcgccaucuccagcgugcugaacgacauccucucccgccuggacaaggucgaggccgaggugcagaucgaccggcugaucaccgggcgccuccagagccugcagaccuacgugacccagcagcugauccgggcggccgagauccgcgccagcgccaaccucgccgcgaccaagauguccgagugcguccugggccagagcaagcggguggacuucugcggcaagggguaccaccugauguccuucccccagagcgccccgcacggcguggucuuccuccacgugacguacguccccgcccaggagaagaacuucaccaccgcccccgcgaucugccacgacgggaaggcccacuucccccgcgagggcguguucguguccaacgggacccacugguucgucacgcagcggaacuucuacgagccgcagaucaucaccaccgacaacaccuucgugagcggcaacugcgacguggucaucggcaucgugaacaacacgguguacgacccccugcagcccgagcuggacuccuucaaggaggagcucgacaaguacuucaagaaccacaccagccccgacgucgaccugggggacaucuccggcaucaacgccagcguggugaacauccagaaggagaucgaccgccugaacgaggucgccaagaaccucaacgagucccugaucgaccugcaggagcucgggaaguacgagcaguacaucaaguggccgugguacaucuggcugggcuucaucgccggccugaucgcgaucgugauggugaccaucaugcucugcugcaugaccagcugcugcuccugccugaaggggugcugcagcugcggcuccugcuucaaguucgacgaggacgacagcgagcccguccugaagggggugaagcuccacuacacguga

SEQ ID NO: 11752 - RNA, 3822 nt, Artificial Sequence
  SARS-CoV-2/Switzerland/1000477797/2020__EPI_ISL_413023 spike protein CDS gc (1-1273)
auguucguguuccugguccuccugccccuggugagcucccagugcgugaaccucaccacccgcacgcagcugccgcccgccuacaccaacagcuucacccggggcgucuacuaccccgacaagguguuccgcuccagcgugcugcacuccacccaggaccucuuccugcccuucuucagcaacgucacgugguuccacgccauccacguguccgggaccaacggcaccaagcgguucgacaacccggugcugcccuucaacgacggggucuacuucgcgagcaccgagaaguccaacaucauccgcggcuggaucuucgggacgacccucgacagcaagacccagucccugcugaucgugaacaacgccaccaacguggucaucaaggugugcgaguuccaguucugcaacgaccccuuccucggcguguacuaccacaagaacaacaagagcuggauggaguccgaguuccgggucuacagcuccgccaacaacugcacguucgaguacgugagccagcccuuccugauggaccuggagggcaagcaggggaacuucaagaaccuccgcgaguucguguucaagaacaucgacggcuacuucaacaucuacuccaagcacaccccgaucaaccugguccgggaccugccccagggguucagcgcccucgagccccugguggaccugcccaucggcaucaacaucacccgcuuccagacccuccuggcccugcaccgguccuaccucacgccgggggacagcagcuccggcuggaccgcgggcgccgccgccuacuacgugggguaccugcagccccgcaccuuccugcucaaguacaacgagaacggcaccaucacggacgcggucgacugcgcccuggacccccugagcgagaccaagugcacccucaaguccuucaccguggagaaggggaucuaccagacgagcaacuuccgggugcagcccaccgaguccaucguccgcuucccgaacaucaccaaccugugccccuucggcgagguguucaacgccacccgguucgccagcgucuacgccuggaaccgcaagcggaucuccaacugcguggcggacuacagcgugcuguacaacuccgccagcuucuccacguucaagugcuacggcgucagccccaccaagcucaacgaccugugcuucaccaacguguacgccgacuccuucgugauccgcggggacgagguccggcagaucgcccccggccagaccgggaagaucgccgacuacaacuacaagcugccggacgacuucacgggcugcgugaucgcguggaacagcaacaaccucgacuccaaggucgggggcaacuacaacuaccuguaccgccuguuccgcaagagcaaccucaagcccuucgagcgggacaucuccaccgagaucuaccaggccggcagcacccccugcaacgggguggagggcuucaacugcuacuucccccugcaguccuacggguuccagccgaccaacggcgugggguaccagcccuaccggguggucgugcugagcuucgagcuccugcacgcccccgccacggugugcggccccaagaaguccaccaaccuggucaagaacaagugcgugaacuucaacuucaacggccucaccgggaccggcgugcugaccgagagcaacaagaaguuccugccguuccagcaguucgggcgcgacaucgccgacacgaccgacgcgguccgcgacccccagacccuggagauccucgacaucacccccugcagcuucggcgggguguccgugaucacgccgggcaccaacaccagcaaccaggucgccgugcuguaccagggcgugaacugcaccgagguccccguggccauccacgccgaccagcugacgcccaccuggcggguguacuccaccgggagcaacgucuuccagacccgcgccggcugccucaucggggcggagcacgugaacaacuccuacgagugcgacauccccaucggcgccggcaucugcgccagcuaccagacgcagaccaacuccccgcggcgcgcccggagcguggcgucccagagcaucaucgccuacaccaugucccugggggccgagaacagcgucgccuacuccaacaacagcaucgccauccccaccaacuucacgaucuccgugaccaccgagauccugcccgugagcaugaccaagacgagcgucgacugcaccauguacaucugcggcgacuccaccgagugcagcaaccuccugcugcaguacggguccuucugcacccagcucaaccgcgcgcugacgggcaucgccguggagcaggacaagaacacccaggagguguucgcccaggucaagcagaucuacaagacgcccccgaucaaggacuucgggggcuucaacuucagccagauccugcccgaccccuccaagcccagcaagcgguccuucaucgaggaccuccuguucaacaaggugacccuggccgacgccggcuucaucaagcaguacggggacugccucggcgacaucgcggcccgcgaccugaucugcgcccagaaguucaacgggcugaccgugcucccgccccugcugaccgacgagaugaucgcccaguacaccagcgcccuccuggcgggcaccaucacguccggguggaccuucggcgccggcgccgcccugcagauccccuucgcgaugcagauggccuaccgguucaacgggaucggcgucacccagaacgugcucuacgagaaccagaagcugaucgccaaccaguucaacagcgccaucgggaagauccaggacucccugagcuccaccgccagcgcgcucggcaagcugcaggacguggucaaccagaacgcccaggcccugaacacgcucgugaagcagcuguccagcaacuucggggccaucuccagcgugcugaacgacauccucucccgccuggacaaggucgaggccgaggugcagaucgaccggcugaucaccggccgccuccagagccugcagaccuacgugacccagcagcugauccgggcggccgagauccgcgccagcgccaaccucgccgcgaccaagauguccgagugcguccugggccagagcaagcggguggacuucugcgggaagggcuaccaccugauguccuucccccagagcgccccgcacgggguggucuuccuccacgugacguacguccccgcccaggagaagaacuucaccaccgcccccgcgaucugccacgacggcaaggcccacuucccccgcgaggggguguucguguccaacggcacccacugguucgucacgcagcggaacuucuacgagccgcagaucaucaccaccgacaacaccuucgugagcggcaacugcgacguggucaucgggaucgugaacaacacgguguacgacccccugcagcccgagcuggacuccuucaaggaggagcucgacaaguacuucaagaaccacaccagccccgacgucgaccugggcgacaucuccgggaucaacgccagcguggugaacauccagaaggagaucgaccgccugaacgaggucgccaagaaccucaacgagucccugaucgaccugcaggagcucggcaaguacgagcaguacaucaaguggccgugguacaucuggcugggcuucaucgccgggcugaucgcgaucgugauggugaccaucaugcucugcugcaugaccagcugcugcuccugccugaagggcugcugcagcugcggguccugcugcaaguucgacgaggacgacagcgagcccguccugaagggcgugaagcuccacuacacguga

SEQ ID NO: 11753 - RNA, 3822 nt, Artificial Sequence
  SARS-CoV-2/Belgium/BA-02291/2020__EPI_ISL_415159 spike protein CDS gc (1-1273)
auguucguguuccugguccuccugccccuggugagcucccagugcgugaaccucaccacccgcacgcagcugccgcccgccuacaccaacagcuucacccggggcgucuacuaccccgacaagguguuccgcuccagcgugcugcacuccacccaggaccucuuccugcccuucuucagcaacgucacgugguuccacgccauccacguguccgggaccaacggcaccaagcgguucgacaacccggugcugcccuucaacgacggggucuacuucgcgagcaccgagaaguccaacaucauccgcggcuggaucuucgggacgacccucgacagcaagacccagucccugcugaucgugaacaacgccaccaacguggucaucaaggugugcgaguuccaguucugcaacgaccccuuccucggcguguacuaccacaagaacaacaagagcuggauggaguccgaguuccgggucuacagcuccgccaacaacugcacguucgaguacgugagccagcccuuccugauggaccuggagggcaagcaggggaacuucaagaaccuccgcgaguucguguucaagaacaucgacggcuacuucaagaucuacuccaagcacaccccgaucaaccugguccgggaccugccccagggguucagcgcccucgagccccugguggaccugcccaucggcaucaacaucacccgcuuccagacccuccuggcccugcaccgguccuaccucacgccgggggacagcagcuccggcuggaccgcgggcgccgccgccuacuacgugggguaccugcagccccgcaccuuccugcucaaguacaacgagaacggcaccaucacggacgcggucgacugcgcccuggacccccugagcgagaccaagugcacccucaaguccuucaccguggagaaggggaucuaccagacgagcaacuuccgggugcagcccaccgaguccaucguccgcuucccgaacaucaccaaccugugccccuucggcgagguguucaacgccacccgguucgccagcgucuacgccuggaaccgcaagcggaucuccaacugcguggcggacuacagcgugcuguacaacuccgccagcuucuccacguucaagugcuacggcgucagccccaccaagcucaacgaccugugcuucaccaacguguacgccgacuccuucgugauccgcggggacgagguccggcagaucgcccccggccagaccgggaagaucgccgacuacaacuacaagcugccggacgacuucacgggcugcgugaucgcguggaacagcaacaaccucgacuccaaggucgggggcaacuacaacuaccuguaccgccuguuccggcgcagcaaccucaagcccuucgagcgggacaucuccaccgagaucuaccaggccggcagcacccccugcaacgggguggagggcuucaacugcuacuucccccugcaguccuacggguuccagccgaccaacggcgugggguaccagcccuaccgcguggucgugcugagcuucgagcuccugcccgcccccgccacggugugcggcccgaagaaguccaccaaccuggucaagaacaagugcgugaacuucaacuucaacggccucaccgggaccggcgugcugaccgaguccaacaagaaguuccugcccuuccagcaguucgggcgcgacaucgccgacacgaccgacgcgguccgggacccccagacccuggagauccucgacaucaccccgugcagcuucggcgggguguccgugaucacgcccggcaccaacaccagcaaccaggucgccgugcuguaccagggcgugaacugcaccgagguccccguggccauccacgccgaccagcugacgcccaccuggcgcguguacuccaccgggagcaacgucuuccagacccgggccggcugccucaucggggcggagcacgugaacaacuccuacgagugcgacaucccgaucggcgccggcaucugcgccagcuaccagacgcagaccaacagcccccgccgggcccgcagcguggcgucccagagcaucaucgccuacaccaugucccugggggccgagaacagcgucgccuacuccaacaacagcaucgccauccccaccaacuucacgaucuccgugaccaccgagauccugcccgugagcaugaccaagacgagcgucgacugcaccauguacaucugcggcgacuccaccgagugcagcaaccuccugcugcaguacggguccuucugcacccagcucaaccgggcgcugacgggcaucgccguggagcaggacaagaacacccaggagguguucgcccaggucaagcagaucuacaagaccccgcccaucaaggacuucgggggcuucaacuucagccagauccugcccgaccccuccaagccgagcaagcgcuccuucaucgaggaccuccuguucaacaaggugacccuggccgacgccggcuucaucaagcaguacggggacugccucggcgacaucgcggcccgggaccugaucugcgcccagaaguucaacgggcugacggugcucccgccccugcugaccgacgagaugaucgcccaguacaccagcgcccuccuggcgggcaccaucacguccggguggaccuucggcgccggcgccgcccugcagauccccuucgcgaugcagauggccuaccgcuucaacgggaucggcgucacccagaacgugcucuacgagaaccagaagcugaucgccaaccaguucaacagcgccaucgggaagauccaggacucccugagcuccgccgcgcccgcccucggcaagcugcaggacguggucaaccagaacgcccaggcccugaacacccucgugaagcagcugagcuccaacuucggggccaucagcuccgugcugaacgacauccucagccggcuggacaaggucgaggcggaggugcagaucgaccgccugaucacgggccggcuccagucccugcagaccuacgugacccagcagcugauccgcgccgccgagauccgggccagcgccaaccucgcggccaccaagaugagcgagugcguccugggccaguccaagcgcguggacuucugcgggaagggcuaccaccugaugagcuucccccaguccgcgccccacgggguggucuuccuccacgugaccuacguccccgcccaggagaagaacuucacgaccgccccggccaucugccacgacggcaaggcccacuucccccgggaggggguguucgugagcaacggcacccacugguucgucacccagcgcaacuucuacgagccccagaucaucacgaccgacaacaccuucguguccggcaacugcgacguggucaucgggaucgugaacaacaccguguacgacccccugcagccggagcuggacagcuucaaggaggagcucgacaaguacuucaagaaccacacgucccccgacgucgaccugggcgacaucagcgggaucaacgccuccguggugaacauccagaaggagaucgaccggcugaacgaggucgccaagaaccucaacgagagccugaucgaccugcaggagcucggcaaguacgagcaguacaucaaguggcccugguacaucuggcugggcuucaucgcggggcugaucgccaucgugauggugaccaucaugcucugcugcaugaccuccugcugcagcugccugaagggcugcugcuccugcgggagcugcugcaaguucgacgaggacgacuccgagccgguccugaagggcgugaagcuccacuacaccuga

SEQ ID NO: 11754 - RNA, 3822 nt, Artificial Sequence
  SARS-CoV-2/USA/WA8-UW5/2020__EPI_ISL_413486 spike protein CDS gc (1-1273)
auguucguguuccugguccuccugccccuggugagcucccagugcgugaaccucaccacccgcacgcagcugccgcccgccuacaccaacagcuucacccggggcgucuacuaccccgacaagguguuccgcuccagcgugcugcacuccacccaggaccucuuccugcccuucuucagcaacgucacgugguuccacgccauccacguguccgggaccaacggcaccaagcgguucgacaacccggugcugcccuucaacgacggggucuacuucgcgagcaccgagaaguccaacaucauccgcggcuggaucuucgggacgacccucgacagcaagacccagucccugcugaucgugaacaacgccaccaacguggucaucaaggugugcgaguuccaguucugcaacgaccccuuccucggcguguacuaccacaagaacaacaagagcuggauggaguccgaguuccgggucuacagcuccgccaacaacugcacguucgaguacgugagccagcccuuccugauggaccuggagggcaagcaggggaacuucaagaaccuccgcgaguucguguucaagaacaucgacggcuacuucaagaucuacuccaagcacaccccgaucaaccugguccgggaccugccccagggguucagcgcccucgagccccugguggaccugcccaucggcaucaacaucacccgcuuccagacccuccuggcccugcaccgguccuaccucacgccgggggacagcagcuccggcuggaccgcgggcgccgccgccuacuacgugggguaccugcagccccgcaccuuccugcucaaguacaacgagaacggcaccaucacggacgcggucgacugcgcccuggacccccugagcgagaccaagugcacccucaaguccuucaccguggagaaggggaucuaccagacgagcaacuuccgggugcagcccaccgaguccaucguccgcuucccgaacaucaccaaccugugccccuucggcgagguguucaacgccacccgguucgccagcgucuacgccuggaaccgcaagcggaucuccaacugcguggcggacuacagcgugcuguacaacuccgccagcuucuccacguucaagugcuacggcgucagccccaccaagcucaacgaccugugcuucaccaacguguacgccgacuccuucgugauccgcggggacgagguccggcagaucgcccccggccagaccgggaagaucgccgacuacaacuacaagcugccggacgacuucacgggcugcgugaucgcguggaacagcaacaaccucgacuccaaggucgggggcaacuacaacuaccuguaccgccuguuccgcaagagcaaccucaagcccuucgagcgggacaucuccaccgagaucuaccaggccggcagcacccccugcaacgggguggagggcuucaacugcuacuucccccugcaguccuacggguuccagccgaccaacggcgugggguaccagcccuaccggguggucgugcugagcuucgagcuccugcacgcccccgccacggugugcggccccaagaaguccaccaaccuggucaagaacaagugcgugaacuucaacuucaacggccucaccgggaccggcgugcugaccgagagcaacaagaaguuccugccguuccagcaguucgggcgcgacaucgccgacacgaccgacgcgguccgcgacccccagacccuggagauccucgacaucacccccugcagcuucggcgggguguccgugaucacgccgggcaccaacaccagcaaccaggucgccgugcuguaccaggacgugaacugcaccgagguccccguggccauccacgccgaccagcugacgcccaccuggcggguguacuccaccggcagcaacgucuuccagacccgcgccgggugccucaucggcgcggaguacgugaacaacuccuacgagugcgacauccccaucggggccggcaucugcgccagcuaccagacgcagaccaacuccccgcggcgcgcccggagcguggcgucccagagcaucaucgccuacaccaugucccugggcgccgagaacagcgucgccuacuccaacaacagcaucgccauccccaccaacuucacgaucuccgugaccaccgagauccugcccgugagcaugaccaagacgagcgucgacugcaccauguacaucugcggggacuccaccgagugcagcaaccuccugcugcaguacggcuccuucugcacccagcucaaccgcgcgcugacggggaucgccguggagcaggacaagaacacccaggagguguucgcccaggucaagcagaucuacaagacgcccccgaucaaggacuucggcggguucaacuucagccagauccugcccgaccccuccaagcccagcaagcgguccuucaucgaggaccuccuguucaacaaggugacccuggccgacgccggcuucaucaagcaguacggcgacugccucggggacaucgcggcccgcgaccugaucugcgcccagaaguucaacggccugaccgugcucccgccccugcugaccgacgagaugaucgcccaguacaccagcgcccuccuggcggggaccaucacguccggcuggaccuucggggccggcgccgcccugcagauccccuucgcgaugcagauggccuaccgguucaacggcaucggggucacccagaacgugcucuacgagaaccagaagcugaucgccaaccaguucaacagcgccaucggcaagauccaggacucccugagcuccaccgccagcgcgcucgggaagcugcaggacguggucaaccagaacgcccaggcccugaacacgcucgugaagcagcuguccagcaacuucggcgccaucuccagcgugcugaacgacauccucucccgccuggacaaggucgaggccgaggugcagaucgaccggcugaucaccgggcgccuccagagccugcagaccuacgugacccagcagcugauccgggcggccgagauccgcgccagcgccaaccucgccgcgaccaagauguccgagugcguccugggccagagcaagcggguggacuucugcggcaagggguaccaccugauguccuucccccagagcgccccgcacggcguggucuuccuccacgugacguacguccccgcccaggagaagaacuucaccaccgcccccgcgaucugccacgacgggaaggcccacuucccccgcgagggcguguucguguccaacgggacccacugguucgucacgcagcggaacuucuacgagccgcagaucaucaccaccgacaacaccuucgugagcggcaacugcgacguggucaucggcaucgugaacaacacgguguacgacccccugcagcccgagcuggacuccuucaaggaggagcucgacaaguacuucaagaaccacaccagccccgacgucgaccugggggacaucuccggcaucaacgccagcguggugaacauccagaaggagaucgaccgccugaacgaggucgccaagaaccucaacgagucccugaucgaccugcaggagcucgggaaguacgagcaguacaucaaguggccgugguacaucuggcugggcuucaucgccggccugaucgcgaucgugauggugaccaucaugcucugcugcaugaccagcugcugcuccugccugaaggggugcugcagcugcggcuccugcugcaaguucgacgaggacgacagcgagcccguccugaagggggugaagcuccacuacacguga

SEQ ID NO: 11755 - RNA, 3822 nt, Artificial Sequence
  SARS-CoV-2/England/20102000506/2020__EPI_ISL_415147 spike protein CDS gc (1-1273)
auguucguguuccugguccuccugccccuggugagcucccagugcgugaaccucaccacccgcacgcagcugccgcccgccuacaccaacagcuucacccggggcgucuacuaccccgacaagguguuccgcuccagcgugcugcacuccacccaggaccucuuccugcccuucuucagcaacgucacgugguuccacgccauccacguguccgggaccaacggcaccaagcgguucgacaacccggugcugcccuucaacgacggggucuacuucgcgagcaccgagaaguccaacaucauccgcggcuggaucuucgggacgacccucgacagcaagacccagucccugcugaucgugaacaacgccaccaacguggucaucaaggugugcgaguuccaguucugcaacgaccccuuccucggcguguacuaccacaagaacaacaagagcuggauggaguccgaguuccgggucuacagcuccgccaacaacugcacguucgaguacgugagccagcccuuccugauggaccuggagggcaagcaggggaacuucaagaaccuccgcgaguucguguucaagaacaucgacggcuacuucaagaucuacuccaagcacaccccgaucaaccugguccgggaccugccccagggguucagcgcccucgagccccugguggaccugcccaucggcaucaacaucacccgcuuccagacccuccuggcccugcaccgguccuaccucacgccgggggacagcagcuccggcuggaccgcgggcgccgccgccuacuacgugggguaccugcagccccgcaccuuccugcucaaguacaacgagaacggcaccaucacggacgcggucgacugcgcccuggacccccugagcgagaccaagugcacccucaaguccuucaccguggagaaggggaucuaccagacgagcaacuuccgggugcagcccaccgaguccaucguccgcuucccgaacaucaccaaccugugccccuucggcgagguguucaacgccacccgguucgccagcgucuacgccuggaaccgcaagcggaucuccaacugcguggcggacuacagcgugcuguacaacuccgccagcuucuccacguucaagugcuacggcgucagccccaccaagcucaacgaccugugcuucaccaacguguacgccgacuccuucgugauccgcggggacgagguccggcagaucgcccccggccagaccgggaagaucgccgacuacaacuacaagcugccggacgacuucacgggcugcgugaucgcguggaacagcaacaaccucgacuccaaggucgggggcaacuacaacuaccuguaccgccuguuccgcaagagcaaccucaagcccuucgagcgggacaucuccaccgagaucuaccaggccggcagcacccccugcaacgggguggagggcuucaacugcuacuucccccugcaguccuacggguuccagccgaccaacggcgugggguaccagcccuaccggguggucgugcugagcuucgagcuccugcacgcccccgccacggugugcggccccaagaaguccaccaaccuggucaagaacaagugcgugaacuucaacuucaacggccucaccgggaccggcgugcugaccgagagcaacaagaaguuccugccguuccagcaguucgggcgcgacaucgccgacacgaccgacgcgguccgcgacccccagacccuggagauccucgacaucacccccugcagcuucggcgggguguccgugaucacgccgggcaccaacaccagcaaccaggucgccgugcuguaccagggcgugaacugcaccgagguccccguggccauccacgccgaccagcugacgcccaccuggcggguguacuccaccgggagcaacgucuuccagacccgcgccggcugccucaucggggcggagcacgugaacaacuccuacgagugcgacauccccaucggcgccggcaucugcgccagcuaccagacgcagaccaacuccccgcggcgcgcccggagcguggcgucccagagcaucaucgccuacaccaugucccugggggccgagaacagcgucgccuacuccaacaacagcaucgccauccccaccaacuucacgaucuccgugaccaccgagauccugcccgugagcaugaccaagacgagcgucgacugcaccauguacaucugcggcgacuccaccgagugcagcaaccuccugcugcaguacggguccuucugcacccagcucaaccgcgcgcugacgggcaucgccguggagcaggacaagaacacccaggagguguucgcccaggucaagcagaucuacaagacgcccccgaucaaggacuucgggggcuucaacuucagccagauccugcccgaccccuccaagcccagcaagcgguccuucaucgaggaccuccuguucaacaaggugacccuggccgacgccggcuucaucaagcaguacggguacugccucggcgacaucgcggcccgcgaccugaucugcgcccagaaguucaacgggcugaccgugcucccgccccugcugaccgacgagaugaucgcccaguacaccagcgcccuccuggcgggcaccaucacguccggguggaccuucggcgccggcgccgcccugcagauccccuucgcgaugcagauggccuaccgguucaacgggaucggcgucacccagaacgugcucuacgagaaccagaagcugaucgccaaccaguucaacagcgccaucgggaagauccaggacucccugagcuccaccgccagcgcgcucggcaagcugcaggacguggucaaccagaacgcccaggcccugaacacgcucgugaagcagcuguccagcaacuucggggccaucuccagcgugcugaacgacauccucucccgccuggacaaggucgaggccgaggugcagaucgaccggcugaucaccggccgccuccagagccugcagaccuacgugacccagcagcugauccgggcggccgagauccgcgccagcgccaaccucgccgcgaccaagauguccgagugcguccugggccagagcaagcggguggacuucugcgggaagggcuaccaccugauguccuucccccagagcgccccgcacgggguggucuuccuccacgugacguacguccccgcccaggagaagaacuucaccaccgcccccgcgaucugccacgacggcaaggcccacuucccccgcgaggggguguucguguccaacggcacccacugguucgucacgcagcggaacuucuacgagccgcagaucaucaccaccgacaacaccuucgugagcggcaacugcgacguggucaucgggaucgugaacaacacgguguacgacccccugcagcccgagcuggacuccuucaaggaggagcucgacaaguacuucaagaaccacaccagccccgacgucgaccugggcgacaucuccgggaucaacgccagcguggugaacauccagaaggagaucgaccgccugaacgaggucgccaagaaccucaacgagucccugaucgaccugcaggagcucggcaaguacgagcaguacaucaaguggccgugguacaucuggcugggcuucaucgccgggcugaucgcgaucgugauggugaccaucaugcucugcugcaugaccagcugcugcuccugccugaagggcugcugcagcugcggguccugcugcaaguucgacgaggacgacagcgagcccguccugaagggcgugaagcuccacuacacguga

SEQ ID NO: 11756 - RNA, 3822 nt, Artificial Sequence
  SARS-CoV-2/Belgium/VAG-03013/2020__EPI_ISL_415155 spike protein CDS gc (1-1273)
auguucguguuccugguccuccugccccuggugagcucccagugcgugaaccucaccacccgcacgcagcugccgcccgccuacaccaacagcuucacccggggcgucuacuaccccgacaagguguuccgcuccagcgugcugcacuccacccaggaccucuuccugcccuucuucagcaacgucacgugguuccacgccauccacguguccgggaccaacggcaccaagcgguucgacaacccggugcugcccuucaacgacggggucuacuucgcgagcaccgagaaguccaacaucauccgcggcuggaucuucgggacgacccucgacagcaagacccagucccugcugaucgugaacaacgccaccaacguggucaucaaggugugcgaguuccaguucugcaacgaccccuuccucggcguguacuaccacaagaacaacaagagcuggauggaguccgaguuccgggucuacagcuccgccaacaacugcacguucgaguacgugagccagcccuuccugauggaccuggagggcaagcaggggaacuucaagaaccuccgcgaguucguguucaagaacaucgacggcuacuucaagaucuacuccaagcacaccccgaucaaccugguccgggaccugccccagggguucagcgcccucgagccccugguggaccugcccaucggcaucaacaucacccgcuuccagacccuccuggcccugcaccgguccuaccucacgccgggggacagcagcuccggcuggaccgcgggcgccgccgccuacuacgugggguaccugcagccccgcaccuuccugcucaaguacaacgagaacggcaccaucacggacgcggucgacugcgcccuggacccccugagcgagaccaagugcacccucaaguccuucaccguggagaaggggaucuaccagacgagcaacuuccgggugcagcccaccgaguccaucguccgcuucccgaacaucaccaaccugugccccuucggcgagguguucaacgccacccgguucgccagcgucuacgccuggaaccgcaagcggaucuccaacugcguggcggacuacagcgugcuguacaacuccgccagcuucuccacguucaagugcuacggcgucagccccaccaagcucaacgaccugugcuucaccaacguguacgccgacuccuucgugauccgcggggacgagguccggcagaucgcccccggccagaccgggaagaucgccgacuacaacuacaagcugccggacgacuucacgggcugcgugaucgcguggaacagcaacaaccucgacuccaaggucgggggcaacuacaacuaccuguaccgccuguuccgcaagagcaaccucaagcccuucgagcgggacaucuccaccgagaucuaccaggccggcagcacccccugcaacgggguggagggcuucaacugcuacuucccccugcaguccuacggguuccagccgaccaacggcgugggguaccagcccuaccggguggucgugcugagcuucgagcuccugcacgcccccgccacggugugcggccccaagaaguccaccaaccuggucaagaacaagugcgugaacuucaacuucaacggccucaccgggaccggcgugcugaccgagagcaacaagaaguuccugccguuccagcaguucgggcgcgacaucgccgacacgaccgacgcgguccgcgacccccagacccuggagauccucgacaucacccccugcagcuucggcgggguguccgugaucacgccgggcaccaacaccagcaaccaggucgccgugcuguaccagggcgugaacugcaccgagguccccguggccauccacgccgaccagcugacgcccaccuggcggguguacuccaccgggagcaacgucuuccagacccgcgccggcugccucaucggggcggagcacgugaacaacuccuacgagugcgacauccccaucggcgccggcaucugcgccagcuaccagacgcagaccaacuccccgcggcgcgcccggagcguggcgucccagagcaucaucgccuacaccaugucccugggggccgagaacagcgucgccuacuccaacaacagcaucgccauccccaccaacuucacgaucuccgugaccaccgagauccugcccgugagcaugaccaagacgagcgucgacugcaccauguacaucugcggcgacuccaccgagugcagcaaccuccugcugcaguacggguccuucugcacccagcucaaccgcgcgcugacgggcaucgccguggagcaggacaagaacacccaggagguguucgcccaggucaagcagaucuacaagacgcccccgaucaaggacuucgggggcuucaacuucagccagauccugcccgaccccuccaagcccagcaagcgguccuucaucgaggaccuccuguucaacaaggugacccuggccgacgccggcuucaucaagcaguacggggacugccucggcgacaucgcggcccgcgaccugaucugcgcccagaaguucaacgggcugaccgugcucccgccccugcugaccgacgagaugaucgcccaguacaccagcgcccuccuggcgggcaccaucacguccggguggaccuucggcgccggcgccgcccugcagauccccuucgcgaugcagauggccuaccgguucaacgggaucggcgucacccagaacgugcucuacgagaaccagaagcugaucgccaaccaguucaacagcgccaucgggaagauccaggacucccugagcuccaccgccacggcgcucggcaagcugcaggacguggucaaccagaacgcccaggcccugaacacccucgugaagcagcugagcuccaacuucggggccaucagcuccgugcugaacgacauccucagccgccuggacaaggucgaggccgaggugcagaucgaccggcugaucaccggccgccuccagucccugcagaccuacgugacccagcagcugauccgggcggccgagauccgcgccagcgccaaccucgccgcgacgaagaugagcgagugcguccugggccaguccaagcggguggacuucugcgggaagggcuaccaccugaugagcuucccccaguccgccccgcacgggguggucuuccuccacgugaccuacguccccgcccaggagaagaacuucaccaccgcccccgcgaucugccacgacggcaaggcccacuucccccgcgaggggguguucgugagcaacggcacgcacugguucgucacccagcggaacuucuacgagccgcagaucaucaccaccgacaacacguucguguccggcaacugcgacguggucaucgggaucgugaacaacaccguguacgacccccugcagcccgagcuggacagcuucaaggaggagcucgacaaguacuucaagaaccacaccucccccgacgucgaccugggcgacaucagcgggaucaacgccuccguggugaacauccagaaggagaucgaccgccugaacgaggucgccaagaaccucaacgagagccugaucgaccugcaggagcucggcaaguacgagcaguacaucaaguggccgugguacaucuggcugggcuucaucgccgggcugaucgcgaucgugauggugaccaucaugcucugcugcaugacguccugcugcagcugccugaagggcugcugcuccugcgggagcugcugcaaguucgacgaggacgacuccgagcccguccugaagggcgugaagcuccacuacaccuga

SEQ ID NO: 11757 - RNA, 3822 nt, Artificial Sequence
  SARS-CoV-2/Belgium/BC-03016/2020__EPI_ISL_415157 spike protein CDS gc (1-1273)
auguucguguuccugguccuccugccccuggugagcucccagugcgugaaccucaccacccgcacgcagcugccgcccgccuacaccaacagcuucacccggggcgucuacuaccccgacaagguguuccgcuccagcgugcugcacuccacccaggaccucuuccugcccuucuucagcaacgucacgugguuccacgccauccacguguccgggaccaacggcaccaagcgguucgacaacccggugcugcccuucaacgacggggucuacuucgcgagcaccgagaaguccaacaucauccgcggcuggaucuucgggacgacccucgacagcaagacccagucccugcugaucgugaacaacgccaccaacguggucaucaaggugugcgaguuccaguucugcaacgaccccuuccucggcguguacuaccacaagaacaacaagagcuggauggaguccgaguuccgggucuacagcuccgccaacaacugcacguucgaguacgugagccagcccuuccugauggaccuggagggcaagcaggggaacuucaagaaccuccgcgaguucguguucaagaacaucgacggcuacuucaagaucuacuccaagcacaccccgaucaaccugguccgggaccugccccagggguucagcgcccucgagccccugguggaccugcccaucggcaucaacaucacccgcuuccagacccuccuggcccugcaccgguccuaccucacgccgggggacagcagcuccggcuggaccgcgggcgccgccgccuacuacgugggguaccugcagccccgcaccuuccugcucaaguacaacgagaacggcaccaucacggacgcggucgacugcgcccuggacccccugagcgagaccaagugcacccucaaguccuucaccguggagaaggggaucuaccagacgagcaacuuccgggugcagcccaccgaguccaucguccgcuucccgaacaucaccaaccugugccccuucggcgagguguucaacgccacccgguucgccagcgucuacgccuggaaccgcaagcggaucuccaacugcguggcggacuacagcgugcuguacaacuccgccagcuucuccacguucaagugcuacggcgucagccccaccaagcucaacgaccugugcuucaccaacguguacgccgacuccuucgugauccgcggggacgagguccggcagaucgcccccggccagaccgggaagaucgccgacuacaacuacaagcugccggacgacuucacgggcugcgugaucgcguggaacagcaacaaccucgacuccaaggucgggggcaacuacaacuaccuguaccgccuguuccgcaagagcaaccucaagcccuucgagcgggacaucuccaccgagaucuaccaggccggcagcacccccugcaacgggguggagggcuucaacugcuacuucccccugcaguccuacggguuccagccgaccaacggcgugggguaccagcccuaccggguggucgugcugagcuucgagcuccugcacgcccccgccacggugugcggccccaagaaguccaccaaccuggucaagaacaagugcgugaacuucaacuucaacggccucaccgggaccggcgugcugaccgagagcaacaagaaguuccugccguuccagcaguucgggcgcgacaucgccgacacgaccgacgcgguccgcgacccccagacccuggagauccucgacaucacccccugcagcuucggcgggguguccgugaucacgccgggcaccaacaccagcaaccaggucgccgugcuguaccagggcgugaacugcaccgagguccccguggccauccacgccgaccagcugacgcccaccuggcggguguacuccaccgggagcaacgucuuccagacccgcgccggcugccucaucggggcggagcacgugaacaacuccuacgagugcgacauccccaucggcgccggcaucugcgccagcuaccagacgcagaccaacuccccgcggcgcgcccggagcguggcgucccagagcaucaucgccuacaccaugucccugggggccgagaacagcgucgccuacuccaacaacagcaucgccauccccaccaacuucacgaucuccgugaccaccgagauccugcccgugagcaugaccaagacgagcgucgacugcaccauguacaucugcggcgacuccaccgagugcagcaaccuccugcugcaguacggguccuucugcacccagcucaaccgcgcgcugacgggcaucgccguggagcaggacaagaacacccaggagguguucgcccaggucaagcagaucuacaagacgcccccgaucaaggacuucgggggcuucaacuucagccagauccugcccgaccccuccaagcccagcaagcgguccuucaucgaggaccuccuguucaacaaggugacccuggccgacgccggcuucaucaagcaguacggggacugccucggcgacaucgcggcccgcgaccugaucugcgcccagaaguucaacgggcugaccgugcucccgccccugcugaccgacgagaugaucgcccaguacaccagcgcccuccuggcgggcaccaucacguccggguggaccuucggcgccggcgccgcccugcagauccccuucgcgaugcagauggccuaccgguucaacgggaucggcgucacccagaacgugcucuacgagaaccagaagcugaucgccaaccaguucaacagcgccaucgggaagauccaggacucccugagcuccaccgcccccgcgcucggcaagcugcaggacguggucaaccagaacgcccaggcccugaacacgcucgugaagcagcugagcuccaacuucggggccaucagcuccgugcugaacgacauccucagccgccuggacaaggucgaggccgaggugcagaucgaccggcugaucaccggccgccuccagucccugcagaccuacgugacccagcagcugauccgggcggccgagauccgcgccagcgccaaccucgccgcgaccaagaugagcgagugcguccugggccaguccaagcggguggacuucugcgggaagggcuaccaccugaugagcuucccgcaguccgcgccccacgggguggucuuccuccacgugacguacguccccgcccaggagaagaacuucaccaccgcccccgccaucugccacgacggcaaggcccacuucccgcgcgaggggguguucgugagcaacggcacccacugguucgucacgcagcggaacuucuacgagccccagaucaucaccaccgacaacaccuucguguccggcaacugcgacguggucaucgggaucgugaacaacacgguguacgacccccugcagcccgagcuggacagcuucaaggaggagcucgacaaguacuucaagaaccacaccuccccggacgucgaccugggcgacaucagcgggaucaacgccuccguggugaacauccagaaggagaucgaccgccugaacgaggucgccaagaaccucaacgagagccugaucgaccugcaggagcucggcaaguacgagcaguacaucaaguggcccugguacaucuggcugggcuucaucgccgggcugaucgcgaucgugauggugaccaucaugcucugcugcaugaccuccugcugcagcugccugaagggcugcugcuccugcgggagcugcugcaaguucgacgaggacgacuccgagcccguccugaagggcgugaagcuccacuacacguga

SEQ ID NO: 11758 - RNA, 3822 nt, Artificial Sequence
  SARS-CoV-2/Germany/BavPat3/2020__EPI_ISL_414521 spike protein CDS gc (1-1273)
auguucguguuccugguccuccugccccuggugagcucccagugcgugaaccucaccacccgcacgcagcugccgcccgccuacaccaacagcuucacccggggcgucuacuaccccgacaagguguuccgcuccagcgugcugcacuccacccaggaccucuuccugcccuucuucagcaacgucacgugguuccacgccauccacguguccgggaccaacggcaccaagcgguucgacaacccggugcugcccuucaacgacggggucuacuucgcgagcaccgagaaguccaacaucauccgcggcuggaucuucgggacgacccucgacagcaagacccagucccugcugaucgugaacaacgccaccaacguggucaucaaggugugcgaguuccaguucugcaacgaccccuuccucggcguguacuaccacaagaacaacaagagcuggauggaguccgaguuccgggucuacagcuccgccaacaacugcacguucgaguacgugagccagcccuuccugauggaccuggagggcaagcaggggaacuucaagaaccuccgcgaguucguguucaagaacaucgacggcuacuucaagaucuacuccaagcacaccccgaucaaccugguccgggaccugccccagggguucagcgcccucgagccccugguggaccugcccaucggcaucaacaucacccgcuuccagacccuccuggcccugcaccgguccuaccucacgccgggggacagcagcuccggcuggaccgcgggcgccgccgccuacuacgugggguaccugcagccccgcaccuuccugcucaaguacaacgagaacggcaccaucacggacgcggucgacugcgcccuggacccccugagcgagaccaagugcacccucaaguccuucaccguggagaaggggaucuaccagacgagcaacuuccgggugcagcccaccgaguccaucguccgcuucccgaacaucaccaaccugugccccuucggcgagguguucaacgccacccgguucgccagcgucuacgccuggaaccgcaagcggaucuccaacugcguggcggacuacagcgugcuguacaacuccgccagcuucuccacguucaagugcuacggcgucagccccaccaagcucaacgaccugugcuucaccaacguguacgccgacuccuucgugauccgcggggacgagguccggcagaucgcccccggccagaccgggaagaucgccgacuacaacuacaagcugccggacgacuucacgggcugcgugaucgcguggaacagcaacaaccucgacuccaaggucgggggcaacuacaacuaccuguaccgccuguuccgcaagagcaaccucaagcccuucgagcgggacaucuccaccgagaucuaccaggccggcagcacccccugcaacgggguggagggcuucaacugcuacuucccccugcaguccuacggguuccagccgaccaacggcgugggguaccagcccuaccggguggucgugcugagcuucgagcuccugcacgcccccgccacggugugcggccccaagaaguccaccaaccuggucaagaacaagugcgugaacuucaacuucaacggccucaccgggaccggcgugcugaccgagagcaacaagaaguuccugccguuccagcaguucgggcgcgacaucgccgacacgaccgacgcgguccgcgacccccagacccuggagauccucgacaucacccccugcagcuucggcgggguguccgugaucacgccgggcaccaacaccagcaaccaggucgccgugcuguaccaggacgugaacugcaccgagguccccguggccauccacgccgaccagcugacgcccaccuggcggguguacuccaccggcagcaacgucuuccagacccgcgccgggugccucaucggcgcggagcacgugaacaacuccuacgagugcgacauccccaucggggccggcaucugcgccagcuaccagacgcagaccaacuccccgcggcgcgcccggagcguggcgucccagagcaucaucgccuacaccaugucccugggcgccgagaacagcgucgccuacuccaacaacagcaucgccauccccaccaacuucacgaucuccgugaccaccgagauccugcccgugagcaugaccaagacgagcgucgacugcaccauguacaucugcggggacuccaccgagugcagcaaccuccugcugcaguacggcuccuucugcacccagcucaaccgcgcgcugacggggaucgccguggagcaggacaagaacacccagcaggucuucgcccaggugaagcagaucuacaagacgcccccgaucaaggacuucggcggguucaacuucagccagauccugcccgaccccuccaagcccagcaagcgguccuucaucgaggaccuccuguucaacaaggugacccuggccgacgccggcuucaucaagcaguacggcgacugccucggggacaucgcggcccgcgaccugaucugcgcccagaaguucaacggccugaccgugcucccgccccugcugaccgacgagaugaucgcccaguacaccagcgcccuccuggcggggaccaucacguccggcuggaccuucggggccggcgccgcccugcagauccccuucgcgaugcagauggccuaccgguucaacggcaucggggucacccagaacgugcucuacgagaaccagaagcugaucgccaaccaguucaacagcgccaucggcaagauccaggacucccugagcuccaccgccagcgcgcucgggaagcugcaggacguggucaaccagaacgcccaggcccugaacacgcucgugaagcagcuguccagcaacuucggcgccaucuccagcgugcugaacgacauccucucccgccuggacaaggucgaggccgaggugcagaucgaccggcugaucaccgggcgccuccagagccugcagaccuacgugacccagcagcugauccgggcggccgagauccgcgccagcgccaaccucgccgcgaccaagauguccgagugcguccugggccagagcaagcggguggacuucugcggcaagggguaccaccugauguccuucccccagagcgccccgcacggcguggucuuccuccacgugacguacguccccgcccaggagaagaacuucaccaccgcccccgcgaucugccacgacgggaaggcccacuucccccgcgagggcguguucguguccaacgggacccacugguucgucacgcagcggaacuucuacgagccgcagaucaucaccaccgacaacaccuucgugagcggcaacugcgacguggucaucggcaucgugaacaacacgguguacgacccccugcagcccgagcuggacuccuucaaggaggagcucgacaaguacuucaagaaccacaccagccccgacgucgaccugggggacaucuccggcaucaacgccagcguggugaacauccagaaggagaucgaccgccugaacgaggucgccaagaaccucaacgagucccugaucgaccugcaggagcucgggaaguacgagcaguacaucaaguggccgugguacaucuggcugggcuucaucgccggccugaucgcgaucgugauggugaccaucaugcucugcugcaugaccagcugcugcuccugccugaaggggugcugcagcugcggcuccugcugcaaguucgacgaggacgacagcgagcccguccugaagggggugaagcuccacuacacguga

SEQ ID NO: 11759 - RNA, 3822 nt, Artificial Sequence
  SARS-CoV-2/France/HF1805/2020__EPI_ISL_414628 spike protein CDS gc (1-1273)
auguucguguuccugguccuccugccccuggugagcucccagugcgugaaccucaccacccgcacgcagcugccgcccgccuacaccaacagcuucacccggggcgucuacuaccccgacaagguguuccgcuccagcgugcugcacuccacccaggaccucuuccugcccuucuucagcaacgucacgugguuccacgccauccacguguccgggaccaacggcaccaagcgguucgacaacccggugcugcccuucaacgacggggucuacuucgcgagcaccgagaaguccaacaucauccgcggcuggaucuucgggacgacccucgacagcaagacccagucccugcugaucgugaacaacgccaccaacguggucaucaaggugugcgaguuccaguucugcaacgaccccuuccucggcguguacuaccacaagaacaacaagagcuggauggaguccgaguuccgggucuacagcuccgccaacaacugcacguucgaguacgugagccagcccuuccugauggaccuggagggcaagcaggggaacuucaagaaccuccgcgaguucguguucaagaacaucgacggcuacuucaagaucuacuccaagcacaccccgaucaaccugguccgggaccugccccagggguucagcgcccucgagccccugguggaccugcccaucggcaucaacaucacccgcuuccagacccuccuggcccugcaccgguccuaccucacgccgggggacagcagcuccggcuggaccgcgggcgccgccgccuacuacgugggguaccugcagccccgcaccuuccugcucaaguacaacgagaacggcaccaucacggacgcggucgacugcgcccuggacccccugagcgagaccaagugcacccucaaguccuucaccguggagaaggggaucuaccagacgagcaacuuccgggugcagcccaccgaguccaucguccgcuucccgaacaucaccaaccugugccccuucggcgagguguucaacgccacccgguucgccagcgucuacgccuggaaccgcaagcggaucuccaacugcguggcggacuacagcgugcuguacaacuccgccagcuucuccacguucaagugcuacggcgucagccccaccaagcucaacgaccugugcuucaccaacguguacgccgacuccuucgugauccgcggggacgagguccggcagaucgcccccggccagaccgggaagaucgccgacuacaacuacaagcugccggacgacuucacgggcugcgugaucgcguggaacagcaacaaccucgacuccaaggucgggggcaacuacaacuaccuguaccgccuguuccgcaagagcaaccucaagcccuucgagcgggacaucuccaccgagaucuaccaggccggcagcacccccugcaacgggguggagggcuucaacugcuacuucccccugcaguccuacggguuccagccgaccaacggcgugggguaccagcccuaccggguggucgugcugagcuucgagcuccugcacgcccccgccacggugugcggccccaagaaguccaccaaccuggucaagaacaagugcgugaacuucaacuucaacggccucaccgggaccggcgugcugaccgagagcaacaagaaguuccugccguuccagcaguucgggcgcgacaucgccgacacgaccgacgcgguccgcgacccccagacccuggagauccucgacaucacccccugcagcuucggcgggguguccgugaucacgccgggcaccaacaccagcaaccaggucgccgugcuguaccagggcgugaacugcaccgagguccccguggccauccacgccgaccagcugacgcccaccuggcggguguacuccaccgggagcaacgucuuccagacccgcgccggcugccucaucggggcggagcacgugaacaacuccuacgagugcgacauccccaucggcgccggcaucugcgccagcuaccagacgcagaccaacuccccgcggcgcgcccggagcguggcgucccagagcaucaucgccuacaccaugucccugggggccgagaacagcgucgccuacuccaacaacagcaucgccauccccaccaacuucacgaucuccgugaccaccgagauccugcccgugagcaugaccaagacgagcgucgacugcaccauguacaucugcggcgacuccaccgagugcagcaaccuccugcugcaguacggguccuucugcacccagcucaaccgcgcgcugacgggcaucgccguggagcaggacaagaacacccaggagguguucgcccaggucaagcagaucuacaagacgcccccgaucaaggacuucgggggcuucaacuucagccagauccugcccgaccccuccaagcccagcaagcgguccuucaucgaggaccuccuguucaacaaggugacccuggccgacgccggcuucaucaagcaguacggggacugccucggcgacaucgcggcccgcgaccugaucugcgcccagaaguucaacgggcugaccgugcucccgccccugcugaccgacgagaugaucgcccaguacaccagcgcccuccuggcgggcaccaucacguccggguggaccuucggcgccggcgccgcccugcagauccccuucgcgaugcagauggccuaccgguucaacgggaucggcgucacccagaacgugcucuacgagaaccagaagcugaucgccaaccaguucaacagcgccaucgggaagauccaggacucccugagcuccaccgccagcgcgcucggcaagcugcaggacguggucaaccagaacgcccaggcccugaacacgcucgugaagcagcuguccagcaacuucggggccaucuccagcgugcugaacgacauccucucccgccuggacaaggucgaggccgaggugcagaucgaccggcugaucaccggccgccuccagagccugcagaccuacgugacccagcagcugauccgggcggccgagauccgcgccagcgccaaccucgccgcgaccaagauguccgagugcguccugggccagagcaagcggguggacuucugcgggaagggcuaccaccugauguccuucccccagagcgccccgcacgggguggucuuccuccacgugacguacguccccgcccaggagaagaacuucaccaccgcccccgcgaucugccacgacggcaaggcccacuucccccgcgaggggguguucguguccaacggcacccacugguucgucacgcagcggaacuucuacgagccgcagaucaucaccaccgacaacaccuucgugagcggcaacugcgacguggucaucgggguggugaacaacacggucuacgacccccugcagcccgagcuggacuccuucaaggaggagcucgacaaguacuucaagaaccacaccagccccgacguggaccugggcgacaucuccgggaucaacgccagcguggucaacauccagaaggagaucgaccgccugaacgagguggccaagaaccucaacgagucccugaucgaccugcaggagcucggcaaguacgagcaguacaucaaguggccgugguacaucuggcugggcuucaucgccgggcugaucgcgaucgugauggucaccaucaugcucugcugcaugaccagcugcugcuccugccugaagggcugcugcagcugcggguccugcugcaaguucgacgaggacgacagcgagcccgugcugaagggcgugaagcuccacuacacguga

SEQ ID NO: 11760 - RNA, 3822 nt, Artificial Sequence
  SARS-CoV-2/Netherlands/ZuidHolland_9/2020__EPI_ISL_414445 spike protein CDS gc (1-1273)
auguucguguuccugguccuccugccccuggugagcucccagugcgugaaccucaccacccgcacgcagcugccgcccgccuacaccaacagcuucacccggggcgucuacuaccccgacaagguguuccgcuccagcgugcugcacuccacccaggaccucuuccugcccuucuucagcaacgucacgugguuccacgccauccacguguccgggaccaacggcaccaagcgguucgacaacccggugcugcccuucaacgacggggucuacuucgcgagcaccgagaaguccaacaucauccgcggcuggaucuucgggacgacccucgacagcaagacccagucccugcugaucgugaacaacgccaccaacguggucaucaaggugugcgaguuccaguucugcaacgaccccuuccucggcguguacuaccacaagaacaacaagagcuggauggaguccgaguuccgggucuacagcuccgccaacaacugcacguucgaguacgugagccagcccuuccugauggaccuggagggcaagcaggggaacuucaagaaccuccgcgaguucguguucaagaacaucgacggcuacuucaagaucuacuccaagcacaccccgaucaaccugguccgggaccugccccagggguucagcgcccucgagccccugguggaccugcccaucggcaucaacaucacccgcuuccagacccuccuggcccugcaccgguccuaccucacgccgggggacagcagcuccggcuggaccgcgggcgccgccgccuacuacgugggguaccugcagccccgcaccuuccugcucaaguacaacgagaacggcaccaucacggacgcggucgacugcgcccuggacccccugagcgagaccaagugcacccucaaguccuucaccguggagaaggggaucuaccagacgagcaacuuccgggugcagcccaccgaguccaucguccgcuucccgaacaucaccaaccugugccccuucggcgagguguucaacgccacccgguucgccagcgucuacgccuggaaccgcaagcggaucuccaacugcguggcggacuacagcgugcuguacaacuccgccagcuucuccacguucaagugcuacggcgucagccccaccaagcucaacgaccugugcuucaccaacguguacgccgacuccuucgugauccgcggggacgagguccggcagaucgcccccggccagaccgggaagaucgccgacuacaacuacaagcugccggacgacuucacgggcugcgugaucgcguggaacagcaacaaccucgacuccaaggucgggggcaacuacaacuaccuguaccgccuguuccgcaagagcaaccucaagcccuucgagcgggacaucuccaccgagaucuaccaggccggcagcacccccugcaacgggguggagggcuucaacugcuacuucccccugcaguccuacggguuccagccgaccaacggcgugggguaccagcccuaccggguggucgugcugagcuucgagcuccugcacgcccccgccacggugugcggccccaagaaguccaccaaccuggucaagaacaagugcgugaacuucaacuucaacggccucaccgggaccggcgugcugaccgagagcaacaagaaguuccugccguuccagcaguucgggcgcgacaucgccgacacgaccgacgcgguccgcgacccccagacccuggagauccucgacaucacccccugcagcuucggcgggguguccgugaucacgccgggcaccaacaccagcaaccaggucgccgugcuguaccagggcgugaacugcaccgagguccccguggccauccacgccgaccagcugacgcccaccuggcggguguacuccaccgggagcaacgucuuccagacccgcgccggcugccucaucggggcggagcacgugaacaacuccuacgagugcgacauccccaucggcgccggcaucugcgccagcuaccagacgcagaccaacuccccgcggcgcgcccggagcguggcgucccagagcaucaucgccuacaccaugucccugggggccgagaacagcgucgccuacuccaacaacagcaucgccauccccaccaacuucacgaucuccgugaccaccgagauccugcccgugagcaugaccaagacgagcgucgacugcaccauguacaucugcggcgacuccaccgagugcagcaaccuccugcugcaguacggguccuucugcacccagcucaaccgcgcgcugacgggcaucgccguggagcaggacaagaacacccaggagguguucgcccaggucaagcagaucuacaagacgcccccgaucaaggacuucgggggcuucaacuucagccagauccugcccgaccccuccaagcccagcaagcgguccuucaucgaggaccuccuguucaacaaggugacccuggccgacgccggcuucaucaagcaguacggggacugccucggcgacaucgcggcccgcgaccugaucugcgugcagaaguucaacgggcugaccguccucccgccccugcugaccgacgagaugaucgcccaguacaccagcgcccuccuggccggcaccaucacguccggguggaccuucggcgcgggcgccgcccugcagauccccuucgccaugcagauggcguaccgguucaacgggaucggcgugacccagaacgugcucuacgagaaccagaagcugaucgccaaccaguucaacagcgccaucgggaagauccaggacucccugagcuccaccgccagcgcccucggcaagcugcaggacgucgugaaccagaacgcgcaggcccugaacacgcucgugaagcagcuguccagcaacuucggggccaucuccagcguccugaacgacauccucucccgccuggacaagguggaggccgaggugcagaucgaccggcugaucaccggccgccuccagagccugcagaccuacgucacccagcagcugauccgggccgcggagauccgcgccagcgccaaccucgccgccaccaagauguccgagugcgugcugggccagagcaagcggguggacuucugcgggaagggcuaccaccugauguccuucccccagagcgcgccgcacggggucguguuccuccacgucacguacgugcccgcccaggagaagaacuucaccaccgcccccgccaucugccacgacggcaaggcgcacuucccccgcgaggggguguucgucuccaacggcacccacugguucgugacgcagcggaacuucuacgagccgcagaucaucaccaccgacaacaccuucgugagcggcaacugcgacgucgugaucgggaucgugaacaacacggucuacgacccccugcagcccgagcuggacuccuucaaggaggagcucgacaaguacuucaagaaccacaccagccccgacguggaccugggcgacaucuccgggaucaacgccagcguggucaacauccagaaggagaucgaccgccugaacgagguggccaagaaccucaacgagucccugaucgaccugcaggagcucggcaaguacgagcaguacaucaaguggccgugguacaucuggcugggcuucaucgccgggcugaucgccaucgugauggucaccaucaugcucugcugcaugaccagcugcugcuccugccugaagggcugcugcagcugcggguccugcugcaaguucgacgaggacgacagcgagcccgugcugaagggcgugaagcuccacuacacguga

SEQ ID NO: 11761 - RNA, 3822 nt, Artificial Sequence
  SARS-CoV-2/Finland/FIN03032020A/2020__EPI_ISL_413602 spike protein CDS gc (1-1273)
auguucguguuccugguccuccugccccuggugagcucccagugcgugaaccucaccacccgcacgcagcugccgcccgccuacaccaacagcuucacccggggcgucuacuaccccgacaagguguuccgcuccagcgugcugcacuccacccaggaccucuuccugcccuucuucagcaacgucacgugguuccacgccauccacguguccgggaccaacggcaccaagcgguucgacaacccggugcugcccuucaacgacggggucuacuucgcgagcaccgagaaguccaacaucauccgcggcuggaucuucgggacgacccucgacagcaagacccagucccugcugaucgugaacaacgccaccaacguggucaucaaggugugcgaguuccaguucugcaacgaccccuuccucggcguguacuaccacaagaacaacaagagcuggauggaguccgaguuccgggucuacagcuccgccaacaacugcacguucgaguacgugagccagcccuuccugauggaccuggagggcaagcaggggaacuucaagaaccuccgcgaguucguguucaagaacaucgacggcuacuucaagaucuacuccaagcacaccccgaucaaccugguccgggaccugccccagggguucagcgcccucgagccccugguggaccugcccaucggcaucaacaucacccgcuuccagacccuccuggcccugcaccgguccuaccucacgccgggggacagcagcuccggcuggaccgcgggcgccgccgccuacuacgugggguaccugcagccccgcaccuuccugcucaaguacaacgagaacggcaccaucacggacgcggucgacugcgcccuggacccccugagcgagaccaagugcacccucaaguccuucaccguggagaaggggaucuaccagacgagcaacuuccgggugcagcccaccgaguccaucguccgcuucccgaacaucaccaaccugugccccuucggcgagguguucaacgccacccgguucgccagcgucuacgccuggaaccgcaagcggaucuccaacugcguggcggacuacagcgugcuguacaacuccgccagcuucuccacguucaagugcuacggcgucagccccaccaagcucaacgaccugugcuucaccaacguguacgccgacuccuucgugauccgcggggacgagguccggcagaucgcccccggccagaccgggaagaucgccgacuacaacuacaagcugccggacgacuucacgggcugcgugaucagcuggaacuccaacaaccucgacagcaaggucgggggcaacuacaacuaccuguaccgccuguuccggaaguccaaccucaagcccuucgagcgcgacaucagcaccgagaucuaccaggcgggcuccacccccugcaacgggguggagggcuucaacugcuacuucccccugcagagcuacggguuccagccgaccaacggcgugggguaccagcccuaccggguggucgugcugagcuucgagcuccugcacgcccccgccacggugugcggccccaagaaguccaccaaccuggucaagaacaagugcgugaacuucaacuucaacggccucaccgggaccggcgugcugaccgagagcaacaagaaguuccugccguuccagcaguucgggcgcgacaucgccgacacgaccgacgccguccgcgacccccagacccuggagauccucgacaucacccccugcuccuucggcggggugagcgugaucacgccgggcaccaacaccuccaaccaggucgcggugcuguaccagggcgugaacugcaccgagguccccguggccauccacgccgaccagcugacgcccaccuggcggguguacagcaccggguccaacgucuuccagacccgcgccggcugccucaucggggccgagcacgugaacaacagcuacgagugcgacauccccaucggcgcgggcaucugcgccuccuaccagacgcagaccaacagcccgcggcgcgcccgguccguggccagccaguccaucaucgcguacaccaugagccugggggccgagaacuccgucgccuacagcaacaacuccaucgccauccccaccaacuucacgaucagcgugaccaccgagauccugcccgugagcaugaccaagacguccgucgacugcaccauguacaucugcggcgacagcaccgagugcuccaaccuccugcugcaguacgggagcuucugcacccagcucaaccgcgcccugacgggcaucgcgguggagcaggacaagaacacccaggagguguucgcccaggucaagcagaucuacaagacgcccccgaucaaggacuucgggggcuucaacuucucccagauccugcccgaccccagcaagcccuccaagcggagcuucaucgaggaccuccuguucaacaaggugacccuggccgacgccggcuucaucaagcaguacggggacugccucggcgacaucgccgcgcgcgaccugaucugcgcccagaaguucaacgggcugaccgugcucccgccccugcugaccgacgagaugaucgcccaguacaccuccgcccuccuggccggcaccaucacgagcggguggaccuucggcgcgggcgccgcccugcagauccccuucgccaugcagauggcguaccgguucaacgggaucggcgucacccagaacgugcucuacgagaaccagaagcugaucgccaaccaguucaacuccgccaucgggaagauccaggacagccuguccagcaccgccuccgcccucggcaagcugcaggacguggucaaccagaacgcgcaggcccugaacacgcucgugaagcagcugagcuccaacuucggggccaucagcuccgugcugaacgacauccucagccgccuggacaaggucgaggccgaggugcagaucgaccggcugaucaccggccgccuccagagccugcagaccuacgugacccagcagcugauccgggccgcggagauccgcgccuccgccaaccucgccgccaccaagaugagcgagugcguccugggccaguccaagcggguggacuucugcgggaagggcuaccaccugaugagcuucccccaguccgcgccgcacgggguggucuuccuccacgugacguacguccccgcccaggagaagaacuucaccaccgcccccgccaucugccacgacggcaaggcgcacuucccccgcgaggggguguucgugagcaacggcacccacugguucgucacgcagcggaacuucuacgagccgcagaucaucaccaccgacaacaccuucguguccggcaacugcgacguggucaucgggaucgugaacaacacgguguacgacccccugcagcccgagcuggacagcuucaaggaggagcucgacaaguacuucaagaaccacaccucccccgacgucgaccugggcgacaucagcgggaucaacgccuccguggugaacauccagaaggagaucgaccgccugaacgaggucgccaagaaccucaacgagagccugaucgaccugcaggagcucggcaaguacgagcaguacaucaaguggccgugguacaucuggcugggcuucaucgccgggcugaucgccaucgugauggugaccaucaugcucugcugcaugaccuccugcugcagcugccugaagggcugcugcuccugcgggagcugcugcaaguucgacgaggacgacuccgagcccguccugaagggcgugaagcuccacuacacguga

SEQ ID NO: 11762 - RNA, 3822 nt, Artificial Sequence
  SARS-CoV-2/France/GE1977/2020__EPI_ISL_414632 spike protein CDS gc (1-1273)
auguucguguuccugguccuccugccccuggugagcucccagugcgugaaccucaccacccgcacgcagcugccgcccgccuacaccaacagcuucacccggggcgucuacuaccccgacaagguguuccgcuccagcgugcugcacuccacccaggaccucuuccugcccuucuucagcaacgucacgugguuccacgccauccacguguccgggaccaacggcaccaagcgguucgacaacccggugcugcccuucaacgacggggucuacuucgcgagcaccgagaaguccaacaucauccgcggcuggaucuucgggacgacccucgacagcaagacccagucccugcugaucgugaacaacgccaccaacguggucaucaaggugugcgaguuccaguucugcaacgaccccuuccucggcguguacuaccacaagaacaacaagagcuggauggaguccgaguuccgggucuacagcuccgccaacaacugcacguucgaguacgugagccagcccuuccugauggaccuggagggcaagcaggggaacuucaagaaccuccgcgaguucguguucaagaacaucgacggcuacuucaagaucuacuccaagcacaccccgaucaaccugguccgggaccugccccagggguucagcgcccucgagccccugguggaccugcccaucggcaucaacaucacccgcuuccagacccuccuggcccugcaccgguccuaccucacgccgggggacagcagcuccggcuggaccgcgggcgccgccgccuacuacgugggguaccugcagccccgcaccuuccugcucaaguacaacgagaacggcaccaucacggacgcggucgacugcgcccuggacccccugagcgagaccaagugcacccucaaguccuucaccguggagaaggggaucuaccagacgagcaacuuccgggugcagcccaccgaguccaucguccgcuucccgaacaucaccaaccugugccccuucggcgagguguucaacgccacccgguucgccagcgucuacgccuggaaccgcaagcggaucuccaacugcguggcggacuacagcgugcuguacaacuccgccagcuucuccacguucaagugcuacggcgucagccccaccaagcucaacgaccugugcuucaccaacguguacgccgacuccuucgugauccgcggggacgagguccggcagaucgcccccggccagaccgggaagaucgccgacuacaacuacaagcugccggacgacuucacgggcugcgugaucgcguggaacagcaacaaccucgacuccaaggucgggggcaacuacaacuaccuguaccgccuguuccgcaagagcaaccucaagcccuucgagcgggacaucuccaccgagaucuaccaggccggcagcacccccugcaacgggguggagggcuucaacugcuacuucccccugcaguccuacggguuccagccgaccaacggcgugggguaccagcccuaccggguggucgugcugagcuucgagcuccugcacgcccccgccacggugugcggccccaagaaguccaccaaccuggucaagaacaagugcgugaacuucaacuucaacggccucaccgggaccggcgugcugaccgagagcaacaagaaguuccugccguuccagcaguucgggcgcgacaucgccgacacgaccgacgcgguccgcgacccccagacccuggagauccucgacaucacccccugcagcuucggcgggguguccgugaucacgccgggcaccaacaccagcaaccaggucgccgugcuguaccagggcgugaacugcaccgagguccccguggccauccacgccgaccagcugacgcccaccuggcggguguacuccaccgggagcaacgucuuccagacccgcgccggcugccucaucggggcggagcacgugaacaacuccuacgagugcgacauccccaucggcgccggcaucugcgccagcuaccagacgcagaccaacuccccgcggcgcgcccggagcguggcgucccagagcaucaucgccuacaccaugucccugggggccgagaacagcgucgccuacuccaacaacagcaucgccauccccaccaacuucacgaucuccgugaccaccgagauccugcccgugagcaugaccaagacgagcgucgacugcaccauguacaucugcggcgacuccaccgagugcagcaaccuccugcugcaguacggguccuucugcacccagcucaaccgcgcgcugacgggcaucgccguggagcaggacaagaacacccaggagguguucgcccaggucaagcagaucuacaagacgcccccgaucaaggacuucgggggcuucaacuucagccagauccugcccgaccccuccaagcccagcaagcgguccuucaucgaggaccuccuguucaacaaggugacccuggccgacgccggcuucaucaagcaguacggggacugccucggcgacaucgcggcccgcgaccugaucugcgcccagaaguucaacgggcugaccgugcucccgccccugcugaccgacgagaugaucgcccaguacaccagcgcccuccuggcgggcaccaucacguccggguggaccuucggcgccggcgccgcccugcagauccccuucgcgaugcagauggccuaccgguucaacgggaucggcgucacccagaacgugcucuacgagaaccagaagcugaucgccaaccaguucaacagcgccaucgggaagauccaggacucccuguucagcaccgccuccgcgcucggcaagcugcaggacguggucaaccagaacgcccaggcccugaacacgcucgugaagcagcugagcuccaacuucggggccaucagcuccgugcugaacgacauccucagccgccuggacaaggucgaggccgaggugcagaucgaccggcugaucaccggccgccuccagucccugcagaccuacgugacccagcagcugauccgggcggccgagauccgcgccagcgccaaccucgccgcgaccaagaugagcgagugcguccugggccaguccaagcggguggacuucugcgggaagggcuaccaccugaugagcuucccccaguccgccccgcacgggguggucuuccuccacgugacguacguccccgcccaggagaagaacuucaccaccgcccccgcgaucugccacgacggcaaggcccacuucccccgcgaggggguguucgugagcaacggcacccacugguucgucacgcagcggaacuucuacgagccgcagaucaucaccaccgacaacaccuucguguccggcaacugcgacguggucaucgggaucgugaacaacacgguguacgacccccugcagcccgagcuggacagcuucaaggaggagcucgacaaguacuucaagaaccacaccucccccgacgucgaccugggcgacaucagcgggaucaacgccuccguggugaacauccagaaggagaucgaccgccugaacgaggucgccaagaaccucaacgagagccugaucgaccugcaggagcucggcaaguacgagcaguacaucaaguggccgugguacaucuggcugggcuucaucgccgggcugaucgcgaucgugauggugaccaucaugcucugcugcaugaccuccugcugcagcugccugaagggcugcugcuccugcgggagcugcugcaaguucgacgaggacgacuccgagcccguccugaagggcgugaagcuccacuacacguga

SEQ ID NO: 11763 - RNA, 3822 nt, Artificial Sequence
  SARS-CoV-2/Finland/FIN-313/2020__EPI_ISL_414641 spike protein CDS gc (1-1273)
auguucguguuccugguccuccugccccuggugagcucccagugcgugaaccucaccacccgcacgcagcugccgcccgccuacaccaacagcuucacccggggcgucuacuaccccgacaagguguuccgcuccagcgugcugcacuccacccaggaccucuuccugcccuucuucagcaacgucacgugguuccacgccauccacguguccgggaccaacggcaccaagcgguucgacaacccggugcugcccuucaacgacggggucuacuucgcgagcaccgagaaguccaacaucauccgcggcuggaucuucgggacgacccucgacagcaagacccagucccugcugaucgugaacaacgccaccaacguggucaucaaggugugcgaguuccaguucugcaacgaccccuuccucggcguguacuaccacaagaacaacaagagcuggauggaguccgaguuccgggucuacagcuccgccaacaacugcacguucgaguacgugagccagcccuuccugauggaccuggagggcaagcaggggaacuucaagaaccuccgcgaguucguguucaagaacaucgacggcuacuucaagaucuacuccaagcacaccccgaucaaccugguccgggaccugccccagggguucagcgcccucgagccccugguggaccugcccaucggcaucaacaucacccgcuucaagacccuccuggcccugcaccgguccuaccucacgccgggggacagcagcuccggcuggaccgcgggcgccgccgccuacuacgugggguaccugcagccccgcaccuuccugcucaaguacaacgagaacggcaccaucacggacgcggucgacugcgcccuggacccccugagcgagaccaagugcacccucaaguccuucaccguggagaaggggaucuaccagacgagcaacuuccgggugcagcccaccgaguccaucguccgcuucccgaacaucaccaaccugugccccuucggcgagguguucaacgccacccgguucgccagcgucuacgccuggaaccgcaagcggaucuccaacugcguggcggacuacagcgugcuguacaacuccgccagcuucuccacguucaagugcuacggcgucagccccaccaagcucaacgaccugugcuucaccaacguguacgccgacuccuucgugauccgcggggacgagguccggcagaucgcccccggccagaccgggaagaucgccgacuacaacuacaagcugccggacgacuucacgggcugcgugaucgcguggaacagcaacaaccucgacuccaaggucgggggcaacuacaacuaccuguaccgccuguuccgcaagagcaaccucaagcccuucgagcgggacaucuccaccgagaucuaccaggccggcagcacccccugcaacgggguggagggcuucaacugcuacuucccccugcaguccuacggguuccagccgaccaacggcgugggguaccagcccuaccggguggucgugcugagcuucgagcuccugcacgcccccgccacggugugcggccccaagaaguccaccaaccuggucaagaacaagugcgugaacuucaacuucaacggccucaccgggaccggcgugcugaccgagagcaacaagaaguuccugccguuccagcaguucgggcgcgacaucgccgacacgaccgacgcgguccgcgacccccagacccuggagauccucgacaucacccccugcagcuucggcgggguguccgugaucacgccgggcaccaacaccagcaaccaggucgccgugcuguaccagggcgugaacugcaccgagguccccguggccauccacgccgaccagcugacgcccaccuggcggguguacuccaccgggagcaacgucuuccagacccgcgccggcugccucaucggggcggagcacgugaacaacuccuacgagugcgacauccccaucggcgccggcaucugcgccagcuaccagacgcagaccaacuccccgcggcgcgcccggagcguggcgucccagagcaucaucgccuacaccaugucccugggggccgagaacagcgucgccuacuccaacaacagcaucgccauccccaccaacuucacgaucuccgugaccaccgagauccugcccgugagcaugaccaagacgagcgucgacugcaccauguacaucugcggcgacuccaccgagugcagcaaccuccugcugcaguacggguccuucugcacccagcucaaccgcgcgcugacgggcaucgccguggagcaggacaagaacacccaggagguguucgcccaggucaagcagaucuacaagacgcccccgaucaaggacuucgggggcuucaacuucagccagauccugcccgaccccuccaagcccagcaagcgguccuucaucgaggaccuccuguucaacaaggugacccuggccgacgccggcuucaucaagcaguacggggacugccucggcgacaucgcggcccgcgaccugaucugcgcccagaaguucaacgggcugaccgugcucccgccccugcugaccgacgagaugaucgcccaguacaccagcgcccuccuggcgggcaccaucacguccggguggaccuucggcgccggcgccgcccugcagauccccuucgcgaugcagauggccuaccgguucaacgggaucggcgucacccagaacgugcucuacgagaaccagaagcugaucgccaaccaguucaacagcgccaucgggaagauccaggacucccugagcuccaccgccagcgcgcucggcaagcugcaggacguggucaaccagaacgcccaggcccugaacacgcucgugaagcagcuguccagcaacuucggggccaucuccagcgugcugaacgacauccucucccgccuggacaaggucgaggccgaggugcagaucgaccggcugaucaccggccgccuccagagccugcagaccuacgugacccagcagcugauccgggcggccgagauccgcgccagcgccaaccucgccgcgaccaagauguccgagugcguccugggccagagcaagcggguggacuucugcgggaagggcuaccaccugauguccuucccccagagcgccccgcacgggguggucuuccuccacgugacguacguccccgcccaggagaagaacuucaccaccgcccccgcgaucugccacgacggcaaggcccacuucccccgcgaggggguguucguguccaacggcacccacugguucgucacgcagcggaacuucuacgagccgcagaucaucaccaccgacaacaccuucgugagcggcaacugcgacguggucaucgggaucgugaacaacacgguguacgacccccugcagcccgagcuggacuccuucaaggaggagcucgacaaguacuucaagaaccacaccagccccgacgucgaccugggcgacaucuccgggaucaacgccagcguggugaacauccagaaggagaucgaccgccugaacgaggucgccaagaaccucaacgagucccugaucgaccugcaggagcucggcaaguacgagcaguacaucaaguggccgugguacaucuggcugggcuucaucgccgggcugaucgcgaucgugauggugaccaucaugcucugcugcaugaccagcugcugcuccugccugaagggcugcugcagcugcggguccugcugcaaguucgacgaggacgacagcgagcccguccugaagggcgugaagcuccacuacacguga

SEQ ID NO: 11764 - RNA, 3822 nt, Artificial Sequence
  SARS-CoV-2/Netherlands/ZuidHolland_2/2020__EPI_ISL_414556 spike protein CDS gc (1-1273)
auguucguguuccugguccuccugccccuggugagcucccagugcgugaaccucaccacccgcacgcagcugccgcccgccuacaccaacagcuucacccggggcgucuacuaccccgacaagguguuccgcuccagcgugcugcacuccacccaggaccucuuccugcccuucuucagcaacgucacgugguuccacgccauccacguguccgggaccaacggcaccaagcgguucgacaacccggugcugcccuucaacgacggggucuacuucgcgagcaccgagaaguccaacaucauccgcggcuggaucuucgggacgacccucgacagcaagacccagucccugcugaucgugaacaacgccaccaacguggucaucaaggugugcgaguuccaguucugcaacgaccccuuccucggcguguacuaccacaagaacaacaagagcuggauggaguccgaguuccgggucuacagcuccgccaacaacugcacguucgaguacgugagccagcccuuccugauggaccuggagggcaagcaggggaacuucaagaaccuccgcgaguucguguucaagaacaucgacggcuacuucaagaucuacuccaagcacaccccgaucaaccugguccgggaccugccccagggguucagcgcccucgagccccugguggaccugcccaucggcaucaacaucacccgcuuccagacccuccuggcccugcaccgguccuaccucacgccgggggacagcagcuccggcuggaccgcgggcgccgccgccuacuacgugggguaccugcagccccgcaccuuccugcucaaguacaacgagaacggcaccaucacggacgcggucgacugcgcccuggacccccugagcgagaccaagugcacccucaaguccuucaccguggagaaggggaucuaccagacgagcaacuuccgggugcagcccaccgaguccaucguccgcuucccgaacaucaccaaccugugccccuucggcgagguguucaacgccacccgguucgccagcgucuacgccuggaaccgcaagcggaucuccaacugcguggcggacuacagcgugcuguacaacuccgccagcuucuccacguucaagugcuacggcgucagccccaccaagcucaacgaccugugcuucaccaacguguacgccgacuccuucgugauccgcggggacgagguccggcagaucgcccccggccagaccgggaagaucgccgacuacaacuacaagcugccggacgacuucacgggcugcgugaucgcguggaacagcaacaaccucgacuccaaggucgggggcaacuacaacuaccuguaccgccuguuccgcaagagcaaccucaagcccuucgagcgggacaucuccaccgagaucuaccaggccggcagcacccccugcaacgggguggagggcuucaacugcuacuucccccugcaguccuacggguuccagccgaccaacggcgugggguaccagcccuaccggguggucgugcugagcuucgagcuccugcacgcccccgccacggugugcggccccaagaaguccaccaaccuggucaagaacaagugcgugaacuucaacuucaacggccucaccgggaccggcgugcugaccgagagcaacaagaaguuccugccguuccagcaguucgggcgcgacaucgccgacacgaccgacgcgguccgcgacccccagacccuggagauccucgacaucacccccugcagcuucggcgggguguccgugaucacgccgggcaccaacaccagcaaccaggucgccgugcuguaccagggcgugaacugcaccgagguccccguggccauccacgccgaccagcugacgcccaccuggcggguguacuccaccgggagcaacgucuuccagacccgcgccggcugccucaucggggcggagcacgugaacaacuccuacgagugcgacauccccaucggcgccggcaucugcgccagcuaccagacgcagaccaacuccccgcggcgcgcccggagcguggcgucccagagcaucaucgccuacaccaugucccugggggccgagaacagcgucgccuacuccaacaacagcaucgccauccccaccaacuucacgaucuccgugaccaccgagauccugcccgugagcaugaccaagacgagcgucgacugcaccauguacaucugcggcgacuccaccgagugcagcaaccuccugcugcaguacggguccuucugcacccagcucaaccgcgcgcugacgggcaucgcccuggagcaggacaagaacacccaggagguguucgcccaggugaagcagaucuacaagacgcccccgaucaaggacuucgggggcuucaacuucagccagauccuccccgaccccuccaagcccagcaagcgguccuucaucgaggaccugcuguucaacaaggucacccucgccgacgccggcuucaucaagcaguacggggacugccugggcgacaucgcggcccgcgaccugaucugcgcccagaaguucaacgggcucaccgugcugccgccccugcucaccgacgagaugaucgcccaguacaccagcgcccugcuggcgggcaccaucacguccggguggaccuucggcgccggcgccgcccuccagauccccuucgcgaugcagauggccuaccgguucaacgggaucggcgugacccagaacguccuguacgagaaccagaagcugaucgccaaccaguucaacagcgccaucgggaagauccaggacucccucagcuccaccgccagcgcgcugggcaagcugcaggacguggugaaccagaacgcccaggcccucaacacgcuggucaagcagcuguccagcaacuucggggccaucuccagcgugcucaacgacauccugucccgccuggacaagguggaggccgagguccagaucgaccggcucaucaccggccgccugcagagccugcagaccuacgugacccagcagcucauccgggcggccgagauccgcgccagcgccaaccuggccgcgaccaagauguccgagugcgugcugggccagagcaagcgggucgacuucugcgggaagggcuaccaccucauguccuucccccagagcgccccgcacggggugguguuccugcacgucacguacgugcccgcccaggagaagaacuucaccaccgcccccgcgaucugccacgacggcaaggcccacuucccccgcgagggggucuucguguccaacggcacccacugguucgugacgcagcggaacuucuacgagccgcagaucaucaccaccgacaacaccuucgucagcggcaacugcgacguggugaucgggaucgucaacaacacgguguacgacccccugcagcccgagcucgacuccuucaaggaggagcuggacaaguacuucaagaaccacaccagccccgacguggaccugggcgacaucuccgggaucaacgccagcgucgugaacauccagaaggagaucgaccgccucaacgagguggccaagaaccugaacgagucccugaucgaccuccaggagcugggcaaguacgagcaguacaucaaguggccgugguacaucuggcugggcuucaucgccgggcucaucgcgaucgucauggugaccaucaugcugugcugcaugaccagcugcugcuccugccugaagggcugcugcagcugcggguccugcugcaaguucgacgaggacgacagcgagcccgugcucaagggcgucaagcugcacuacacguga

SEQ ID NO: 11765 - RNA, 3822 nt, Artificial Sequence
  SARS-CoV-2/USA/WA-UW31/2020__EPI_ISL_414618 spike protein CDS gc (1-1273)
auguucguguuccugguccuccugccccuggugagcucccagugcgugaaccucaccacccgcacgcagcugccgcccgccuacaccaacagcuucacccggggcgucuacuaccccgacaagguguuccgcuccagcgugcugcacuccacccaggaccucuuccugcccuucuucagcaacgucacgugguuccacgccauccacguguccgggaccaacggcaccaagcgguucgacaacccggugcugcccuucaacgacggggucuacuucgcgagcaccgagaaguccaacaucauccgcggcuggaucuucgggacgacccucgacagcaagacccagucccugcugaucgugaacaacgccaccaacguggucaucaaggugugcgaguuccaguucugcaacgaccccuuccucggcguguacuaccacaagaacaacaagagcuggauggaguccgaguuccgggucuacagcuccgccaacaacugcacguucgaguacgugagccagcccuuccugauggaccuggagggcaagcaggggaacuucaagaaccuccgcgaguucguguucaagaacaucgacggcuacuucaagaucuacuccaagcacaccccgaucaaccugguccgggaccugccccagggguucagcgcccucgagccccugguggaccugcccaucggcaucaacaucacccgcuuccagacccuccuggcccugcaccgguccuaccucacgccgggggacagcagcuccggcuggaccgcgggcgccgccgccuacuacgugggguaccugcagccccgcaccuuccugcucaaguacaacgagaacggcaccaucacggacgcggucgacugcgcccuggacccccugagcgagaccaagugcacccucaaguccuucaccguggagaaggggaucuaccagacgagcaacuuccgggugcagcccaccgaguccaucguccgcuucccgaacaucaccaaccugugccccuucggcgagguguucaacgccacccgguucgccagcgucuacgccuggaaccgcaagcggaucuccaacugcguggcggacuacagcgugcuguacaacuccgccagcuucuccacguucaagugcuacggcgucagccccaccaagcucaacgaccugugcuucaccaacguguacgccgacuccuucgugauccgcggggacgagguccggcagaucgcccccggccagaccgggaagaucgccgacuacaacuacaagcugccggacgacuucacgggcugcgugaucgcguggaacagcaacaaccucgacuccaaggucgggggcaacuacaacuaccuguaccgccuguuccgcaagagcaaccucaagcccuucgagcgggacaucuccaccgagaucuaccaggccggcagcacccccugcaacggggccgagggcuucaacugcuacuucccccugcaguccuacggguuccagccgaccaacggcgugggguaccagcccuaccggguggugguccugagcuucgagcuccugcacgcccccgccacggugugcggccccaagaaguccaccaaccuggugaagaacaagugcgucaacuucaacuucaacggccucaccgggaccggcgugcugaccgagagcaacaagaaguuccugccguuccagcaguucgggcgcgacaucgcggacacgaccgacgccgugcgcgacccccagacccuggagauccucgacaucacccccugcagcuucggcggggucuccgugaucacgccgggcaccaacaccagcaaccagguggccguccuguaccaggacgugaacugcaccgaggugcccgucgccauccacgccgaccagcugacgcccaccuggcggguguacuccaccggcagcaacguguuccagacccgcgcggggugccucaucggcgccgagcacgucaacaacuccuacgagugcgacauccccaucggggccggcaucugcgccagcuaccagacgcagaccaacuccccgcggcgcgcgcggagcguggccucccagagcaucaucgccuacaccaugucccugggcgccgagaacagcguggccuacuccaacaacagcaucgcgauccccaccaacuucacgaucuccgucaccaccgagauccugcccgugagcaugaccaagacgagcguggacugcaccauguacaucugcggggacuccaccgagugcagcaaccuccugcugcaguacggcuccuucugcacccagcucaaccgcgcccugacggggaucgccgucgagcaggacaagaacacccaggagguguucgcccaggugaagcagaucuacaagacgcccccgaucaaggacuucggcggguucaacuucagccagauccugcccgaccccuccaagcccagcaagcgguccuucaucgaggaccuccuguucaacaaggucacccuggccgacgcgggcuucaucaagcaguacggcgacugccucggggacaucgccgcccgcgaccugaucugcgcccagaaguucaacggccugaccgugcucccgccccugcugaccgacgagaugaucgcccaguacaccagcgcgcuccuggccgggaccaucacguccggcuggaccuucggggccggcgccgcgcugcagauccccuucgccaugcagauggccuaccgguucaacggcaucggggugacccagaacguccucuacgagaaccagaagcugaucgccaaccaguucaacagcgccaucggcaagauccaggacucccugagcuccaccgcgagcgcccucgggaagcugcaggacguggugaaccagaacgcccaggcccugaacacgcucgucaagcagcuguccagcaacuucggcgccaucuccagcgugcugaacgacauccucucccgccuggacaagguggaggcggagguccagaucgaccggcugaucaccgggcgccuccagagccugcagaccuacgugacccagcagcugauccgggccgccgagauccgcgccagcgccaaccucgcggccaccaagauguccgagugcgugcugggccagagcaagcgggucgacuucugcggcaagggguaccaccugauguccuucccccagagcgccccgcacggcgugguguuccuccacgucacguacgugcccgcccaggagaagaacuucaccaccgcgcccgccaucugccacgacgggaaggcccacuucccccgcgagggcgucuucguguccaacgggacccacugguucgugacgcagcggaacuucuacgagccgcagaucaucaccaccgacaacaccuucgucagcggcaacugcgacguggugaucggcaucgucaacaacacgguguacgacccccugcagcccgagcuggacuccuucaaggaggagcucgacaaguacuucaagaaccacaccagccccgacguggaccugggggacaucuccggcaucaacgccagcgucgugaacauccagaaggagaucgaccgccugaacgagguggccaagaaccucaacgagucccugaucgaccugcaggagcucgggaaguacgagcaguacaucaaguggccgugguacaucuggcugggcuucaucgcgggccugaucgccaucgucauggugaccaucaugcucugcugcaugaccagcugcugcuccugccugaaggggugcugcagcugcggcuccugcugcaaguucgacgaggacgacagcgagcccgugcugaagggggucaagcuccacuacacguga

SEQ ID NO: 11766 - RNA, 3822 nt, Artificial Sequence
  SARS-CoV-2/South Korea/SNU01/2020__EPI_ISL_411929 spike protein CDS gc (1-1273)
auguucguguuccugguccuccugccccuggugagcucccagugcgugaaccucaccacccgcacgcagcugccgcccgccuacaccaacagcuucacccggggcgucuacuaccccgacaagguguuccgcuccagcgugcugcacuccacccaggaccucuuccugcccuucuucagcaacgucacgugguuccacgccauccacguguccgggaccaacggcaccaagcgguucgacaacccggugcugcccuucaacgacggggucuacuucgcgagcaccgagaaguccaacaucauccgcggcuggaucuucgggacgacccucgacagcaagacccagucccugcugaucgugaacaacgccaccaacguggucaucaaggugugcgaguuccaguucugcaacgaccccuuccucggcguguacuaccacaagaacaacaagagcuggauggaguccgaguuccgggucuacagcuccgccaacaacugcacguucgaguacgugagccagcccuuccugauggaccuggagggcaagcaggggaacuucaagaaccuccgcgaguucguguucaagaacaucgacggcuacuucaagaucuacuccaagcacaccccgaucaaccugguccgggaccugccccagggguucugggcccucgagccccugguggaccugcccaucggcaucaacaucacccgcuuccagacccuccuggcccugcaccggagcuaccucacgccgggggacuccagcagcggcuggaccgcgggcgccgccgccuacuacgugggguaccugcagccccgcaccuuccugcucaaguacaacgagaacggcaccaucacggacgcggucgacugcgcccuggacccccuguccgagaccaagugcacccucaagagcuucaccguggagaaggggaucuaccagacguccaacuuccgggugcagcccaccgagagcaucguccgcuucccgaacaucaccaaccugugccccuucggcgagguguucaacgccacccgguucgccuccgucuacgccuggaaccgcaagcggaucagcaacugcguggcggacuacuccgugcuguacaacagcgccuccuucagcacguucaagugcuacggcgucucccccaccaagcucaacgaccugugcuucaccaacguguacgccgacagcuucgugauccgcggggacgagguccggcagaucgcccccggccagaccgggaagaucgccgacuacaacuacaagcugccggacgacuucacgggcugcgugaucgcguggaacuccaacaaccucgacagcaaggucgggggcaacuacaacuaccuguaccgccuguuccggaaguccaaccucaagcccuucgagcgcgacaucagcaccgagaucuaccaggccggcuccacccccugcaacgggguggagggcuucaacugcuacuucccccugcagagcuacggguuccagccgaccaacggcgugggguaccagcccuaccggguggucgugcuguccuucgagcuccugcacgcccccgccacggugugcggccccaagaaguccaccaaccuggucaagaacaagugcgugaacuucaacuucaacggccucaccgggaccggcgugcugaccgagagcaacaagaaguuccugccguuccagcaguucgggcgcgacaucgccgacacgaccgacgcgguccgcgacccccagacccuggagauccucgacaucacccccugcagcuucggcggggugagcgugaucacgccgggcaccaacaccuccaaccaggucgccgugcuguaccaggacgugaacugcaccgagguccccguggccauccacgccgaccagcugacgcccaccuggcggguguacagcaccggcuccaacgucuuccagacccgcgccgggugccucaucggcgcggagcacgugaacaacagcuacgagugcgacauccccaucggggccggcaucugcgccuccuaccagacgcagaccaacagcccgcggcgcgcccgguccguggcgagccaguccaucaucgccuacaccaugagccugggcgccgagaacuccgucgccuacagcaacaacuccaucgccauccccaccaacuucacgaucagcgugaccaccgagauccugcccguguccaugaccaagacgagcgucgacugcaccauguacaucugcggggacagcaccgagugcuccaaccuccugcugcaguacggcagcuucugcacccagcucaaccgcgcgcugacggggaucgccguggagcaggacaagaacacccaggagguguucgcccaggucaagcagaucuacaagacgcccccgaucaaggacuucggcggguucaacuucucccagauccugcccgaccccagcaagcccuccaagcggagcuucaucgaggaccuccuguucaacaaggugacccuggccgacgccggcuucaucaagcaguacggcgacugccucggggacaucgcggcccgcgaccugaucugcgcccagaaguucaacggccugaccgugcucccgccccugcugaccgacgagaugaucgcccaguacaccuccgcccuccuggcggggaccaucacgagcggcuggaccuucggggccggcgccgcccugcagauccccuucgcgaugcagauggccuaccgguucaacggcaucggggucacccagaacgugcucuacgagaaccagaagcugaucgccaaccaguucaacuccgccaucggcaagauccaggacagccuguccagcaccgccuccgcgcucgggaagcugcaggacguggucaaccagaacgcccaggcccugaacacgcucgugaagcagcugagcuccaacuucggcgccaucagcuccgugcugaacgacauccucagccgccuggacaaggucgaggccgaggugcagaucgaccggcugaucaccgggcgccuccagucccugcagaccuacgugacccagcagcugauccgggcggccgagauccgcgccagcgccaaccucgccgcgaccaagaugagcgagugcguccugggccaguccaagcggguggacuucugcggcaagggguaccaccugaugagcuucccccaguccgccccgcacggcguggucuuccuccacgugacguacguccccgcccaggagaagaacuucaccaccgcccccgcgaucugccacgacgggaaggcccacuucccccgcgagggcguguucgugagcaacgggacccacugguucgucacgcagcggaacuucuacgagccgcagaucaucaccaccgacaacaccuucguguccggcaacugcgacguggucaucggcaucgugaacaacacgguguacgacccccugcagcccgagcuggacagcuucaaggaggagcucgacaaguacuucaagaaccacaccucccccgacgucgaccugggggacaucagcggcaucaacgccuccguggugaacauccagaaggagaucgaccgccugaacgaggucgccaagaaccucaacgagagccugaucgaccugcaggagcucgggaaguacgagcaguacaucaaguggccgugguacaucuggcugggcuucaucgccggccugaucgcgaucgugauggugaccaucaugcucugcugcaugaccuccugcugcagcugccugaaggggugcugcuccugcggcagcugcugcaaguucgacgaggacgacuccgagcccguccugaagggggugaagcuccacuacacguga

SEQ ID NO: 11767 - RNA, 3822 nt, Artificial Sequence
  SARS-CoV-2/China/WF0004/2020__EPI_ISL_413694 spike protein CDS gc (1-1273)
auguucguguuccugguccuccugccccuggugagcucccagugcgugaaccucaccacccgcacgcagcugccgcccgccuacaccaacagcuucacccggggcgucuacuaccccgacaagguguuccgcuccagcgugcugcacuccacccaggaccucuuccugcccuucuucagcaacgucacgugguuccacgccauccacguguccgggaccaacggcaccaagcgguucgacaacccggugcugcccuucaacgacggggucuacuucgcgagcaccgagaaguccaacaucauccgcggcuggaucuucgggacgacccucgacagcaagacccagucccugcugaucgugaacaacgccaccaacguggucaucaaggugugcgaguuccaguucugcaacgaccccuuccucggcguguacuaccacaagaacaacaagagcuggacggaguccgaguuccgggucuacagcuccgccaacaacugcaccuucgaguacgugagccagcccuuccugauggaccuggagggcaagcaggggaacuucaagaaccuccgcgaguucguguucaagaacaucgacggcuacuucaagaucuacuccaagcacaccccgaucaaccugguccgggaccugccccagggguucagcgcccucgagccccugguggaccugcccaucggcaucaacaucacccgcuuccagacgcuccuggcccugcaccgguccuaccucaccccgggggacagcagcuccggcuggaccgcgggcgccgccgccuacuacgugggguaccugcagccccgcaccuuccugcucaaguacaacgagaacggcacgaucaccgacgcggucgacugcgcccuggacccccugagcgagaccaagugcacccucaaguccuucacgguggagaaggggaucuaccagaccagcaacuuccgggugcagcccaccgaguccaucguccgcuucccgaacaucaccaaccugugccccuucggcgagguguucaacgccacgcgguucgccagcgucuacgccuggaaccgcaagcggaucuccaacugcguggcggacuacagcgugcuguacaacuccgccagcuucuccaccuucaagugcuacggcgucagccccaccaagcucaacgaccugugcuucaccaacguguacgccgacuccuucgugauccgcggggacgagguccggcagaucgcccccggccagacggggaagaucgccgacuacaacuacaagcugccggacgacuucaccggcugcgugaucgcguggaacagcaacaaccucgacuccaaggucgggggcaacuacaacuaccuguaccgccuguuccgcaagagcaaccucaagcccuucgagcgggacaucuccaccgagaucuaccaggccggcagcacccccugcaacgggguggagggcuucaacugcuacuucccccugcaguccuacggguuccagccgacgaacggcgugggguaccagcccuaccggguggucgugcugagcuucgagcuccugcacgcccccgccaccgugugcggccccaagaaguccaccaaccuggucaagaacaagugcgugaacuucaacuucaacggccucaccgggaccggcgugcugacggagagcaacaagaaguuccugccguuccagcaguucgggcgcgacaucgccgacaccaccgacgcgguccgcgacccccagacccuggagauccucgacaucacgcccugcagcuucggcgggguguccgugaucaccccgggcaccaacaccagcaaccaggucgccgugcuguaccaggacgugaacugcacggagguccccguggccauccacgccgaccagcugacccccaccuggcggguguacuccaccggcagcaacgucuuccagacgcgcgccgggugccucaucggcgcggagcacgugaacaacuccuacgagugcgacauccccaucggggccggcaucugcgccagcuaccagacccagaccaacuccccgcggcgcgcccggagcguggcgucccagagcaucaucgccuacaccaugucccugggcgccgagaacagcgucgccuacuccaacaacagcaucgccauccccacgaacuucaccaucuccgugaccaccgagauccugcccgugagcaugacgaagaccagcgucgacugcaccauguacaucugcggggacuccaccgagugcagcaaccuccugcugcaguacggcuccuucugcacgcagcucaaccgcgcgcugaccgggaucgccguggagcaggacaagaacacccaggagguguucgcccaggucaagcagaucuacaagacgcccccgaucaaggacuucggcggguucaacuucagccagauccugcccgaccccuccaagcccagcaagcgguccuucaucgaggaccuccuguucaacaaggugacccuggccgacgccggcuucaucaagcaguacggcgacugccucggggacaucgcggcccgcgaccugaucugcgcccagaaguucaacggccugaccgugcucccgccccugcugaccgacgagaugaucgcccaguacaccagcgcccuccuggcggggacgaucaccuccggcuggaccuucggggccggcgccgcccugcagauccccuucgcgaugcagauggccuaccgguucaacggcaucggggucacccagaacgugcucuacgagaaccagaagcugaucgccaaccaguucaacagcgccaucggcaagauccaggacucccugagcuccacggccagcgcgcucgggaagcugcaggacguggucaaccagaacgcccaggcccugaacacccucgugaagcagcuguccagcaacuucggcgccaucuccagcgugcugaacgacauccucucccgccuggacaaggucgaggccgaggugcagaucgaccggcugaucaccgggcgccuccagagccugcagaccuacgugacccagcagcugauccgggcggccgagauccgcgccagcgccaaccucgccgcgacgaagauguccgagugcguccugggccagagcaagcgguucgacuucugcggcaagggguaccaccugauguccuucccccagagcgccccgcacggcgugguguuccuccacgucaccuacgugcccgcccaggagaagaacuucaccaccgcccccgcgaucugccacgacgggaaggcccacuucccccgcgagggcgucuucguguccaacgggacgcacugguucgugacccagcggaacuucuacgagccgcagaucaucaccaccgacaacacguucgucagcggcaacugcgacguggugaucggcaucgucaacaacaccguguacgacccccugcagcccgagcuggacuccuucaaggaggagcucgacaaguacuucaagaaccacaccagccccgacguggaccugggggacaucuccggcaucaacgccagcgucgugaacauccagaaggagaucgaccgccugaacgagguggccaagaaccucaacgagucccugaucgaccugcaggagcucgggaaguacgagcaguacaucaaguggccgugguacaucuggcugggcuucaucgccggccugaucgcgaucgucauggugaccaucaugcucugcugcaugacgagcugcugcuccugccugaaggggugcugcagcugcggcuccugcugcaaguucgacgaggacgacagcgagcccgugcugaagggggucaagcuccacuacaccuga

SEQ ID NO: 11768 - RNA, 3822 nt, Artificial Sequence
  SARS-CoV-2/China/WF0028/2020__EPI_ISL_413791 spike protein CDS gc (1-1273)
auguucguguuccugguccuccugccccuggugagcucccagugcgugaaccucaccacccgcacgcagcugccgcccgccuacaccaacagcuucacccggggcgucuacuaccccgacaagguguuccgcuccagcgugcugcacuccacccaggaccucuuccugcccuucuucagcaacgucacgugguuccacgccauccacguguccgggaccaacggcaccaagcgguucgacaacccggugcugcccuucaacgacggggucuacuucgcgagcaccgagaaguccaacaucauccgcggcuggaucuucgggacgacccucgacagcaagacccagucccugcugaucgugaacaacgccaccaacguggucaucaaggugugcgaguuccaguucugcaacgaccccuuccucggcguguacuaccacaagaacaacaagagcuggauggaguccgaguuccgggucuacagcuccgccaacaacugcacguucgaguacgugagccagcccuuccugauggaccuggagggcaagcaggggaacuucaagaaccuccgcgaguucguguucaagaacaucgacggcuacuucaagaucuacuccaagcacaccccgaucaaccugguccgggaccugccccagggguucagcgcccucgagccccugguggaccugcccaucggcaucaacaucacccgcuuccagacccuccuggcccugcaccgguccuaccucacgccgggggacagcagcuccggcuggaccgcgggcgccgccgccuacuacgugggguaccugcagccccgcaccuuccugcucaaguacaacgagaacggcaccaucacggacgcggucgacugcgcccuggacccccugagcgagaccaagugcacccucaaguccuucaccguggagaaggggaucuaccagacgagcaacuuccgggugcagcccaccgaguccaucguccgcuucccgaacaucaccaaccugugccccuucggcgagguguucaacgccacccgguucgccagcgucuacgccuggaaccgcaagcggaucuccaacugcguggcggacuacagcgugcuguacaacuccgccagcuucuccacguucaagugcuacggcgucagccccaccaagcucaacgaccugugcuucaccaacguguacgccgacuccuucgugauccgcggggacgagguccggcagaucgcccccggccagaccgggaagaucgccgacuacaacuacaagcugccggacgacuucacgggcugcgugaucgcguggaacagcaacaaccucgacuccaaggucgggggcaacuacaacuaccuguaccgccuguuccgcaagagcaaccucaagcccuucgagcgggacaucuccaccgagaucuaccaggccggcagcacccccugcaacgggguggagggcuucaacugcuacuucccccugcaguccuacggguuccagccgaccaacggcgugggguaccagcccuaccggguggucgugcugagcuucgagcuccugcacgcccccgccacggugugcggccccaagaaguccaccaaccuggucaagaacaagugcgugaacuucaacuucaacggccucaccgggaccggcgugcugaccgagagcaacaagaaguuccugccguuccagcaguucgggcgcgacaucgccgacacgaccgacgcgguccgcgacccccagacccuggagauccucgacaucacccccugcagcuucggcgggguguccgugaucacgccgggcaccaacaccagcaaccaggucgccgugcuguaccaggacgugaacugcaccgagguccccguggccauccacgccgaccagcugacgcccaccuggcggguguacuccaccggcagcaacgucuuccagacccgcgccgggugccucaucggcgcggagcacgugaacaacuccuacgagugcgacauccccaucggggccggcaucugcgccagcuaccagacgcagaccaacuccccgcggcgcgcccggagcguggcgucccagagcaucaucgccuacaccaugucccugggcgccgagaacagcgucgccuacuccaacaacagcaucgccauccccaccaacuucacgaucuccgugaccaccgagauccugcccgugagcaugaccaagacgagcgucgacugcaccauguacaucugcggggacuccaccgagugcagcaaccuccugcugcaguacggcuccuucugcacccagcucaaccgcgcgcugacggggaucgccguggagcaggacaagaacacccaggagguguucgcccaggucaagcagaucuacaagacgcccccgaucaaggacuucggcggguucaacuucagccagauccugcccgaccccuccaagcccagcaagcgguccuucaucgaggaccuccuguucaacaaggugacccuggccgacgccggcuucaucaagcaguacggcgacugccucggggacaucgcggcccgcgaccugaucugcgcccagaaguucaacggccugaccgugcucccgccccugcugaccgacgagaugaucgcccaguacaccagcgcccuccuggcggggaccaucacguccggcuggaccuucggggccggcgccgcccugcagauccccuucgcgaugcagauggccuaccgguucaacggcaucggggucacccagaacgugcucuacgagaaccagaagcugaucgccaaccaguucaacagcgccaucggcaagauccaggacucccugagcuccaccgccagcgcgcucgggaagcugcaggacguggucaaccagaacgcccaggcccugaacacgcucgugaagcagcuguccagcaacuucggcgccaucuccagcgugcugaacgacauccucucccgccuggacaaggucgaggccgaggugcagaucgaccggcugaucaccgggcgccuccagagccugcagaccuacgugacccagcagcugauccgggcggccgagauccgcgccagcgccaaccucgccgcgaccaagauguccgagugcguccugggccagagcaagcggguggacuucugcggcaagggguaccaccugauguccuucccccagagcgccccgcacggcguggucuuccuccacgugacguacguccccgcccaggagaagaacuucaccaccgcccccgcgaucugccacgacgggaaggcccacuucccccgcgagggcguguucguguccaacgggacccacugguucgucacgcagcggaacuucuacgagccgcagaucaucaccaccgacaacaccuucgugagcggcaacugcgacguggucaucggcaucgugaacaacacgguguacgacccccugcagcccgagcuggaguccuucaaggaggagcucgacaaguacuucaagaaccacaccagccccgacgucgaccugggggacaucuccggcaucaacgccagcguggugaacauccagaaggagaucgaccgccugaacgaggucgccaagaaccucaacgagucccugaucgaccugcaggagcucgggaaguacgagcaguacaucaaguggccgugguacaucuggcugggcuucaucgccggccugaucgcgaucgugauggugaccaucaugcucugcugcaugaccagcugcugcuccugccugaaggggugcugcagcugcggcuccugcugcaaguucgacgaggacgacagcgagcccguccugaagggggugaagcuccacuacacguga

SEQ ID NO: 11769 - RNA, 3822 nt, Artificial Sequence
  SARS-CoV-2/2019-nCoV/USA-CruiseA-18/2020__MT159716.1 spike protein CDS gc (1-1273)
auguucguguuccugguccuccugccccuggugagcucccagugcgugaaccucaccacccgcacgcagcugccgcccgccuacaccaacagcuucacccggggcgucuacuaccccgacaagguguuccgcuccagcgugcugcacuccacccaggaccucuuccugcccuucuucagcaacgucacgugguuccacgccauccacguguccgggaccaacggcaccaagcgguucgacaacccggugcugcccuucaacgacggggucuacuucgcgagcaccgagaaguccaacaucauccgcggcuggaucuucgggacgacccucgacagcaagacccagucccugcugaucgugaacaacgccaccaacguggucaucaaggugugcgaguuccaguucugcaacgaccccuuccucggcguguacuaccacaagaacaacaagagcuggauggaguccgagcugcgggucuacagcuccgccaacaacugcacguucgaguacgugagccagcccuuccugauggaccucgagggcaagcaggggaacuucaagaaccugcgcgaguucguguucaagaacaucgacggcuacuucaagaucuacuccaagcacaccccgaucaaccugguccgggaccucccccagggguucagcgcccuggagccccugguggaccuccccaucggcaucaacaucacccgcuuccagacccugcuggcccuccaccgguccuaccugacgccgggggacagcagcuccggcuggaccgcgggcgccgccgccuacuacgugggguaccugcagccccgcaccuuccuccugaaguacaacgagaacggcaccaucacggacgcggucgacugcgcccuggacccccucagcgagaccaagugcacccugaaguccuucaccguggagaaggggaucuaccagacgagcaacuuccgggugcagcccaccgaguccaucguccgcuucccgaacaucaccaaccugugccccuucggcgagguguucaacgccacccgguucgccagcgucuacgccuggaaccgcaagcggaucuccaacugcguggcggacuacagcgugcucuacaacuccgccagcuucuccacguucaagugcuacggcgucagccccaccaagcugaacgaccugugcuucaccaacguguacgccgacuccuucgugauccgcggggacgagguccggcagaucgcccccggccagaccgggaagaucgccgacuacaacuacaagcucccggacgacuucacgggcugcgugaucgcguggaacagcaacaaccuggacuccaaggucgggggcaacuacaacuaccuguaccgccucuuccgcaagagcaaccugaagcccuucgagcgggacaucuccaccgagaucuaccaggccggcagcacccccugcaacgggguggagggcuucaacugcuacuucccccugcaguccuacggguuccagccgaccaacggcgugggguaccagcccuaccggguggucgugcucagcuucgagcugcugcacgcccccgccacggugugcggccccaagaaguccaccaaccucgucaagaacaagugcgugaacuucaacuucaacggccugaccgggaccggcgugcugaccgagagcaacaagaaguuccugccguuccagcaguucgggcgcgacaucgccgacacgaccgacgcgguccgcgacccccagacccucgagauccuggacaucacccccugcagcuucggcgggguguccgugaucacgccgggcaccaacaccagcaaccaggucgccgugcuguaccaggacgugaacugcaccgagguccccguggccauccacgccgaccagcucacgcccaccuggcggguguacuccaccggcagcaacgucuuccagacccgcgccgggugccugaucggcgcggagcacgugaacaacuccuacgagugcgacauccccaucggggccggcaucugcgccagcuaccagacgcagaccaacuccccgcggcgcgcccggagcguggcgucccagagcaucaucgccuacaccaugucccugggcgccgagaacagcgucgccuacuccaacaacagcaucgccauccccaccaacuucacgaucuccgugaccaccgagauccuccccgugagcaugaccaagacgagcgucgacugcaccauguacaucugcggggacuccaccgagugcagcaaccugcugcuccaguacggcuccuucugcacccagcugaaccgcgcgcugacggggaucgccguggagcaggacaagaacacccaggagguguucgcccaggucaagcagaucuacaagacgcccccgaucaaggacuucggcggguucaacuucagccagauccuccccgaccccuccaagcccagcaagcgguccuucaucgaggaccugcuguucaacaaggugacccucgccgacgccggcuucaucaagcaguacggcgacugccugggggacaucgcggcccgcgaccugaucugcgcccagaaguucaacggccucaccgugcugccgccccugcucaccgacgagaugaucgcccaguacaccagcgcccugcuggcggggaccaucacguccggcuggaccuucggggccggcgccgcccuccagauccccuucgcgaugcagauggccuaccgguucaacggcaucggggucacccagaacgugcuguacgagaaccagaagcugaucgccaaccaguucaacagcgccaucggcaagauccaggacucccucagcuccaccgccagcgcgcuggggaagcugcaggacguggucaaccagaacgcccaggcccucaacacgcuggugaagcagcuguccagcaacuucggcgccaucuccagcgugcucaacgacauccugucccgccuggacaaggucgaggccgaggugcagaucgaccggcucaucaccgggcgccugcagagccugcagaccuacgugacccagcagcucauccgggcggccgagauccgcgccagcgccaaccuggccgcgaccaagauguccgagugcguccugggccagagcaagcggguggacuucugcggcaagggguaccaccucauguccuucccccagagcgccccgcacggcguggucuuccugcacgugacguacguccccgcccaggagaagaacuucaccaccgcccccgcgaucugccacgacgggaaggcccacuucccccgcgagggcguguucguguccaacgggacccacugguucgucacgcagcggaacuucuacgagccgcagaucaucaccaccgacaacaccuucgugagcggcaacugcgacguggucaucggcaucgugaacaacacgguguacgacccccugcagcccgagcucgacuccuucaaggaggagcuggacaaguacuucaagaaccacaccagccccgacgucgaccugggggacaucuccggcaucaacgccagcguggugaacauccagaaggagaucgaccgccucaacgaggucgccaagaaccugaacgagucccugaucgaccuccaggagcuggggaaguacgagcaguacaucaaguggccgugguacaucuggcugggcuucaucgccggccucaucgcgaucgugauggugaccaucaugcugugcugcaugaccagcugcugcuccugccugaaggggugcugcagcugcggcuccugcugcaaguucgacgaggacgacagcgagcccguccucaagggggugaagcugcacuacacguga

SEQ ID NO: 11770 - RNA, 3822 nt, Artificial Sequence
  SARS-CoV-2/SARS-CoV-2/Yunnan-01/human/2020/CHN__MT049951.1 spike protein CDS gc (1-1273)
auguucguguuccugguccuccugccccuggugagcucccagugcgugaaccucaccacccgcacgcagcugccgcccgccaacaccaacagcuucacccggggcgucuacuaccccgacaagguguuccgcuccagcgugcugcacuccacccaggaccucuuccugcccuucuucagcaacgucacgugguuccacgccauccacguguccgggaccaacggcaccaagcgguucgacaacccggugcugcccuucaacgacggggucuacuucgcgagcaccgagaaguccaacaucauccgcggcuggaucuucgggacgacccucgacagcaagacccagucccugcugaucgugaacaacgccaccaacguggucaucaaggugugcgaguuccaguucugcaacgaccccuuccucggcguguacuaccacaagaacaacaagagcuggauggaguccgaguuccgggucuacagcuccgccaacaacugcacguucgaguacgugagccagcccuuccugauggaccuggagggcaagcaggggaacuucaagaaccuccgcgaguucguguucaagaacaucgacggcuacuucaagaucuacuccaagcacaccccgaucaaccugguccgggaccugccccagggguucagcgcccucgagccccugguggaccugcccaucggcaucaacaucacccgcuuccagacccuccuggcccugcaccgguccuaccucacgccgggggacagcagcuccggcuggaccgcgggcgccgccgccuacuacgugggguaccugcagccccgcaccuuccugcucaaguacaacgagaacggcaccaucacggacgcggucgacugcgcccuggacccccugagcgagaccaagugcacccucaaguccuucaccguggagaaggggaucuaccagacgagcaacuuccgggugcagcccaccgaguccaucguccgcuucccgaacaucaccaaccugugccccuucggcgagguguucaacgccacccgguucgccagcgucuacgccuggaaccgcaagcggaucuccaacugcguggcggacuacagcgugcuguacaacuccgccagcuucuccacguucaagugcuacggcgucagccccaccaagcucaacgaccugugcuucaccaacguguacgccgacuccuucgugauccgcggggacgagguccggcagaucgcccccggccagaccgggaagaucgccgacuacaacuacaagcugccggacgacuucacgggcugcgugaucgcguggaacagcaacaaccucgacuccaaggucgggggcaacuacaacuaccuguaccgccuguuccgcaagagcaaccucaagcccuucgagcgggacaucuccaccgagaucuaccaggccggcagcacccccugcaacgggguggagggcuucaacugcuacuucccccugcaguccuacggguuccagccgaccaacggcgugggguaccagcccuaccggguggucgugcugagcuucgagcuccugcacgcccccgccacggugugcggccccaagaaguccaccaaccuggucaagaacaagugcgugaacuucaacuucaacggccucaccgggaccggcgugcugaccgagagcaacaagaaguuccugccguuccagcaguucgggcgcgacaucgccgacacgaccgacgcgguccgcgacccccagacccuggagauccucgacaucacccccugcagcuucggcgggguguccgugaucacgccgggcaccaacaccagcaaccaggucgccgugcuguaccaggacgugaacugcaccgagguccccguggccauccacgccgaccagcugacgcccaccuggcggguguacuccaccggcagcaacgucuuccagacccgcgccgggugccucaucggcgcggagcacgugaacaacuccuacgagugcgacauccccaucggggccggcaucugcgccagcuaccagacgcagaccaacuccccgcggcgcgcccggagcguggcgucccagagcaucaucgccuacaccaugucccugggcgccgagaacagcgucgccuacuccaacaacagcaucgccauccccaccaacuucacgaucuccgugaccaccgagauccugcccgugagcaugaccaagacgagcgucgacugcaccauguacaucugcggggacuccaccgagugcagcaaccuccugcugcaguacggcuccuucugcacccagcucaaccgcgcgcugacggggaucgccguggagcaggacaagaacacccaggagguguucgcccaggucaagcagaucuacaagacgcccccgaucaaggacuucggcggguucaacuucagccagauccugcccgaccccuccaagcccagcaagcgguccuucaucgaggaccuccuguucaacaaggugacccuggccgacgccggcuucaucaagcaguacggcgacugccucggggacaucgcggcccgcgaccugaucugcgcccagaaguucaacggccugaccgugcucccgccccugcugaccgacgagaugaucgcccaguacaccagcgcccuccuggcggggaccaucacguccggcuggaccuucggggccggcgccgcccugcagauccccuucgcgaugcagauggccuaccgguucaacggcaucggggucacccagaacgugcucuacgagaaccagaagcugaucgccaaccaguucaacagcgccaucggcaagauccaggacucccugagcuccaccgccagcgcgcucgggaagcugcaggacguggucaaccagaacgcccaggcccugaacacgcucgugaagcagcuguccagcaacuucggcgccaucuccagcgugcugaacgacauccucucccgccuggacaaggucgaggccgaggugcagaucgaccggcugaucaccgggcgccuccagagccugcagaccuacgugacccagcagcugauccgggcggccgagauccgcgccagcgccaaccucgccgcgaccaagauguccgagugcguccugggccagagcaagcggguggacuucugcggcaagggguaccaccugauguccuucccccagagcgccccgcacggcguggucuuccuccacgugacguacguccccgcccaggagaagaacuucaccaccgcccccgcgaucugccacgacgggaaggcccacuucccccgcgagggcguguucguguccaacgggacccacugguucgucacgcagcggaacuucuacgagccgcagaucaucaccaccgacaacaccuucgugagcggcaacugcgacguggucaucggcaucgugaacaacacgguguacgacccccugcagcccgagcuggacuccuucaaggaggagcucgacaaguacuucaagaaccacaccagccccgacgucgaccugggggacaucuccggcaucaacgccagcguggugaacauccagaaggagaucgaccgccugaacgaggucgccaagaaccucaacgagucccugaucgaccugcaggagcucgggaaguacgagcaguacaucaaguggccgugguacaucuggcugggcuucaucgccggccugaucgcgaucgugauggugaccaucaugcucugcugcaugaccagcugcugcuccugccugaaggggugcugcagcugcggcuccugcugcaaguucgacgaggacgacagcgagcccguccugaagggggugaagcuccacuacacguga

SEQ ID NO: 11771 - RNA, 3822 nt, Artificial Sequence
  SARS-CoV-2/USA/WA-UW292/2020__EPI_ISL_418077 spike protein CDS gc (1-1273)
auguucguguuccugguccuccugccccuggugagcucccagugcgugaaccucaccacccgcacgcagcugccgcccgccuacaccaacagcuucacccggggcgucuacuaccccgacaagguguuccgcuccagcgugcugcacuccacccaggaccucuuccugcccuucuucagcaacgucacgugguuccacgccauccacguguccgggaccaacggcaccaagcgguucgacaacccggugcugcccuucaacgacggggucuacuucgcgagcaccgagaaguccaacaucauccgcggcuggaucuucgggacgacccucgacagcaagacccagucccugcugaucgugaacaacgccaccaacguggucaucaaggugugcgaguuccaguucugcaacgaccccuuccucggcguguacuaccacaagaacaacaagagcuggauggaguccgaguuccgggucuacagcuccgccaacaacugcacguucgaguacgugagccagcccuuccugauggaccuggagggcaagcaggggaacuucaagaaccuccgcgaguucguguucaagaacaucgacggcuacuucaagaucuacuccaagcacaccccgaucaaccugguccgggaccugccccagggguucagcgcccucgagccccugguggaccugcccaucggcaucaacaucacccgcuuccagacccuccuggcccugcaccgguccuaccucacgccgggggacagcagcuccggcuggaccgcgggcgccgccgccuacuacgugggguaccugcagccccgcaccuuccugcucaaguacaacgagaacggcaccaucacggacgcggucgacugcgcccuggacccccugagcgagaccaagugcacccucaaguccuucaccguggagaaggggaucuaccagacgagcaacuuccgggugcagcccaccgaguccaucguccgcuucccgaacaucaccaaccugugccccuucggcgagguguucaacgccacccgguucgccagcgucuacgccuggaaccgcaagcggaucuccaacugcguggcggacuacagcgugcuguacaacuccgccagcuucuccacguucaagugcuacggcgucagccccaccaagcucaacgaccugugcuucaccaacguguacgccgacuccuucgugauccgcggggacgagguccggcagaucgcccccggccagaccgggaagaucgccgacuacaacuacaagcugccggacgacuucacgggcugcgugaucgcguggaacagcaacaaccucgacuccaaggucgggggcaacuacaacuaccuguaccgccuguuccgcaagagcaaccucaagcccuucgagcgggacaucuccaccgagaucuaccaggccagcuccacccccugcaacggcguggagggguucaacugcuacuucccccugcagagcuacggcuuccagccgaccaacggggugggcuaccagcccuaccggguggucgugcugagcuucgagcuccugcacgcccccgccacggugugcgggcccaagaaguccaccaaccuggucaagaacaagugcgugaacuucaacuucaacggccucaccggcaccggggugcugaccgagagcaacaagaaguuccugccguuccagcaguucggccgcgacaucgccgacacgaccgacgcgguccgcgacccccagacccuggagauccucgacaucacccccugcuccuucgggggcgugagcgugaucacgccggggaccaacaccuccaaccaggucgccgugcuguaccaggacgugaacugcaccgagguccccguggccauccacgccgaccagcugacgcccaccuggcggguguacagcaccggcuccaacgucuuccagacccgcgccggcugccucaucggggcggagcacgugaacaacagcuacgagugcgacauccccaucggcgccgggaucugcgccuccuaccagacgcagaccaacagcccgcggcgcgcccgguccguggcgagccaguccaucaucgccuacaccaugagccugggcgccgagaacuccgucgccuacagcaacaacuccaucgccauccccaccaacuucacgaucagcgugaccaccgagauccugcccgugagcaugaccaagacguccgucgacugcaccauguacaucugcggcgacagcaccgagugcuccaaccuccugcugcaguacgggagcuucugcacccagcucaaccgcgcgcugacgggcaucgccguggagcaggacaagaacacccaggagguguucgcccaggucaagcagaucuacaagacgcccccgaucaaggacuucgggggcuucaacuucucccagauccugcccgaccccagcaagcccuccaagcggagcuucaucgaggaccuccuguucaacaaggugacccuggccgacgccggguucaucaagcaguacggcgacugccucggcgacaucgcggcccgcgaccugaucugcgcccagaaguucaacgggcugaccgugcucccgccccugcugaccgacgagaugaucgcccaguacaccuccgcccuccuggcgggcaccaucacgagcggguggaccuucggcgccggggccgcccugcagauccccuucgcgaugcagauggccuaccgguucaacggcaucggcgucacccagaacgugcucuacgagaaccagaagcugaucgccaaccaguucaacuccgccaucgggaagauccaggacagccuguccagcaccgccuccgcgcucggcaagcugcaggacguggucaaccagaacgcccaggcccugaacacgcucgugaagcagcugagcuccaacuucggggccaucagcuccgugcugaacgacauccucagccgccuggacaaggucgaggccgaggugcagaucgaccggcugaucaccggccgccuccagagccugcagaccuacgugacccagcagcugauccgggcggccgagauccgcgccuccgccaaccucgccgcgaccaagaugagcgagugcguccuggggcaguccaagcggguggacuucugcggcaagggcuaccaccugaugagcuucccccaguccgccccgcacgggguggucuuccuccacgugacguacguccccgcccaggagaagaacuucaccaccgcccccgcgaucugccacgacggcaaggcccacuucccccgcgaggggguguucgugagcaacggcacccacugguucgucacgcagcggaacuucuacgagccgcagaucaucaccaccgacaacaccuucguguccgggaacugcgacguggucaucggcaucgugaacaacacgguguacgacccccugcagcccgagcuggacagcuucaaggaggagcucgacaaguacuucaagaaccacaccucccccgacgucgaccugggcgacaucagcgggaucaacgccuccguggugaacauccagaaggagaucgaccgccugaacgaggucgccaagaaccucaacgagagccugaucgaccugcaggagcucggcaaguacgagcaguacaucaaguggccgugguacaucuggcugggguucaucgccggccugaucgcgaucgugauggugaccaucaugcucugcugcaugaccuccugcugcagcugccugaagggcugcugcuccugcgggagcugcugcaaguucgacgaggacgacuccgagcccguccugaagggcgugaagcuccacuacacguga

SEQ ID NO: 11772 - RNA, 3822 nt, Artificial Sequence
  SARS-CoV-2/Iceland/192/2020__EPI_ISL_417819 spike protein CDS gc (1-1273)
auguucguguucuucguccugcucccccuggugagcucccagugcgugaaccugaccacccgcacgcagcucccgcccgccuacaccaacagcuucacccggggcgucuacuaccccgacaagguguuccgcuccagcgugcugcacuccacccaggaccuguuccuccccuucuucagcaacgucacgugguuccacgccauccacguguccgggaccaacggcaccaagcgguucgacaacccggugcugcccuucaacgacggggucuacuucgcgagcaccgagaaguccaacaucauccgcggcuggaucuucgggacgacccuggacagcaagacccagucccuccugaucgugaacaacgccaccaacguggucaucaaggugugcgaguuccaguucugcaacgaccccuuccugggcguguacuaccacaagaacaacaagagcuggauggaguccgaguuccgggucuacagcuccgccaacaacugcacguucgaguacgugagccagcccuuccucauggaccuggagggcaagcaggggaacuucaagaaccugcgcgaguucguguucaagaacaucgacggcuacuucaagaucuacuccaagcacaccccgaucaaccucguccgggaccugccccagggguucagcgcccuggagccccucguggaccugcccaucggcaucaacaucacccgcuuccagacccugcucgcccugcaccgguccuaccugacgccgggggacagcagcuccggcuggaccgcgggcgccgccgccuacuacgugggguaccuccagccccgcaccuuccugcugaaguacaacgagaacggcaccaucacggacgcggucgacugcgcccucgacccccugagcgagaccaagugcacccugaaguccuucaccguggagaaggggaucuaccagacgagcaacuuccgggugcagcccaccgaguccaucguccgcuucccgaacaucaccaaccucugccccuucggcgagguguucaacgccacccgguucgccagcgucuacgccuggaaccgcaagcggaucuccaacugcguggcggacuacagcgugcuguacaacuccgccagcuucuccacguucaagugcuacggcgucagccccaccaagcugaacgaccucugcuucaccaacguguacgccgacuccuucgugauccgcggggacgagguccggcagaucgcccccggccagaccgggaagaucgccgacuacaacuacaagcugccggacgacuucacgggcugcgugaucgcguggaacagcaacaaccuggacuccaaggucgggggcaacuacaacuaccucuaccgccuguuccgcaagagcaaccugaagcccuucgagcgggacaucuccaccgagaucuaccaggccggcagcacccccugcaacgggguggagggcuucaacugcuacuucccccuccaguccuacggguuccagccgaccaacggcgugggguaccagcccuaccggguggucgugcugagcuucgagcugcuccacgcccccgccacggugugcggccccaagaaguccaccaaccuggucaagaacaagugcgugaacuucaacuucaacggccugaccgggaccggcgugcucaccgagagcaacaagaaguuccugccguuccagcaguucgggcgcgacaucgccgacacgaccgacgcgguccgcgacccccagacccuggagauccuggacaucacccccugcagcuucggcgggguguccgugaucacgccgggcaccaacaccagcaaccaggucgccgugcucuaccagggcgugaacugcaccgagguccccguggccauccacgccgaccagcugacgcccaccuggcggguguacuccaccgggagcaacgucuuccagacccgcgccggcugccugaucggggcggagcacgugaacaacuccuacgagugcgacauccccaucggcgccggcaucugcgccagcuaccagacgcagaccaacuccccgcggcgcgcccggagcguggcgucccagagcaucaucgccuacaccaugucccucggggccgagaacagcgucgccuacuccaacaacagcaucgccauccccaccaacuucacgaucuccgugaccaccgagauccugcccgugagcaugaccaagacgagcgucgacugcaccauguacaucugcggcgacuccaccgagugcagcaaccugcuccugcaguacggguccuucugcacccagcugaaccgcgcgcucacgggcaucgccguggagcaggacaagaacacccaggagguguucgcccaggucaagcagaucuacaagacgcccccgaucaaggacuucgggggcuucaacuucagccagauccugcccgaccccuccaagcccagcaagcgguccuucaucgaggaccuccuguucaacaaggugacccuggccgacgccggcuucaucaagcaguacggggacugccugggcgacaucgcggcccgcgaccucaucugcgcccagaaguucaacgggcugaccgugcugccgccccuccugaccgacgagaugaucgcccaguacaccagcgcccugcucgcgggcaccaucacguccggguggaccuucggcgccggcgccgcccugcagauccccuucgcgaugcagauggccuaccgguucaacgggaucggcgucacccagaacgugcuguacgagaaccagaagcucaucgccaaccaguucaacagcgccaucgggaagauccaggacucccugagcuccaccgccagcgcgcugggcaagcuccaggacguggucaaccagaacgcccaggcccugaacacgcuggugaagcagcucuccagcaacuucggggccaucuccagcgugcugaacgacauccugucccgccucgacaaggucgaggccgaggugcagaucgaccggcugaucaccggccgccugcagagccuccagaccuacgugacccagcagcugauccgggcggccgagauccgcgccagcgccaaccuggccgcgaccaagauguccgagugcguccucggccagagcaagcggguggacuucugcgggaagggcuaccaccugauguccuucccccagagcgccccgcacgggguggucuuccugcacgugacguacguccccgcccaggagaagaacuucaccaccgcccccgcgaucugccacgacggcaaggcccacuucccccgcgaggggguguucguguccaacggcacccacugguucgucacgcagcggaacuucuacgagccgcagaucaucaccaccgacaacaccuucgugagcggcaacugcgacguggucaucgggaucgugaacaacacgguguacgacccccuccagcccgagcuggacuccuucaaggaggagcuggacaaguacuucaagaaccacaccagccccgacgucgaccucggcgacaucuccgggaucaacgccagcguggugaacauccagaaggagaucgaccgccugaacgaggucgccaagaaccugaacgagucccucaucgaccugcaggagcugggcaaguacgagcaguacaucaaguggccgugguacaucuggcucggcuucaucgccgggcugaucgcgaucgugauggugaccaucaugcugugcugcaugaccagcugcugcuccugccucaagggcugcugcagcugcggguccugcugcaaguucgacgaggacgacagcgagcccguccugaagggcgugaagcugcacuacacguga

SEQ ID NO: 11773 - RNA, 3822 nt, Artificial Sequence
  SARS-CoV-2/Belgium/ULG-6939/2020__EPI_ISL_417020 spike protein CDS gc (1-1273)
auguucguguuccugguccuccugccccuggugagcucccagugcgugaaccucaccacccgcacgcagcugccgcccgccuacaccaacagcuucacccggggcgucuacuaccccgacaagguguuccgcuccagcgugcugcacuccacccaggaccucuuccugcccuucuucagcaacgucacgugguuccacgccauccacguguccgggaccaacggcaccaagcgguucgacaacccggugcugcccuucaacgacggggucuacuucgcgagcaccgagaaguccaacaucauccgcggcuggaucuucgggacgacccucgacagcaagacccagucccugcugaucgugaacaacgccaccaacguggucaucaaggugugcgaguuccaguucugcaacgaccccuuccucggcguguacuaccacaagaacaacaagagcuggauggaguccgaguuccgggucuacagcuccgccaacaacugcacguucgaguacgugagccagcccuuccugauggaccuggagggcaagcaggggaacuucaagaaccuccgcgaguucguguucaagaacaucgacggcuacuucaagaucuacuccaagcacaccccgaucaaccugguccgggaccugccccagggguucagcgcccucgagccccugguggaccugcccaucggcaucaacaucacccgcuuccagacccuccuggcccugcaccgguccuaccucacgccgggggacagcagcuccggcuggaccgcgggcgccgccgccuacuacgugggguaccugcagccccgcaccuuccugcucaaguacaacgagaacggcaccaucacggacgcggucgacugcgcccuggacccccugagcgagaccaagugcacccucaaguccuucaccguggagaaggggaucuaccagacgagcaacuuccgggugcagcccaccgaguccaucguccgcuucccgaacaucaccaaccugugccccuucggcgagguguucaacgccacccgguucgccagcgucuacgccuggaaccgcaagcggaucuccaacugcguggcggacuacagcgugcuguacaacuccgccagcuucuccacguucaagugcuacggcgucagccccaccaagcucaacgaccugugcuucaccaacguguacgccgacuccuucgugauccgcggggacgagguccggcagaucgcccccggccagaccgggaagaucgccgacuacaacuacaagcugccggacgacuucacgggcugcgugaucgcguggaacagcaacaaccucgacuccaaggucgggggcaacuacaacuaccuguaccgccuguuccgcaagagcaaccucaagcccuucgagcgggacaucuccaccgagaucuaccaggccggcagcacccccugcaacgggguggagggcuucaacugcuacuucccccugcaguccuacggguuccagccgaccaacggcgugggguaccagcccuaccggguggucgugcugagcuucgagcuccugcacgcccccgccacggugugcggccccaagaaguccaccaaccuggucaagaacaagugcgugaacuucaacuucaacggccucaccgggaccggcgugcugaccgagagcaacaagaaguuccugccguuccagcaguucgggcgcgacaucgccgacacgaccgacgcgguccgcgacccccagacccuggagauccucgacaucacccccugcagcuucggcgggguguccgugaucacgccgggcaccaacaccagcaaccaggucgccgugcuguaccagggcgugaacugcaccgagguccccguggccauccacgccgaccagcugacgcccaccuggcggguguacuccaccgggagcaacgucuuccagacccgcgccggcugccucaucggggcggagcacgugaacaacuccuacgagugcgacauccccaucggcgccggcaucugcgccagcuaccagacgcagaccaacuccccgcggcgcgcccggagcguggcgucccagagcaucaucgccuacaccaugucccugggggccgagaacagcgucguguacuccaacaacagcaucgccauccccaccaacuucacgaucuccgugaccaccgagauccugcccgucagcaugaccaagacgagcguggacugcaccauguacaucugcggcgacuccaccgagugcagcaaccuccugcugcaguacggguccuucugcacccagcucaaccgcgcccugacgggcaucgcgguggagcaggacaagaacacccaggaggucuucgcccaggugaagcagaucuacaagacgcccccgaucaaggacuucgggggcuucaacuucagccagauccugcccgaccccuccaagcccagcaagcgguccuucaucgaggaccuccuguucaacaaggugacccuggccgacgccggcuucaucaagcaguacggggacugccucggcgacaucgccgcgcgcgaccugaucugcgcccagaaguucaacgggcugaccguccucccgccccugcugaccgacgagaugaucgcccaguacaccagcgcccuccuggccggcaccaucacguccggguggaccuucggcgcgggcgccgcccugcagauccccuucgccaugcagauggcguaccgguucaacgggaucggcgugacccagaacgugcucuacgagaaccagaagcugaucgccaaccaguucaacagcgccaucgggaagauccaggacucccugagcuccaccgccagcgcccucggcaagcugcaggacgucgugaaccagaacgcgcaggcccugaacacgcucgugaagcagcuguccagcaacuucggggccaucuccagcguccugaacgacauccucucccgccuggacaagguggaggccgaggugcagaucgaccggcugaucaccggccgccuccagagccugcagaccuacgucacccagcagcugauccgggccgcggagauccgcgccagcgccaaccucgccgccaccaagauguccgagugcgugcugggccagagcaagcggguggacuucugcgggaagggcuaccaccugauguccuucccccagagcgcgccgcacggggucguguuccuccacgucacguacgugcccgcccaggagaagaacuucaccaccgcccccgccaucugccacgacggcaaggcgcacuucccccgcgaggggguguucgucuccaacggcacccacugguucgugacgcagcggaacuucuacgagccgcagaucaucaccaccgacaacaccuucgugagcggcaacugcgacgucgugaucgggaucgugaacaacacggucuacgacccccugcagcccgagcuggacuccuucaaggaggagcucgacaaguacuucaagaaccacaccagccccgacguggaccugggcgacaucuccgggaucaacgccagcguggucaacauccagaaggagaucgaccgccugaacgagguggccaagaaccucaacgagucccugaucgaccugcaggagcucggcaaguacgagcaguacaucaaguggccgugguacaucuggcugggcuucaucgccgggcugaucgccaucgugauggucaccaucaugcucugcugcaugaccagcugcugcuccugccugaagggcugcugcagcugcggguccugcugcaaguucgacgaggacgacagcgagcccgugcugaagggcgugaagcuccacuacacguga

SEQ ID NO: 11774 - RNA, 3822 nt, Artificial Sequence
  SARS-CoV-2/France/HF2496/2020__EPI_ISL_418231 spike protein CDS gc (1-1273)
auguucguguuccugguccuccugccccuggugagcucccagugcgugaaccucaccacccgcacgcagcugccgcccgccuacaccaacagcuucacccggggcgucuacuaccccgacaagguguuccgcuccagcgugcugcacuccacccaggaccucuuccugcccuucuucagcaacgucacgugguuccacgccauccacguguccgggaccaacggcaccaagcgguucgacaacccggugcugcccuucaacgacggggucuacuucgcgagcaccgagaaguccaacaucauccgcggcuggaucuucgggacgacccucgacagcaagacccagucccugcugaucgugaacaacgccaccaacguggucaucaaggugugcgaguuccaguucugcaacgaccccuuccucggcguguacuaccacaagaacaacaagagcuggauggaguccgaguuccgggucuacagcuccgccaacaacugcacguucgaguacgugagccagcccuuccugauggaccuggagggcaagcaggggaacuucaagaaccuccgcgaguucguguucaagaacaucgacggcuacuucaagaucuacuccaagcacaccccgaucaaccugguccgggaccugccccagggguucagcgcccucgagccccugguggaccugcccaucggcaucaacaucacccgcuuccagacccuccuggcccugcaccgguccuaccucacgccgggggacagcagcuccggcuggaccgcgggcgccgccgccuacuacgugggguaccugcagccccgcaccuuccugcucaaguacaacgagaacggcaccaucacggacgcggucgacugcgcccuggacccccugagcgagaccaagugcacccucaaguccuucaccguggagaaggggaucuaccagacgagcaacuuccgggugcagcccaccgaguccaucguccgcuucccgaacaucaccaaccugugccccuucggcgagguguucaacgccacccgguucgccagcgucuacgccuggaaccgcaagcggaucuccaacugcguggcggacuacagcgugcuguacaacuccgccagcuucuccacguucaagugcuacggcgucagccccaccaagcucaacgaccugugcuucaccaacguguacgccgacuccuucgugauccgcggggacgagguccggcagaucgcccccggccagaccgggaagaucgccgacuacaacuacaagcugccggacgacuucacgggcugcgugaucgcguggaacagcaacaaccucgacuccaaggucgggggcaacuacaacuaccuguaccgccuguuccgcaagagcaaccucaagcccuucgagcgggacaucuccaccgagaucuaccaggccggcagcacccccugcaacgggguggagggcuucaacugcuacuucccccugcaguccuacggguuccagccgaccaacggcgugggguaccagcccuaccggguggucgugcugagcuucgagcuccugcacgcccccgccacggugugcggccccaagaaguccaccaaccuggucaagaacaagugcgugaacuucaacuucaacggccucaccgggaccggcgugcugaccgagagcaacaagaaguuccugccguuccagcaguucgggcgcgacaucgccgacacgaccgacgcgguccgcgacccccagacccuggagauccucgacaucacccccugcagcuucggcgggguguccgugaucacgccgggcaccaacaccagcaaccaggucgccgugcuguaccagggcgugaacugcaccgagguccccguggccauccacgccgaccagcugacgcccaccuggcggguguacuccaccgggagcaacgucuuccagacccgcgccggcugccucaucggggcggagcacgugaacaacuccuacgagugcgacauccccaucggcgccggcaucugcgccagcuaccagacgcagaccaacuccccgcggcgcgcccggagcguggcgucccagagcaucaucgccuacaccaugucccugggggccgagaacagcgucgccuacuccaacaacagcaucgccauccccaccaacuucacgaucuccgugaccaccgagauccugcccgugagcaugaccaagacgagcgucgacugcaccauguacaucugcggcgacuccaccgagugcagcaaccuccugcugcaguacggguccuucugcacccagcucaaccgcgcgcugacgggcaucgccguggagcaggacaagaacacccaggagguguucgcccaggucaagcagaucuacaagacgcccccgaucaaggacuucgggggcuucaacuucagccagauccugcccgaccccuccaagcccagcaagcgguccuucaucgaggaccuccuguucaacaaggugacccuggccgacgccggcuucaucaagcaguacggggacugccucggcgacaucguggcgcgcgaccugaucugcgcccagaaguucaacgggcugaccguccucccgccccugcugaccgacgagaugaucgcccaguacaccagcgcccuccuggccggcaccaucacguccggguggaccuucggcgcgggcgccgcccugcagauccccuucgccaugcagauggcguaccgguucaacgggaucggcgugacccagaacgugcucuacgagaaccagaagcugaucgccaaccaguucaacagcgccaucgggaagauccaggacucccugagcuccaccgccagcgcccucggcaagcugcaggacgucgugaaccagaacgcgcaggcccugaacacgcucgugaagcagcuguccagcaacuucggggccaucuccagcguccugaacgacauccucucccgccuggacaagguggaggccgaggugcagaucgaccggcugaucaccggccgccuccagagccugcagaccuacgucacccagcagcugauccgggccgcggagauccgcgccagcgccaaccucgccgccaccaagauguccgagugcgugcugggccagagcaagcggguggacuucugcgggaagggcuaccaccugauguccuucccccagagcgcgccgcacggggucguguuccuccacgucacguacgugcccgcccaggagaagaacuucaccaccgcccccgccaucugccacgacggcaaggcgcacuucccccgcgaggggguguucgucuccaacggcacccacugguucgugacgcagcggaacuucuacgagccgcagaucaucaccaccgacaacaccuucgugagcggcaacugcgacgucgugaucgggaucgugaacaacacggucuacgacccccugcagcccgagcuggacuccuucaaggaggagcucgacaaguacuucaagaaccacaccagccccgacguggaccugggcgacaucuccgggaucaacgccagcguggucaacauccagaaggagaucgaccgccugaacgagguggccaagaaccucaacgagucccugaucgaccugcaggagcucggcaaguacgagcaguacaucaaguggccgugguacaucuggcugggcuucaucgccgggcugaucgccaucgugauggucaccaucaugcucugcugcaugaccagcugcugcuccugccugaagggcugcugcagcugcggguccugcugcaaguucgacgaggacgacagcgagcccgugcugaagggcgugaagcuccacuacacguga

SEQ ID NO: 11775 - RNA, 3822 nt, Artificial Sequence
  SARS-CoV-2/USA/WA-UW291/2020__EPI_ISL_418076 spike protein CDS gc (1-1273)
auguucguguuccugguccuccugccccuggugagcucccagugcgugaaccucaccacccgcacgcagcugccgcccgccuacaccaacagcuucacccggggcgucuacuaccccgacaagguguuccgcuccagcgugcugcacuccacccaggaccucuuccugcccuucuucagcaacgucacgugguuccacgccauccacguguccgggaccaacggcaccaagcgguucgacaacccggugcugcccuucaacgacggggucuacuucgcgagcaccgagaaguccaacaucauccgcggcuggaucuucgggacgacccucgacagcaagacccagucccugcugaucgugaacaacgccaccaacguggucaucaaggugugcgaguuccaguucugcaacgaccccuuccucggcguguacuaccacaagaacaacaagagcuggauggaguccgaguuccgggucuacagcuccgccaacaacugcacguucgaguacgugagccagcccuuccugauggaccuggagggcaagcaggggaacuucaagaaccuccgcgaguucguguucaagaacaucgacggcuacuucaagaucuacuccaagcacaccccgaucaaccugguccgggaccugccccagggguucagcgcccucgagccccugguggaccugcccaucggcaucaacaucacccgcuuccagacccuccuggcccugcaccgguccuaccucacgccgggggacagcagcuccggcuggaccgcgggcgccgccgccuacuacgugggguaccugcagccccgcaccuuccugcucaaguacaacgagaacggcaccaucacggacgcggucgacugcgcccuggacccccugagcgagaccaagugcacccucaaguccuucaccguggagaaggggaucuaccagacgagcaacuuccgggugcagcccaccgaguccaucguccgcuucccgaacaucaccaaccugugccccuucggcgagguguucaacgccacccgguucgccagcgucuacgccuggaaccgcaagcggaucuccaacugcguggcggacuacagcgugcuguacaacuccgccagcuucuccacguucaagugcuacggcgucagccccaccaagcucaacgaccugugcuucaccaacguguacgccgacuccuucgugauccgcggggacgagguccggcagaucgcccccggccagaccgggaagaucgccgacuacaacuacaagcugccggacgacuucacgggcugcgugaucgcguggaacagcaacaaccucgacuccaaggucgggggcaacuacaacuaccuguaccgccuguuccgcaagagcaaccucaagcccuucgagcgggacaucuccaccgagaucuaccaggccggcagcacccccugcaacgggguggagggcuucaacugcuacuucccccugcaguccuacggguuccagccgaccaacggcgugggguaccagcccuaccggguggucgugcugagcuucgagcuccugcacgcccccgccacggugugcggccccaagaaguccaccaaccuggucaagaacaagugcgugaacuucaacuucaacggccucaccgggaccggcgugcugaccgagagcaacaagaaguuccugccguuccagcaguucgggcgcgacaucgccgacacgaccgacgcgguccgcgacccccagacccuggagauccucgacaucacccccugcagcuucggcgggguguccgugaucacgccgggcaccaacaccagcaaccaggucgccgugcuguaccagggcgugaacugcaccgagguccccguggccauccacgccgaccagcugacgcccaccuggcggguguacuccaccgggagcaacgucuuccagacccgcgccggcugccucaucggggcggagcacgugaacaacuccuacgagugcgacauccccaucggcgccggcaucugcgccagcuaccagacgcagaccaacuccccgcggcgcgcccggagcguggcgucccagagcaucaucgccuacaccaugucccugggggccgagaacagcgucgccuacuccaacaacagcaucgccauccccaccaacuucacgaucuccgugaccaccgagauccugcccgugagcaugaccaagacgagcgucgacugcaccauguacaucugcggcgacuccaccgagugcagcaaccuccugcugcaguacggguccuucugcacccagcucaaccgcgcgcugacgggcaucgccguggagcaggacaagaacacccaggagguguucgcccaggucaagcagaucuacaagacgcccccgaucaaggacuucgggggcuucaacuucagccagauccugcccgaccccuccaagcccagcaagcgguccuucaucgaggaccuccuguucaacaaggugacccuggccgacgccggcuucaucaagcaguacggggacugccucggcgacaucgcggcccgcgaccugaucugcgcccagaaguucaacgggcugaccgugcucccgccccugcugaccgacgagaugaucgcccaguacaccagcgcccuccuggcgggcaccaucacguccggguggaccuucggcgccggcgccgcccugcagauccccuucgcgaugcagauggccuaccgguucaacgggaucggcgucacccagaacgugcucuacgagaaccagaagcugaucgccaaccaguucaacagcgccaucgggaagauccaguacucccugagcuccaccgccagcgcgcucggcaagcugcaggacguggucaaccagaacgcccaggcccugaacacgcucgugaagcagcuguccagcaacuucggggccaucuccagcgugcugaacgacauccucucccgccuggacaaggucgaggccgaggugcagaucgaccggcugaucaccggccgccuccagagccugcagaccuacgugacccagcagcugauccgggcggccgagauccgcgccagcgccaaccucgccgcgaccaagauguccgagugcguccugggccagagcaagcggguggacuucugcgggaagggcuaccaccugauguccuucccccagagcgccccgcacgggguggucuuccuccacgugacguacguccccgcccaggagaagaacuucaccaccgcccccgcgaucugccacgacggcaaggcccacuucccccgcgaggggguguucguguccaacggcacccacugguucgucacgcagcggaacuucuacgagccgcagaucaucaccaccgacaacaccuucgugagcggcaacugcgacguggucaucgggaucgugaacaacacgguguacgacccccugcagcccgagcuggacuccuucaaggaggagcucgacaaguacuucaagaaccacaccagccccgacgucgaccugggcgacaucuccgggaucaacgccagcguggugaacauccagaaggagaucgaccgccugaacgaggucgccaagaaccucaacgagucccugaucgaccugcaggagcucggcaaguacgagcaguacaucaaguggccgugguacaucuggcugggcuucaucgccgggcugaucgcgaucgugauggugaccaucaugcucugcugcaugaccagcugcugcuccugccugaagggcugcugcagcugcggguccugcugcaaguucgacgaggacgacagcgagcccguccugaagggcgugaagcuccacuacacguga

SEQ ID NO: 11776 - RNA, 3822 nt, Artificial Sequence
  SARS-CoV-2/Portugal/PT0034/2020__EPI_ISL_418019 spike protein CDS gc (1-1273)
auguucguguuccugguccuccugccccuggugagcucccagugcgugaaccucaccacccgcacgcagcugccgcccgccuacaccaacagcuucacccggggcgucuacuaccccgacaagguguuccgcuccagcgugcugcacuccacccaggaccucuuccugcccuucuucagcaacgucacgugguuccacgccauccacguguccgggaccaacggcaccaagcgguucgacaacccggugcugcccuucaacgacggggucuacuucgcgagcaccgagaaguccaacaucauccgcggcuggaucuucgggacgacccucgacagcaagacccagucccugcugaucgugaacaacgccaccaacguggucaucaaggugugcgaguuccaguucugcaacgaccccuuccucggcguguacuaccacaagaacaacaagagcuggauggaguccgaguuccgggucuacagcuccgccaacaacugcacguucgaguacgugagccagcccuuccugauggaccuggagggcaagcaggggaacuucaagaaccuccgcgaguucguguucaagaacaucgacggcuacuucaagaucuacuccaagcacaccccgaucaaccugguccgggaccugccccagggguucagcgcccucgagccccugguggaccugcccaucggcaucaacaucacccgcuuccagacccuccuggcccugcaccgguccuaccucacgccgggggacagcagcuccggcuggaccgcgggcgccgccgccuacuacgugggguaccugcagccccgcaccuuccugcucaaguacaacgagaacggcaccaucacggacgcggucgacugcgcccuggacccccugagcgagaccaagugcacccucaaguccuucaccguggagaaggggaucuaccagacgagcaacuuccgggugcagcccaccgaguccaucguccgcuucccgaacaucaccaaccugugccccuucggcgagguguucaacgccacccgguucgccagcgucuacgccuggaaccgcaagcggaucuccaacugcguggcggacuacagcgugcuguacaacuccgccagcuucuccacguucaagugcuacggcgucagccccaccaagcucaacgaccugugcuucaccaacguguacgccgacuccuucgugauccgcggggacgagguccggcagaucgcccccggccagaccgggaagaucgccgacuacaacuacaagcugccggacgacuucacgggcugcgugaucgcguggaacagcaacaaccucgacuccaaggucgggggcaacuacaacuaccuguaccgccuguuccgcaagagcaaccucaagcccuucgagcgggacaucuccaccgagaucuaccaggccggcagcacccccugcaacgggguggagggcuucaacugcuacuucccccugcaguccuacggguuccagccgaccaacggcgugggguaccagcccuaccggguggucgugcugagcuucgagcuccugcacgcccccgccacggugugcggccccaagaaguccaccaaccuggucaagaacaagugcgugaacuucaacuucaacggccucaccgggaccggcgugcugaccgagagcaacaagaaguuccugccguuccagcaguucgggcgcgacaucgccgacacgaccgacgcgguccgcgacccccagacccuggagauccucgacaucacccccugcagcuucggcgggguguccgugaucacgccgggcaccaacaccagcaaccaggucgccgugcuguaccagggcgugaacugcaccgagguccccguggccauccacgccgaccagcugacgcccaccuggcggguguacuccaccgggagcaacgucuuccagacccgcgccggcugccucaucggggcggagcacgugaacaacuccuacgagugcgacauccccaucggcgccggcaucugcgccagcuaccagacgcagaccaacuccccgcggcgcgcccggagcguggcgucccagagcaucaucgccuacaccaugucccugggggccgagaacagcgucgccuacuccaacaacagcaucgccauccccaccaacuucacgaucuccgugaccaccgagauccugcccgugagcaugaccaagacgagcgucgacugcaccauguacaucugcggcgacuccaccgagugcagcaaccuccugcugcaguacggguccuucugcacccagcucaaccgcgcgcugacgggcaucgccguggagcaggacaagaacacccaggagguguucgcccaggucaagcagaucuacaagacgcccccgaucaaggacuucgggggcuucaacuucagccagauccugcccgaccccuccaagcccagcaagcgguccuucaucgaggaccuccuguucaacaaggugacccuggccgacgccggcuucaucaagcaguacggggacugccucggcgacaucgcggcccgcgaccugaucugcgcccagaaguucaacgggcugaccgugcucccgccccugcugaccgacgagaugaucgcccaguacaccagcgcccuccuggcgggcaccaucacguccggguggaccuucggcgccggcgccgcccugcagauccccuucgcgaugcagauggccuaccgguucaacgggaucggcgucacccagaacgugcucuacgagaaccagaagcugaucgccaaccaguucaacagcgccaucgggaagauccaggacucccugagcuccaccgccagcgcgcucggcaagcugcaggacguggucaaccagaacgcccaggcccugaacacgcucgugaagcagcuguccagcaacuucggggccaucuccagcgugcugaacgacauccucucccgccuggacaaggucgaggccgaggugcagaucgaccggcugaucaccggccgccuccagagccugcagaccuacgugacccagcagcugauccgggcggccgagauccgcgccagcgccaaccucgccgcgaccaagauguccgagugcguccugggccagagcaagcggguggacuucugcgggaagggcuaccaccugauguccuucccccagagcgccccgcacgggguggucuuccuccacgugacguacguccccgcccaggagaagaacuucaccaccgcccccgcgaucugccacgacggcaaggcccacuucccccgcgaggggguguucguguccaacggcacccacugguucgucacgcagcggaacuucuacgagccgcagaucaucaccaccgacaacaccuucgugagcggcaacugcgacguggucaucgggaucgugaacaacacgguguacgacccccugcagcccgagcuggacuccuucaaggaggagcucgacaaguacuucaagaaccacaccagccccgacgucgaccugggcgacaucuccgggaucaacgccagcguggugaacauccagaaggagaucgaccgccugaacgaggucgccaagaaccucaacgagucccugaucgaccugcaggagcucggcaaguacgagcaguacaucaaguggccgugguacaucuggcugggcuucaucgccgggcugaucgcgaucgugauggugaccaucaugcucugcugcaucaccagcugcugcuccugccugaagggcugcugcagcugcggguccugcugcaaguucgacgaggacgacagcgagcccguccugaagggcgugaagcuccacuacacguga

SEQ ID NO: 11777 - RNA, 3822 nt, Artificial Sequence
  SARS-CoV-2/Iceland/202/2020__EPI_ISL_417750 spike protein CDS gc (1-1273)
auguucguguuccugguccuccugccccuggugagcucccagugcgugaaccucaccacccgcacgcagcugccgcccgccuacaccaacagcuucacccggggcgucuacuaccccgacaagguguuccgcuccagcgugcugcacuccacccaggaccucuuccugcccuucuucagcaacgucacgugguuccacgccauccacguguccgggaccaacggcaccaagcgguucgacaacccggugcugcccuucaacgacggggucuacuucgcgagcaccgagaaguccaacaucauccgcggcuggaucuucgggacgacccucgacagcaagacccagucccugcugaucgugaacaacgccaccaacguggucaucaaggugugcgaguuccaguucugcaacgaccccuuccucggcguguacuaccacaagaacaacaagagcuggauggaguccgaguuccgggucuacagcuccgccaacaacugcacguucgaguacgugagccagcccuuccugauggaccuggagggcaagcaggggaacuucaagaaccuccgcgaguucguguucaagaacaucgacggcuacuucaagaucuacuccaagcacaccccgaucaaccugguccgggaccugccccagggguucagcgcccucgagccccugguggaccugcccaucggcaucaacaucacccgcuuccagacccuccuggcccugcaccgguccuaccucacgccgggggacagcagcuccggcuggaccgcgggcgccgccgccuacuacgugggguaccugcagccccgcaccuuccugcucaaguacaacgagaacggcaccaucacggacgcggucgacugcgcccuggacccccugagcgagaccaagugcacccucaaguccuucaccguggagaaggggaucuaccagacgagcaacuuccgggugcagcccaccgaguccaucguccgcuucccgaacaucaccaaccugugccccuucggcgagguguucaacgccacccgguucgccagcgucuacgccuggaaccgcaagcggaucuccaacugcguggcggacuacagcgugcuguacaacuccgccagcuucuccacguucaagugcuacggcgucagccccaccaagcucaacgaccugugcuucaccaacguguacgccgacuccuucgugauccgcggggacgagguccggcagaucgcccccggccagaccgggaagaucgccgacuacaacuacaagcugccggacgacuucacgggcugcgugaucgcguggaacagcaacaaccucgacuccaaggucgggggcaacuacaacuaccuguaccgccuguuccgcaagagcaaccucaagcccuucgagcgggacaucuccaccgagaucuaccaggccggcagcacccccugcaacgggguggagggcuucaacugcuacuucccccugcaguccuacggguuccagccgaccaacggcgugggguaccagcccuaccggguggucgugcugagcuucgagcuccugcacgcccccgccacggugugcggccccaagaaguccaccaaccuggucaagaacaagugcgugaacuucaacuucaacggccucaccgggaccggcgugcugaccgagagcaacaagaaguuccugccguuccagcaguucgggcgcgacaucgccgacacgaccgacgcgguccgcgacccccagacccuggagauccucgacaucacccccugcagcuucggcgggguguccgugaucacgccgggcaccaacaccagcaaccaggucgccgugcuguaccaggacgugaacugcaccgagguccccguggccauccacgccgaccagcugacgcccaccuggcggguguacuccaccggcagcaacgucuuccagacccgcgccgggugccucaucggcgcggagcacgugaacaacuccuacgagugcgacauccccaucggggccggcaucugcgccagcuaccagacgcagaccaacuccccgcggcgcgcccggagcguggcgucccagagcaucaucgccuacaccaugucccugggcgccgagaacagcgucgccuacuccaacaacagcaucgccauccccaccaacuucacgaucuccgugaccaccgagauccugcccgugagcaugaccaagacgagcgucgacugcaccauguacaucugcggggacuccaccgagugcagcaaccuccugcugcaguacggcuccuucugcacccagcucaaccgcgcgcugacggggaucgccguggagcaggacaagaacacccaggagguguucgcccaggucaagcagaucuacaagacgcccccgaucaaggacuucggcggguucaacuucagccagauccugcccgaccccuccaagcccagcaagcgguccuucaucgaggaccuccuguucaacaaggugacccuggccgacgccggcuucaucaagcaguacggcgacugccucggggacaucgcggcccgcgaccugaucugcgcccagaaguucaacggccugaccgugcucccgccccugcugaccgacgagaugaucgcccaguacaccagcgcccuccuggcggggaccaucacguccggcuggaccuucggggccggcgccgcccugcagauccccuucgcgaugcagauggccuaccgguucaacggcaucggggucacccagaacgugcucuacgagaaccagaagcugaucgccaaccaguucaacagcgccaucggcaagauccaggacucccugagcuccaccgccagcgcgcucgggaagcugcaggacguggucaaccagaacgcccaggcccugaacacgcucgugaagcagcuguccagcaacuucggcgccaucuccagcgugcugaacgacauccucucccgccuggacaaggucgaggccgaggugcagaucgaccggcugaucaccgggcgccuccagagccugcagaccuacgugacccagcagcugauccgggcggccgagauccgcgccagcgccaaccucgccgcgaccaagauguccgagugcguccugggccagagcaagcggguggacuucugcggcaagggguaccaccugauguccuucccccagagcgccccgcacggcguggucuuccuccacgugacguacguccccgcccaggagaagaacuucaccaccgcccccgcgaucugccacgacgggaaggcccacuucccccgcgagggcguguucguguccaacgggacccacugguucgucacgcagcggaacuucuacgagccgcagaucaucaccaccgacaacaccuucgugagcggcaacugcgacguggucaucggcaucgugaacaacacgguguacgacccccugcagcccgagcuggacuccuucaaggaggagcucgacaaguacuucaagaaccacaccagccccgacgucgaccugggggacaucccgggcaucaacgccuccguggugaacauccagaaggagaucgaccgccugaacgaggucgccaagaaccucaacgagagccugaucgaccugcaggagcucgggaaguacgagcaguacaucaaguggcccugguacaucuggcugggcuucaucgccggccugaucgcgaucgugauggugaccaucaugcucugcugcaugaccuccugcugcagcugccugaaggggugcugcuccugcggcagcugcugcaaguucgacgaggacgacuccgagcccguccugaagggggugaagcuccacuacacguga

SEQ ID NO: 11778 - RNA, 3822 nt, Artificial Sequence
  SARS-CoV-2/USA/WA-UW261/2020__EPI_ISL_418046 spike protein CDS gc (1-1273)
auguucguguuccugguccuccugccccuggugagcucccagugcgugaaccucaccacccgcacgcagcugccgcccgccuacaccaacagcuucacccggggcgucuacuaccccgacaagguguuccgcuccagcgugcugcacuccacccaggaccucuuccugcccuucuucagcaacgucacgugguuccacgccauccacguguccgggaccaacggcaccaagcgguucgacaacccggugcugcccuucaacgacggggucuacuucgcgagcaccgagaaguccaacaucauccgcggcuggaucuucgggacgacccucgacagcaagacccagucccugcugaucgugaacaacgccaccaacguggucaucaaggugugcgaguuccaguucugcaacgaccccuuccucggcguguacuaccacaagaacaacaagagcuggauggaguccgaguuccgggucuacagcuccgccaacaacugcacguucgaguacgugagccagcccuuccugauggaccuggagggcaagcaggggaacuucaagaaccuccgcgaguucguguucaagaacaucgacggcuacuucaagaucuacuccaagcacaccccgaucaaccugguccgggaccugccccagggguucagcgcccucgagccccugguggaccugcccaucggcaucaacaucacccgcuuccagacccuccuggcccugcaccgguccuaccucacgccgggggacagcagcuccggcuggaccgcgggcgccgccgccuacuacgugggguaccugcagccccgcaccuuccugcucaaguacaacgagaacggcaccaucacggacgcggucgacugcgcccuggacccccugagcgagaccaagugcacccucaaguccuucaccguggagaaggggaucuaccagacgagcaacuuccgggugcagcccaccgaguccaucguccgcuucccgaacaucaccaaccugugccccuucggcgagguguucaacgccacccgguucacgagcgucuacgccuggaaccgcaagcggaucuccaacugcguggccgacuacagcgugcuguacaacuccgcgagcuucuccaccuucaagugcuacggcgucagccccaccaagcucaacgaccugugcuucaccaacguguacgccgacuccuucgugauccgcggggacgagguccggcagaucgcccccggccagacggggaagaucgccgacuacaacuacaagcugccggacgacuucaccggcugcgugaucgccuggaacagcaacaaccucgacuccaaggucgggggcaacuacaacuaccuguaccgccuguuccgcaagagcaaccucaagcccuucgagcgggacaucuccaccgagaucuaccaggcgggcagcacccccugcaacgggguggagggcuucaacugcuacuucccccugcaguccuacggguuccagccgacgaacggcgugggguaccagcccuaccggguggucgugcugagcuucgagcuccugcacgcccccgccaccgugugcggccccaagaaguccaccaaccuggucaagaacaagugcgugaacuucaacuucaacggccucaccgggaccggcgugcugacggagagcaacaagaaguuccugccguuccagcaguucgggcgcgacaucgccgacaccaccgacgccguccgcgacccccagacccuggagauccucgacaucacgcccugcagcuucggcgggguguccgugaucaccccgggcaccaacaccagcaaccaggucgcggugcuguaccaggacgugaacugcacggagguccccguggccauccacgccgaccagcugacccccaccuggcggguguacuccaccggcagcaacgucuuccagacgcgcgccgggugccucaucggcgccgagcacgugaacaacuccuacgagugcgacauccccaucggggcgggcaucugcgccagcuaccagacccagaccaacuccccgcggcgcgcccggagcguggccucccagagcaucaucgcguacaccaugucccugggcgccgagaacagcgucgccuacuccaacaacagcaucgccauccccacgaacuucaccaucuccgugaccaccgagauccugcccgugagcaugacgaagaccagcgucgacugcaccauguacaucugcggggacuccaccgagugcagcaaccuccugcugcaguacggcuccuucugcacgcagcucaaccgcgcccugaccgggaucgcgguggagcaggacaagaacacccaggagguguucgcccaggucaagcagaucuacaagacgcccccgaucaaggacuucggcggguucaacuucagccagauccugcccgaccccuccaagcccagcaagcgguccuucaucgaggaccuccuguucaacaaggugacccuggccgacgccggcuucaucaagcaguacggcgacugccucggggacaucgccgcgcgcgaccugaucugcgcccagaaguucaacggccugaccgugcucccgccccugcugaccgacgagaugaucgcccaguacaccagcgcccuccuggccgggacgaucaccuccggcuggaccuucggggcgggcgccgcccugcagauccccuucgccaugcagauggcguaccgguucaacggcaucggggucacccagaacgugcucuacgagaaccagaagcugaucgccaaccaguucaacagcgccaucggcaagauccaggacucccugagcuccacggccagcgcccucgggaagcugcaggacguggucaaccagaacgcgcaggcccugaacacccucgugaagcagcuguccagcaacuucggcgccaucuccagcgugcugaacgacauccucucccgccuggacaaggucgaggccgaggugcagaucgaccggcugaucaccgggcgccuccagagccugcagaccuacgugacccagcagcugauccgggccgcggagauccgcgccagcgccaaccucgccgccacgaagauguccgagugcguccugggccagagcaagcggguggacuucugcggcaagggguaccaccugauguccuucccccagagcgcgccgcacggcguggucuuccuccacgugaccuacguccccgcccaggagaagaacuucaccaccgcccccgccaucugccacgacgggaaggcgcacuucccccgcgagggcguguucguguccaacgggacgcacugguucgucacccagcggaacuucuacgagccgcagaucaucaccaccgacaacacguucgugagcggcaacugcgacguggucaucggcaucgugaacaacaccguguacgacccccugcagcccgagcuggacuccuucaaggaggagcucgacaaguacuucaagaaccacaccagccccgacgucgaccugggggacaucuccggcaucaacgccagcguggugaacauccagaaggagaucgaccgccugaacgaggucgccaagaaccucaacgagucccugaucgaccugcaggagcucgggaaguacgagcaguacaucaaguggccgugguacaucuggcugggcuucaucgccggccugaucgccaucgugauggugaccaucaugcucugcugcaugacgagcugcugcuccugccugaaggggugcugcagcugcggcuccugcugcaaguucgacgaggacgacagcgagcccguccugaagggggugaagcuccacuacaccuga

SEQ ID NO: 11779 - RNA, 3822 nt, Artificial Sequence
  SARS-CoV-2/Portugal/PT0035/2020__EPI_ISL_418020 spike protein CDS gc (1-1273)
auguucguguuccugguccuccugccccuggugagcucccagugcgugaaccucaccacccgcacgcagcugccgcccgccuacaccaacagcuucacccggggcgucuacuaccccgacaagguguuccgcuccagcgugcugcacuccacccaggaccucuuccugcccuucuucagcaacgucacgugguuccacgccauccacguguccgggaccaacggcaccaagcgguucgacaacccggugcugcccuucaacgacggggucuacuucgcgagcaccgagaaguccaacaucauccgcggcuggaucuucgggacgacccucgacagcaagacccagucccugcugaucgugaacaacgccaccaacguggucaucaaggugugcgaguuccaguucugcaacgaccccuuccucggcguguacuaccacaagaacaacaagagcuggauggaguccgaguuccgggucuacagcuccgccaacaacugcacguucgaguacgugagccagcccuuccugauggaccuggagggcaagcaggggaacuucaagaaccuccgcgaguucguguucaagaacaucgacggcuacuucaagaucuacuccaagcacaccccgaucaaccugguccgggaccugccccagggguucagcgcccucgagccccugguggaccugcccaucggcaucaacaucacccgcuuccagacccuccuggcccugcaccgguccuaccucacgccgggggacagcagcuccggcuggaccgcgggcgccgccgccuacuacgugggguaccugcagccccgcaccuuccugcucaaguacaacgagaacggcaccaucacggacgcggucgacugcgcccuggacccccugagcgagaccaagugcacccucaaguccuucaccguggagaaggggaucuaccagacgagcaacuuccgggugcagcccaccgaguccaucguccgcuucccgaacaucaccaaccugugccccuucggcgagguguucaacgccacccgguucgccagcgucuacgccuggaaccgcaagcggaucuccaacugcguggcggacuacagcgugcuguacaacuccgccagcuucuccacguucaagugcuacggcgucagccccaccaagcucaacgaccugugcuucaccaacguguacgccgacuccuucgugauccgcggggacgagguccggcagaucgcccccggccagaccgggaagaucgccgacuacaacuacaagcugccggacgacuucacgggcugcgugaucgcguggaacagcaacaaccucgacuccaaggucgggggcaacuacaacuaccuguaccgccuguuccgcaagagcaaccucaagcccuucgagcgggacaucuccaccgagaucuaccaggccggcagcacccccugcaacgggguggagggcuucaacugcuacuucccccugcaguccuacggguuccagccgaccaacggcgugggguaccagcccuaccggguggucgugcugagcuucgagcuccugcacgcccccgccacggugugcggccccaagaaguccaccaaccuggucaagaacaagugcgugaacuucaacuucaacggccucaccgggaccggcgugcugaccgagagcaacaagaaguuccugccguuccagcaguucgggcgcgacaucgccgacacgaccgacgcgguccgcgacccccagacccuggagauccucgacaucacccccugcagcuucggcgggguguccgugaucacgccgggcaccaacaccagcaaccaggucgccgugcuguaccaggacgugaacugcaccgagguccccguggccauccacgccgaccagcugacgcccaccuggcggguguacuccaccggcagcaacgucuuccagacccgcgccgggugccucaucggcgcggagcacgugaacaacuccuacgagugcgacauccccaucggggccggcaucugcgccagcuaccagacgcagaccaacuccccgcggcgcgcccggagcguggcgucccagagcaucaucgccuacaccaugucccugggcgccgagaacagcgucgccuacuccaacaacagcaucgccauccccaccaacuucacgaucuccgugaccaccgagauccugcccgugagcaugaccaagacgagcgucgacugcaccauguacaucugcggggacuccaccgagugcagcaaccuccugcugcaguacggcuccuucugcacccagcucaaccgcgcgcugacggggaucgccguggagcaggacaagaacacccaggagguguucgcccaggucaagcagaucuacaagacgcccccgaucaaggacuucggcggguucaacuucagccagauccugcccgaccccuccaagcccagcaagcgguccuucaucgaggaccuccuguucaacaaggugacccuggccgacgccggcuucaucaagcaguacggcgacugccucggggacaucagcgcgcgcgaccugaucugcgcccagaaguucaacggccugaccgugcucccgccccugcugaccgacgagaugaucgcccaguacaccuccgcccuccuggccgggaccaucacgagcggcuggaccuucggggcgggcgccgcccugcagauccccuucgccaugcagauggcguaccgguucaacggcaucggggucacccagaacgugcucuacgagaaccagaagcugaucgccaaccaguucaacuccgccaucggcaagauccaggacagccuguccagcaccgccuccgcccucgggaagcugcaggacguggucaaccagaacgcgcaggcccugaacacgcucgugaagcagcugagcuccaacuucggcgccaucagcuccgugcugaacgacauccucagccgccuggacaaggucgaggccgaggugcagaucgaccggcugaucaccgggcgccuccagagccugcagaccuacgugacccagcagcugauccgggccgcggagauccgcgccuccgccaaccucgccgccaccaagaugagcgagugcguccugggccaguccaagcggguggacuucugcggcaagggguaccaccugaugagcuucccccaguccgcgccgcacggcguggucuuccuccacgugacguacguccccgcccaggagaagaacuucaccaccgcccccgccaucugccacgacgggaaggcgcacuucccccgcgagggcguguucgugagcaacgggacccacugguucgucacgcagcggaacuucuacgagccgcagaucaucaccaccgacaacaccuucguguccggcaacugcgacguggucaucggcaucgugaacaacacgguguacgacccccugcagcccgagcuggacagcuucaaggaggagcucgacaaguacuucaagaaccacaccucccccgacgucgaccugggggacaucagcggcaucaacgccuccguggugaacauccagaaggagaucgaccgccugaacgaggucgccaagaaccucaacgagagccugaucgaccugcaggagcucgggaaguacgagcaguacaucaaguggccgugguacaucuggcugggcuucaucgccggccugaucgccaucgugauggugaccaucaugcucugcugcaugaccuccugcugcagcugccugaaggggugcugcuccugcggcagcugcugcaaguucgacgaggacgacuccgagcccguccugaagggggugaagcuccacuacacguga

SEQ ID NO: 11780 - RNA, 3822 nt, Artificial Sequence
  SARS-CoV-2/USA/NY-NYUMC7/2020__EPI_ISL_418192 spike protein CDS gc (1-1273)
auguucguguuccugguccuccugccccuggugagcucccagugcgugaaccucaccacccgcacgcagcugccgcccgccuacaccaacagcuucacccggggcgucuacuaccccgacaagguguuccgcuccagcgugcugcacuccacccaggaccucuuccugcccuucuucagcaacgucacgugguuccacgccauccacguguccgggaccaacggcaccaagcgguucgacaacccggugcugcccuucaacgacggggucuacuucgcgagcaccgagaaguccaacaucauccgcggcuggaucuucgggacgacccucgacagcaagacccagucccugcugaucgugaacaacgccaccaacguggucaucaaggugugcgaguuccaguucugcaacgaccccuuccucggcguguaccaccacaagaacaacaagagcuggauggaguccgaguuccgggucuacagcuccgccaacaacugcacguucgaguacgugagccagcccuuccugauggaccuggagggcaagcaggggaacuucaagaaccuccgcgaguucguguucaagaacaucgacggcuacuucaagaucuacuccaagcacaccccgaucaaccugguccgggaccugccccagggguucagcgcccucgagccccugguggaccugcccaucggcaucaacaucacccgcuuccagacccuccuggcccugcaccgguccuaccucacgccgggggacagcagcuccggcuggaccgcgggcgccgccgccuacuacgugggguaccugcagccccgcaccuuccugcucaaguacaacgagaacggcaccaucacggacgcggucgacugcgcccuggacccccugagcgagaccaagugcacccucaaguccuucaccguggagaaggggaucuaccagacgagcaacuuccgggugcagcccaccgaguccaucguccgcuucccgaacaucaccaaccugugccccuucggcgagguguucaacgccacccgguucgccagcgucuacgccuggaaccgcaagcggaucuccaacugcguggcggacuacagcgugcuguacaacuccgccagcuucuccacguucaagugcuacggcgucagccccaccaagcucaacgaccugugcuucaccaacguguacgccgacuccuucgugauccgcggggacgagguccggcagaucgcccccggccagaccgggaagaucgccgacuacaacuacaagcugccggacgacuucacgggcugcgugaucgcguggaacagcaacaaccucgacuccaaggucgggggcaacuacaacuaccuguaccgccuguuccgcaagagcaaccucaagcccuucgagcgggacaucuccaccgagaucuaccaggccggcagcacccccugcaacgggguggagggcuucaacugcuacuucccccugcaguccuacggguuccagccgaccaacggcgugggguaccagcccuaccggguggucgugcugagcuucgagcuccugcacgcccccgccacggugugcggccccaagaaguccaccaaccuggucaagaacaagugcgugaacuucaacuucaacggccucaccgggaccggcgugcugaccgagagcaacaagaaguuccugccguuccagcaguucgggcgcgacaucgccgacacgaccgacgcgguccgcgacccccagacccuggagauccucgacaucacccccugcagcuucggcgggguguccgugaucacgccgggcaccaacaccagcaaccaggucgccgugcuguaccagggcgugaacugcaccgagguccccguggccauccacgccgaccagcugacgcccaccuggcggguguacuccaccgggagcaacgucuuccagacccgcgccggcugccucaucggggcggagcacgugaacaacuccuacgagugcgacauccccaucggcgccggcaucugcgccagcuaccagacgcagaccaacuccccgcggcgcgcccggagcguggcgucccagagcaucaucgccuacaccaugucccugggggccgagaacagcgucgccuacuccaacaacagcaucgccauccccaccaacuucacgaucuccgugaccaccgagauccugcccgugagcaugaccaagacgagcgucgacugcaccauguacaucugcggcgacuccaccgagugcagcaaccuccugcugcaguacggguccuucugcacccagcucaaccgcgcgcugacgggcaucgccguggagcaggacaagaacacccaggagguguucgcccaggucaagcagaucuacaagacgcccccgaucaaggacuucgggggcuucaacuucagccagauccugcccgaccccuccaagcccagcaagcgguccuucaucgaggaccuccuguucaacaaggugacccuggccgacgccggcuucaucaagcaguacggggacugccucggcgacaucgcggcccgcgaccugaucugcgcccagaaguucaacgggcugaccgugcucccgccccugcugaccgacgagaugaucgcccaguacaccagcgcccuccuggcgggcaccaucacguccggguggaccuucggcgccggcgccgcccugcagauccccuucgcgaugcagauggccuaccgguucaacgggaucggcgucacccagaacgugcucuacgagaaccagaagcugaucgccaaccaguucaacagcgccaucgggaagauccaggacucccugagcuccaccgccagcgcgcucggcaagcugcaggacguggucaaccagaacgcccaggcccugaacacgcucgugaagcagcuguccagcaacuucggggccaucuccagcgugcugaacgacauccucucccgccuggacaaggucgaggccgaggugcagaucgaccggcugaucaccggccgccuccagagccugcagaccuacgugacccagcagcugauccgggcggccgagauccgcgccagcgccaaccucgccgcgaccaagauguccgagugcguccugggccagagcaagcggguggacuucugcgggaagggcuaccaccugauguccuucccccagagcgccccgcacgggguggucuuccuccacgugacguacguccccgcccaggagaagaacuucaccaccgcccccgcgaucugccacgacggcaaggcccacuucccccgcgaggggguguucguguccaacggcacccacugguucgucacgcagcggaacuucuacgagccgcagaucaucaccaccgacaacaccuucgugagcggcaacugcgacguggucaucgggaucgugaacaacacgguguacgacccccugcagcccgagcuggacuccuucaaggaggagcucgacaaguacuucaagaaccacaccagccccgacgucgaccugggcgacaucuccgggaucaacgccagcguggugaacauccagaaggagaucgaccgccugaacgaggucgccaagaaccucaacgagucccugaucgaccugcaggagcucggcaaguacgagcaguacaucaaguggccgugguacaucuggcugggcuucaucgccgggcugaucgcgaucgugauggugaccaucaugcucugcugcaugaccagcugcugcuccugccugaagggcugcugcagcugcggguccugcugcaaguucgacgaggacgacagcgagcccguccugaagggcgugaagcuccacuacacguga

SEQ ID NO: 11781 - RNA, 3822 nt, Artificial Sequence
  SARS-CoV-2/Iceland/189/2020__EPI_ISL_417709 spike protein CDS gc (1-1273)
auguucguguuccugguccuccugccccuggugagcucccagugcgugaaccucaccacccgcacgcagcugccgcccgccuacaccaacagcuucacccggggcgucuacuaccccgacaagguguuccgcuccagcgugcugcacuccacccaggaccucuuccugcccuucuucagcaacgucacgugguuccacgccauccacguguccgggaccaacggcaccaagcgguucgacaacccggugcugcccuucaacgacggggucuacuucgcgagcaccgagaaguccaacaucauccgcggcuggaucuucgggacgacccucgacagcaagacccagucccugcugaucgugaacaacgccaccaacguggucaucaaggugugcgaguuccaguucugcaacgaccccuuccucggcguguacuaccacaagaacaacaagagcuggauggaguccgaguuccgggucuacagcuccgccaacaacugcacguucgaguacgugagccagcccuuccugauggaccuggagggcaagcaggggaacuucaagaaccuccgcgaguucguguucaagaacaucgacggcuacuucaagaucuacuccaagcacaccccgaucaaccugguccgggaccugccccagggguucagcgcccucgagccccugguggaccugcccaucggcaucaacaucacccgcuuccagacccuccuggcccugcaccgguccuaccucacgccgggggacagcagcuccggcuggaccgcgggcgccgccgccuacuacgugggguaccugcagccccgcaccuuccugcucaaguacaacgagaacggcaccaucacggacgcggucgacugcgcccuggacccccugagcgagaccaagugcacccucaaguccuucaccguggagaaggggaucuaccagacgagcaacuuccgggugcagcccaccgaguccaucguccgcuucccgaacaucaccaaccugugccccuucggcgagguguucaacgccacccgguucgccagcgucuacgccuggaaccgcaagcggaucuccaacugcguggcggacuacagcgugcuguacaacuccgccagcuucuccacguucaagugcuacggcgucagccccaccaagcucaacgaccugugcuucaccaacguguacgccgacuccuucgugauccgcggggacgagguccggcagaucgcccccggccagaccgggaagaucgccgacuacaacuacaagcugccggacgacuucacgggcugcgugaucgcguggaacagcaacaaccucgacuccaaggucgggggcaacuacaacuaccuguaccgccuguuccgcaagagcaaccucaagcccuucgagcgggacaucuccaccgagaucuaccaggccggcagcacccccugcaacgggguggagggcuucaacugcuacuucccccugcaguccuacggguuccagccgaccaacggcgugggguaccagcccuaccggguggucgugcugagcuucgagcuccugcacgcccccgccacggugugcggccccaagaaguccaccaaccuggucaagaacaagugcgugaacuucaacuucaacggccucaccgggaccggcgugcugaccgagagcaacaagaaguuccugccguuccagcaguucgggcgcgacaucgccgacacgaccgacgcgguccgcgacccccagacccuggagauccucgacaucacccccugcagcuucggcgggguguccgugaucacgccgggcaccaacaccagcaaccaggucgccgugcuguaccagggcgugaacugcaccgagguccccguggccauccacgccgaccagcugacgcccaccuggcggguguacuccaccgggagcaacgucuuccagacccgcgccggcugccucaucggggcggagcacgugaacaacuccuacgagugcgacauccccaucggcgccggcaucugcgccagcuaccagacgcagaccaacuccccgcggcgcgcccggagcguggcgucccagagcaucaucgccuacaccaugucccugggggccgagaacagcgucgccuacuccaacaacagcaucgccauccccaccaacuucacgaucuccgugaccaccgagauccugcccgugagcaugaccaagacgagcgucgacugcaccauguacaucugcggcgacuccaccgagugcagcaaccuccugcugcaguacggguccuucugcacccagcucaaccgcgcgcugacgggcaucgccguggagcaggacaagaacacccaggagguguucgcccaggucaagcagaucuacaagacgcccccgaucaaggacuucgggggcuucaacuucagccagauccugcccgaccccuccaagcccagcaagcgguccuucaucgaggaccuccuguucaacaaggugacccuggccgacgccggcuucaccaagcaguacggggacugccucggcgacaucgcggcccgcgaccugaucugcgcccagaaguucaacgggcugaccgugcucccgccccugcugaccgacgagaugaucgcccaguacaccagcgcccuccuggcgggcacgaucaccuccggguggaccuucggcgccggcgccgcccugcagauccccuucgcgaugcagauggccuaccgguucaacgggaucggcgucacccagaacgugcucuacgagaaccagaagcugaucgccaaccaguucaacagcgccaucgggaagauccaggacucccugagcuccacggccagcgcgcucggcaagcugcaggacguggucaaccagaacgcccaggcccugaacacccucgugaagcagcuguccagcaacuucggggccaucuccagcgugcugaacgacauccucucccgccuggacaaggucgaggccgaggugcagaucgaccggcugaucaccggccgccuccagagccugcagaccuacgugacccagcagcugauccgggcggccgagauccgcgccagcgccaaccucgccgcgacgaagauguccgagugcguccugggccagagcaagcggguggacuucugcgggaagggcuaccaccugauguccuucccccagagcgccccgcacgggguggucuuccuccacgugaccuacguccccgcccaggagaagaacuucaccaccgcccccgcgaucugccacgacggcaaggcccacuucccccgcgaggggguguucguguccaacggcacgcacugguucgucacccagcggaacuucuacgagccgcagaucaucaccaccgacaacacguucgugagcggcaacugcgacguggucaucgggaucgugaacaacaccguguacgacccccugcagcccgagcuggacuccuucaaggaggagcucgacaaguacuucaagaaccacaccagccccgacgucgaccugggcgacaucuccgggaucaacgccagcguggugaacauccagaaggagaucgaccgccugaacgaggucgccaagaaccucaacgagucccugaucgaccugcaggagcucggcaaguacgagcaguacaucaaguggccgugguacaucuggcugggcuucaucgccgggcugaucgcgaucgugauggugaccaucaugcucugcugcaugacgagcugcugcuccugccugaagggcugcugcagcugcggguccugcugcaaguucgacgaggacgacagcgagcccguccugaagggcgugaagcuccacuacaccuga

SEQ ID NO: 11782 - RNA, 3822 nt, Artificial Sequence
  SARS-CoV-2/Australia/NSW56/2020__EPI_ISL_417408 spike protein CDS gc (1-1273)
auguucguguuccugguccuccugccccuggugagcucccagugcgugaaccucaccacccgcacgcagcugccgcccgccuacaccaacagcuucacccggggcgucuacuaccccgacaagguguuccgcuccagcgugcugcacuccacccaggaccucuuccugcccuucuucagcaacgucacgugguuccacgccauccacguguccgggaccaacggcaccaagcgguucgacaacccggugcugcccuucaacgacggggucuacuucgcgagcaccgagaaguccaacaucauccgcggcuggaucuucgggacgacccucgacagcaagacccagucccugcugaucgugaacaacgccaccaacguggucaucaaggugugcgaguuccaguucugcaacgaccccuuccucggcguguacuaccacaagaacaacaagagcuggauggaguccgaguuccgggucuacagcuccgccaacaacugcacguucgaguacgugagccagcccuuccugauggaccuggagggcaagcaggggaacuucaagaaccuccgcgaguucguguucaagaacaucgacggcuacuucaagaucuacuccaagcacaccccgaucaaccugguccgggaccugccccagggguucagcgcccucgagccccugguggaccugcccaucggcaucaacaucacccgcuuccagacccuccuggcccugcaccgguccuaccucacgccgggggacagcagcuccggcuggaccgcgggcgccgccgccuacuacgugggguaccugcagccccgcaccuuccugcucaaguacaacgagaacggcaccaucacggacgcggucgacugcgcccuggacccccugagcgagaccaagugcacccucaaguccuucaccguggagaaggggaucuaccagacgagcaacuuccgggugcagcccaccgaguccaucguccgcuucccgaacaucaccaaccugugccccuucggcgagguguucaacgccacccgguucgccagcgucuacgccuggaaccgcaagcggaucuccaacugcguggcggacuacagcgugcuguacaacuccgccagcuucuccacguucaagugcuacggcgucagccccaccaagcucaacgaccugugcuucaccaacguguacgccgacuccuucgugauccgcggggacgagguccggcagaucgcccccggccagaccgggaagaucgccgacuacaacuacaagcugccggacgacuucacgggcugcgugaucgcguggaacagcaacaaccucgacuccaaggucgggggcaacuacaacuaccuguaccgccuguuccgcaagagcaaccucaagcccuucgagcgggacaucuccaccgagaucuaccaggccggcagcacccccugcaacgggguggagggcuucaacugcuacuucccccugcaguccuacggguuccagccgaccaacggcgugggguaccagcccuaccggguggucgugcugagcuucgagcuccugcacgcccccgccacggugugcggccccaagaaguccaccaaccuggucaagaacaagugcgugaacuucaacuucaacggccucaccgggaccggcgugcugaccgagagcaacaagaaguuccugccguuccagcaguucgggcgcgacaucgccgacacgaccgacgcgguccgcgacccccagacccuggagauccucgacaucacccccugcagcuucggcgggguguccgugaucacgccgggcaccaacaccagcaaccaggucgccgugcuguaccaggacgugaacugcaccgagguccccguggccauccacgccgaccagcugacgcccaccuggcggguguacuccaccggcagcaacgucuuccagacccgcgccgggugccucaucggcgcggagcacgugaacaacuccuacgagugcgacauccccaucggggccggcaucugcgccagcuaccagacgcagaccaacuccccgcggcgcgcccggagcguggcgucccagagcaucaucgccuacaccaugucccugggcgccgagaacagcgucgccuacuccaacaacagcaucgccauccccaccaacuucacgaucuccgugaccaccgagauccugcccgugagcaugaccaagacgagcgucgacugcaccauguacaucugcggggacuccaccgagugcagcaaccuccugcugcaguacggcuccuucugcacccagcucaaccgcgcgcugacggggaucgccguggagcaggacaagaacacccaggagguguucgcccaggucaagcagaucuacaagacgcccccgaucaaggacuucggcggguucaacuucagccagauccugcccgacuccagcaagcccuccaagcggagcuucaucgaggaccuccuguucaacaaggugacccuggccgacgccggcuucaucaagcaguacggcgacugccucggggacaucgcggcccgcgaccugaucugcgcccagaaguucaacggccugaccgugcugcccccgcuccugaccgacgagaugaucgcccaguacaccuccgcccuccuggcggggaccaucacgagcggcuggaccuucggggccggcgccgcccugcagauccccuucgcgaugcagauggccuaccgguucaacggcaucggggucacccagaacgugcucuacgagaaccagaagcugaucgccaaccaguucaacuccgccaucggcaagauccaggacagccuguccagcaccgccuccgcgcucgggaagcugcaggacguggucaaccagaacgcccaggcccugaacacgcucgugaagcagcugagcuccaacuucggcgccaucagcuccgugcugaacgacauccucagccgccuggacaaggucgaggccgaggugcagaucgaccggcugaucaccgggcgccuccagagccugcagaccuacgugacccagcagcugauccgggcggccgagauccgcgccuccgccaaccucgccgcgaccaagaugagcgagugcguccugggccaguccaagcggguggacuucugcggcaagggguaccaccugaugagcuucccccaguccgcgccccacggcguggucuuccuccacgugacguacgucccggcccaggagaagaacuucaccaccgcccccgccaucugccacgacgggaaggcccacuucccccgcgagggcguguucgugagcaacgggacccacugguucgucacgcagcggaacuucuacgagccccagaucaucaccaccgacaacaccuucguguccggcaacugcgacguggucaucggcaucgugaacaacacgguguacgacccgcugcagcccgagcuggacagcuucaaggaggagcucgacaaguacuucaagaaccacaccucccccgacgucgaccugggggacaucagcggcaucaacgccuccguggugaacauccagaaggagaucgaccgccugaacgaggucgccaagaaccucaacgagagccugaucgaccugcaggagcucgggaaguacgagcaguacaucaaguggcccugguacaucuggcugggcuucaucgccggccugaucgcgaucgugauggugaccaucaugcucugcugcaugaccuccugcugcagcugccugaaggggugcugcuccugcggcagcugcugcaaguucgacgaggacgacuccgagccgguccugaagggggugaagcuccacuacacguga

SEQ ID NO: 11783 - RNA, 3822 nt, Artificial Sequence
  SARS-CoV-2/Iceland/280/2020__EPI_ISL_417608 spike protein CDS gc (1-1273)
auguucguguuccugguccuccugccccuggugagcucccagugcgugaaccucaccacccgcacgcagcugccgcccgccuacaccaacagcuucacccggggcgucuacuaccccgacaagguguuccgcuccagcgugcugcacuccacccaggaccucuuccugcccuucuucagcaacgucacgugguuccacgccauccacguguccgggaccaacggcaccaagcgguucgacaacccggugcugcccuucaacgacggggucuacuucgcgagcaccgagaaguccaacaucauccgcggcuggaucuucgggacgacccucgacagcaagacccagucccugcugaucgugaacaacgccaccaacguggucaucaaggugugcgaguuccaguucugcaacgaccccuuccucggcguguacuaccacaagaacaacaagagcuggauggaguccgaguuccgggucuacagcuccgccaacaacugcacguucgaguacgugagccagcccuuccugauggaccuggagggcaagcaggggaacuucaagaaccuccgcgaguucguguucaagaacaucgacggcuacuucaagaucuacuccaagcacaccccgaucaaccugguccgggaccugccccagggguucagcgcccucgagccccugguggaccugcccaucggcaucaacaucacccgcuuccagacccuccuggcccugcaccgguccuaccucacgccgggggacagcagcuccggcuggaccgcgggcgccgccgccuacuacgugggguaccugcagccccgcaccuuccugcucaaguacaacgagaacggcaccaucacggacgcggucgacugcgcccuggacccccugagcgagaccaagugcacccucaaguccuucaccguggagaaggggaucuaccagacgagcaacuuccgggugcagcccaccgaguccaucguccgcuucccgaacaucaccaaccugugccccuucggcgagguguucaacgccacccgguucgccagcgucuacgccuggaaccgcaagcggaucuccaacugcguggcggacuacagcgugcuguacaacuccgccagcuucuccacguucaagugcuacggcgucagccccaccaagcucaacgaccugugcuucaccaacguguacgccgacuccuucgugauccgcggggacgagguccggcagaucgcccccggccagaccgggaagaucgccgacuacaacuacaagcugccggacgacuucacgggcugcgugaucgcguggaacagcaacaaccucgacuccaaggucgggggcaacuacaacuaccuguaccgccuguuccgcaagagcaaccucaagcccuucgagcgggacaucuccaccgagaucuaccaggccggcagcacccccugcaacgggguggagggcuucaacugcuacuucccccugcaguccuacggguuccagccgaccaacggcgugggguaccagcccuaccggguggucgugcugagcuucgagcuccugcacgcccccgccacggugugcggccccaagaaguccaccaaccuggucaagaacaagugcgugaacuucaacuucaacggccucaccgggaccggcgugcugaccgagagcaacaagaaguuccugccguuccagcaguucgggcgcgacaucgccgacacgaccgacgcgguccgcgacccccagacccuggagauccucgacaucacccccugcagcuucggcgggguguccgugaucacgccgggcaccaacaccagcaaccaggucgccgugcuguaccagggcgugaacugcaccgagguccccguggccauccacgccgaccagcugacgcccaccuggcggguguacuccaccgggagcaacgucuuccagacccgcgccggcugccucaucggggcggagcacgugaacaacuccuacgagugcgacauccccaucggcgccggcaucugcgccagcuaccacacgcagaccaacuccccgcggcgcgcccggagcguggcgucccagagcaucaucgccuacaccaugucccugggggccgagaacagcgucgccuacuccaacaacagcaucgccauccccaccaacuucacgaucuccgugaccaccgagauccugcccgugagcaugaccaagacgagcgucgacugcaccauguacaucugcggcgacuccaccgagugcagcaaccuccugcugcaguacggguccuucugcacccagcucaaccgcgcgcugacgggcaucgccguggagcaggacaagaacacccaggagguguucgcccaggucaagcagaucuacaagacgcccccgaucaaggacuucgggggcuucaacuucagccagauccugcccgaccccuccaagcccagcaagcgguccuucaucgaggaccuccuguucaacaaggugacccuggccgacgccggcuucaucaagcaguacggggacugccucggcgacaucgcggcccgcgaccugaucugcgcccagaaguucaacgggcugaccgugcucccgccccugcugaccgacgagaugaucgcccaguacaccagcgcccuccuggcgggcaccaucacguccggguggaccuucggcgccggcgccgcccugcagauccccuucgcgaugcagauggccuaccgguucaacgggaucggcgucacccagaacgugcucuacgagaaccagaagcugaucgccaaccaguucaacagcgccaucgggaagauccaggacucccugagcuccaccgccagcgcgcucggcaagcugcaggacguggucaaccagaacgcccaggcccugaacacgcucgugaagcagcuguccagcaacuucggggccaucuccagcgugcugaacgacauccucucccgccuggacaaggucgaggccgaggugcagaucgaccggcugaucaccggccgccuccagagccugcagaccuacgugacccagcagcugauccgggcggccgagauccgcgccagcgccaaccucgccgcgaccaagauguccgagugcguccugggccagagcaagcggguggacuucugcgggaagggcuaccaccugauguccuucccccagagcgccccgcacgggguggucuuccuccacgugacguacguccccgcccaggagaagaacuucaccaccgcccccgcgaucugccacgacggcaaggcccacuucccccgcgaggggguguucguguccaacggcacccacugguucgucacgcagcggaacuucuacgagccgcagaucaucaccaccgacaacaccuucgugagcggcaacugcgacguggucaucgggaucgugaacaacacgguguacgacccccugcagcccgagcuggacuccuucaaggaggagcucgacaaguacuucaagaaccacaccagccccgacgucgaccugggcgacaucuccgggaucaacgccagcguggugaacauccagaaggagaucgaccgccugaacgaggucgccaagaaccucaacgagucccugaucgaccugcaggagcucggcaaguacgagcaguacaucaaguggccgugguacaucuggcugggcuucaucgccgggcugaucgcgaucgugauggugaccaucaugcucugcugcaugaccagcugcugcuccugccugaagggcugcugcagcugcggguccugcugcaaguucgacgaggacgacagcgagcccguccugaagggcgugaagcuccacuacacguga

SEQ ID NO: 11784 - RNA, 3822 nt, Artificial Sequence
  SARS-CoV-2/Iceland/247/2020__EPI_ISL_417575 spike protein CDS gc (1-1273)
auguucguguuccugguccuccugccccuggugagcucccagugcgugaaccucaccacccgcacgcagcugccgcccgccuacaccaacagcuucacccggggcgucuacuaccccgacaagguguuccgcuccagcgugcugcacuccacccaggaccucuuccugcccuucuucagcaacgucacgugguuccacgccauccacguguccgggaccaacggcaccaagcgguucgacaacccggugcugcccuucaacgacggggucuacuucgcgagcaccgagaaguccaacaucauccgcggcuggaucuucgggacgacccucgacagcaagacccagucccugcugaucgugaacaacgccaccaacguggucaucaaggugugcgaguuccaguucugcaacgaccccuuccucggcguguacuaccacaagaacaacaagagcuggauggaguccgaguuccgggucuacagcuccgccaacaacugcacguucgaguacgugagccagcccuuccugauggaccuggagggcaagcaggggaacuucaagaaccuccgcgaguucguguucaagaacaucgacggcuacuucaagaucuacuccaagcacaccccgaucaaccugguccgggaccugccccagggguucagcgcccucgagccccugguggaccugcccaucggcaucaacaucacccgcuuccagacccuccuggcccugcaccgguccuaccucacgccgggggacagcagcuccggcuggaccgcgggcgccgccgccuacuacgugggguaccugcagccccgcaccuuccugcucaaguacaacgagaacggcaccaucacggacgcggucgacugcgcccuggacccccugagcgagaccaagugcacccucaaguccuucaccguggagaaggggaucuaccagacgagcaacuuccgggugcagcccaccgaguccaucguccgcuucccgaacaucaccaaccugugccccuucggcgagguguucaacgccacccgguucgccagcgucuacgccuggaaccgcaagcggaucuccaacugcguggcggacuacagcgugcuguacaacuccgccagcuucuccacguucaagugcuacggcgucagccccaccaagcucaacgaccugugcuucaccaacguguacgccgacuccuucgugauccgcggggacgagguccggcagaucgcccccggccagaccgggaagaucgccgacuacaacuacaagcugccggacgacuucacgggcugcgugaucgcguggaacagcaacaaccucgacuccaaggucgggggcaacuacaacuaccuguaccgccuguuccgcaagagcaaccucaagcccuucgagcgggacaucuccaccgagaucuaccaggccggcagcacccccugcaacgggguggagggcuucaacugcuacuucccccugcaguccuacggguuccagccgaccaacggcgugggguaccagcccuaccggguggucgugcugagcuucgagcuccugcacgcccccgccacggugugcggccccaagaaguccaccaaccuggucaagaacaagugcgugaacuucaacuucaacggccucaccgggaccggcgugcugaccgagagcaacaagaaguuccugccguuccagcaguucgggcgcgacaucgccgacacgaccgacgcgguccgcgacccccagacccuggagauccucgacaucacccccugcagcuucggcgggguguccgugaucacgccgggcaccaacaccagcaaccaggucgccgugcuguaccagggcgugaacugcaccgagguccccguggccauccacgccgaccagcugacgcccaccuggcggguguacuccaccgggagcaacgucuuccagacccgcgccggcugccucaucggggcggagcacgugaacaacuccuacgagugcgacauccccaucggcgccggcaucugcgccagcuaccagacgcagaccaacuccccgcggcgcgcccggagcguggcgucccagagcaucaucgccuacaccaugucccugggggccgagaacagcgucgccuacuccaacaacagcaucgccauccccaccaacuucacgaucuccgugaccaccgagauccugcccgugagcaugaccaagacgagcgucgacugcaccauguacaucugcggcgacuccaccgagugcagcaaccuccugcugcaguacggguccuucugcacccagcucaaccgcgcgcugacgggcaucgccguggagcaggacaagaacacccaggagguguucgcccaggucaagcagaucuacaagacgcccccgaucaaggacuucgggggcuucaacuucagccagauccugcccgaccccuccaagcccagcaagcgguccuucaucgaggaccuccuguucaacaaggugacccuggccgacgccggcuucaucaagcaguacggggacugccucggcgacaucgcggcccgcgaccugaucugcgcccagaaguucaacgggcugaccgugcucccgccccugcugaccgacgagaugaucgcccaguacaccagcgcccuccuggcgggcaccaucacguccggguggaccuucggcgccggcgccgcccugcagauccccuucgcgaugcagauggccuaccgguucaacgggaucggcgucacccagaacgugcucuacgagaaccagaagcugaucgccaaccaguucaacagcgccaucgggaagauccaggacucccugagcuccaccgccagcgcgcucggcaagcugcaggacguggucaaccagaacgcccaggcccugaacacgcucgugaagcagcuguccagcaacuucggggccaucuccagcgugcugaacgacauccucucccgccuggacaaggucgaggccgaggugcagaucgaccggcugaucaccggccgccuccagagccugcagaccuacgugacccagcagcugauccgggcggccgagauccgcgccagcgccaaccucgccgcgaccaagauguccgagugcguccugggccagagcaagcggguggacuucugcgggaagggcuaccaccugauguccuucccccagagcgccccgcacgggguggucuuccuccacgugacguacguccccgcccaggagaagaacuucaccaccgcccccgcgaucugccacgacggcaaggcccacuucccccgcgaggggguguucguguccaacggcacccacugguucgucacgcagcggaacuucuacgagccgcagaucaucaccaccgacaacaccuucgugagcggcaacugcgacguggucaucgggaucgugaacaacacgguguacgacccccugcagcccgagcuggacuccuucaaggaggagcucgacaaguacuucaagaaccacaccagccccgacgucgaccugggcgacaucuccgggaucaacgccagcguggugaacauccagaaggagaucgaccgccugaacgaggucgccaagaaccucaacgagucccugaucgaccugcaggagcucggcaaguacgagcaguacaucaaguggccgugguacaucuggcugggcuucaucgccgggcugaucgcgaucgugaucgugaccaucaugcucugcugcaugaccagcugcugcuccugccugaagggcugcugcagcugcggguccugcugcaaguucgacgaggacgacagcgagcccguccugaagggcgugaagcuccacuacacguga

SEQ ID NO: 11785 - RNA, 3822 nt, Artificial Sequence
  SARS-CoV-2/Iceland/238/2020__EPI_ISL_417566 spike protein CDS gc (1-1273)
auguucguguuccugguccuccugccccuggugagcucccagugcgugaaccucaccacccgcacgcagcugccgcccgccuacaccaacagcuucacccggggcgucuacuaccccgacaagguguuccgcuccagcgugcugcacuccacccaggaccucuuccugcccuucuucagcaacgucacgugguuccacgccauccacguguccgggaccaacggcaccaagcgguucgacaacccggugcugcccuucaacgacggggucuacuucgcgagcaccgagaaguccaacaucauccgcggcuggaucuucgggacgacccucgacagcaagacccagucccugcugaucgugaacaacgccaccaacguggucaucaaggugugcgaguuccaguucugcaacgaccccuuccucggcguguacuaccacaagaacaacaagagcuggauggaguccgaguuccgggucuacagcuccgccaacaacugcacguucgaguacgugagccagcccuuccugauggaccuggagggcaagcaggggaacuucaagaaccuccgcgaguucguguucaagaacaucgacggcuacuucaagaucuacuccaagcacaccccgaucaaccugguccgggaccugccccagggguucagcgcccucgagccccugguggaccugcccaucggcaucaacaucacccgcuuccagacccuccuggcccugcaccgguccuaccucacgccgggggacagcagcuccggcuggaccgcgggcgccgccgccuacuacgugggguaccugcagccccgcaccuuccugcucaaguacaacgagaacggcaccaucacggacgcggucgacugcgcccuggacccccugagcgagaccaagugcacccucaaguccuucaccguggagaaggggaucuaccagacgagcaacuuccgggugcagcccaccgaguccaucguccgcuucccgaacaucaccaaccugugccccuucggcgagguguucaacgccacccgguucgccagcgucuacgccuggaaccgcaagcggaucuccaacugcguggcggacuacagcgugcuguacaacuccgccagcuucuccacguucaagugcuacggcgucagccccaccaagcucaacgaccugugcuucaccaacguguacgccgacuccuucgugauccgcggggacgagguccggcagaucgcccccggccagaccgggaagaucgccgacuacaacuacaagcugccggacgacuucacgggcugcgugaucgcguggaacagcaacaaccucgacuccaaggucgggggcaacuacaacuaccuguaccgccuguuccgcaagagcaaccucaagcccuucgagcgggacaucuccaccgagaucuaccaggccggcagcacccccugcaacgggguggagggcuucaacugcuacuucccccugcaguccuacggguuccagccgaccaacggcgugggguaccagcccuaccggguggucgugcugagcuucgagcuccugcacgcccccgccacggugugcggccccaagaaguccaccaaccuggucaagaacaagugcgugaacuucaacuucaacggccucaccgggaccggcgugcugaccgagagcaacaagaaguuccugccguuccagcaguucgggcgcgacaucgccgacacgaccgacgcgguccgcgacccccagacccuggagauccucgacaucacccccugcagcuucggcgggguguccgugaucacgccgggcaccaacaccagcaaccaggucgccgugcuguaccagggcgugaacugcaccgagguccccguggccauccacgccgaccagcugacgcccaccuggcggguguacuccaccgggagcaacgucuuccagacccgcgccggcugccucaucggggcggagcacgugaacaacuccuacgagugcgacauccccaucggcgccggcaucugcgccagcuaccagacgcagaccaacuccccgcggcgcgcccggagcguggcgucccagagcaucaucgccuacaccaugucccugggggccgagaacagcgucgccuacuccaacaacagcaucgccauccccaccaacuucacgaucuccgugaccaccgagauccugcccgugagcaugaccaagacgagcgucgacugcaccauguacaucugcggcgacuccaccgagugcagcaaccuccugcugcaguacggguccuucugcacccagcucaaccgcgcgcugacgggcaucgccguggagcaggacaagaacacccaggagguguucgcccaggucaagcagaucuacaagacgcccccgaucaaggacuucgggggcuucaacuucagccagauccugcccgaccccuccaagcccagcaagcgguccuucaucgaggaccuccuguucaacaaggugacccuggccgacgugggcuucaucaagcaguacggggacugccucggcgacaucgccgcgcgcgaccugaucugcgcccagaaguucaacgggcugaccguccucccgccccugcugaccgacgagaugaucgcccaguacaccagcgcccuccuggccggcaccaucacguccggguggaccuucggcgcgggcgccgcccugcagauccccuucgccaugcagauggcguaccgguucaacgggaucggcgugacccagaacgugcucuacgagaaccagaagcugaucgccaaccaguucaacagcgccaucgggaagauccaggacucccugagcuccaccgccagcgcccucggcaagcugcaggacgucgugaaccagaacgcgcaggcccugaacacgcucgugaagcagcuguccagcaacuucggggccaucuccagcguccugaacgacauccucucccgccuggacaagguggaggccgaggugcagaucgaccggcugaucaccggccgccuccagagccugcagaccuacgucacccagcagcugauccgggccgcggagauccgcgccagcgccaaccucgccgccaccaagauguccgagugcgugcugggccagagcaagcggguggacuucugcgggaagggcuaccaccugauguccuucccccagagcgcgccgcacggggucguguuccuccacgucacguacgugcccgcccaggagaagaacuucaccaccgcccccgccaucugccacgacggcaaggcgcacuucccccgcgaggggguguucgucuccaacggcacccacugguucgugacgcagcggaacuucuacgagccgcagaucaucaccaccgacaacaccuucgugagcggcaacugcgacgucgugaucgggaucgugaacaacacggucuacgacccccugcagcccgagcuggacuccuucaaggaggagcucgacaaguacuucaagaaccacaccagccccgacguggaccugggcgacaucuccgggaucaacgccagcguggucaacauccagaaggagaucgaccgccugaacgagguggccaagaaccucaacgagucccugaucgaccugcaggagcucggcaaguacgagcaguacaucaaguggccgugguacaucuggcugggcuucaucgccgggcugaucgccaucgugauggucaccaucaugcucugcugcaugaccagcugcugcuccugccugaagggcugcugcagcugcggguccugcugcaaguucgacgaggacgacagcgagcccgugcugaagggcgugaagcuccacuacacguga

SEQ ID NO: 11786 - RNA, 3822 nt, Artificial Sequence
  SARS-CoV-2/Greece/16/2020__EPI_ISL_418265 spike protein CDS gc (1-1273)
auguucguguuccugguccuccugccccuggugagcucccagugcgugaaccucaccacccgcacgcagcugccgcccgccuacaccaacagcuucacccggggcgucuacuaccccgacaagguguuccgcuccagcgugcugcacuccacccaggaccucuuccugcccuucuucagcaacgucacgugguuccacgccauccacguguccgggaccaacggcaccaagcgguucgacaacccggugcugcccuucaacgacggggucuacuucgcgagcaccgagaaguccaacaucauccgcggcuggaucuucgggacgacccucgacagcaagacccagucccugcugaucgugaacaacgccaccaacguggucaucaaggugugcgaguuccaguucugcaacgaccccuuccucggcguguacuaccacaagaacaacaagagcuggauggaguccgaguuccgggucuacagcuccgccaacaacugcacguucgaguacgugagccagcccuuccugauggaccuggagggcaagcaggggaacuucaagaaccuccgcgaguucguguucaagaacgucgacggcuacuucaagaucuacuccaagcacaccccgaucaaccuggugcgggaccugccccagggguucagcgcccucgagccccugguggaccugcccaucggcaucaacaucacccgcuuccagacccuccuggcccugcaccgguccuaccucacgccgggggacagcagcuccggcuggaccgcgggcgccgccgccuacuacgucggguaccugcagccccgcaccuuccugcucaaguacaacgagaacggcaccaucacggacgcgguggacugcgcccuggacccccugagcgagaccaagugcacccucaaguccuucaccguggagaaggggaucuaccagacgagcaacuuccggguccagcccaccgaguccaucgugcgcuucccgaacaucaccaaccugugccccuucggcgaggucuucaacgccacccgguucgccagcguguacgccuggaaccgcaagcggaucuccaacugcguggcggacuacagcguccuguacaacuccgccagcuucuccacguucaagugcuacggcgugagccccaccaagcucaacgaccugugcuucaccaacguguacgccgacuccuucgucauccgcggggacgaggugcggcagaucgcccccggccagaccgggaagaucgccgacuacaacuacaagcugccggacgacuucacgggcugcgugaucgcguggaacagcaacaaccucgacuccaaggucgggggcaacuacaacuaccuguaccgccuguuccgcaagagcaaccucaagcccuucgagcgggacaucuccaccgagaucuaccaggccggcagcacccccugcaacgggguggagggcuucaacugcuacuucccccugcaguccuacggguuccagccgaccaacggcgugggguaccagcccuaccgggucguggugcugagcuucgagcuccugcacgcccccgccacggucugcggccccaagaaguccaccaaccuggugaagaacaagugcgugaacuucaacuucaacggccucaccgggaccggcguccugaccgagagcaacaagaaguuccugccguuccagcaguucgggcgcgacaucgccgacacgaccgacgcggugcgcgacccccagacccuggagauccucgacaucacccccugcagcuucggcgggguguccgucaucacgccgggcaccaacaccagcaaccagguggccgugcuguaccaggacgucaacugcaccgaggugcccguggccauccacgccgaccagcugacgcccaccuggcgggucuacuccaccggcagcaacguguuccagacccgcgccgggugccucaucggcgcggagcacgugaacaacuccuacgagugcgacauccccaucggggccggcaucugcgccagcuaccagacgcagaccaacuccccgcggcgcgcccggagcgucgcgucccagagcaucaucgccuacaccaugucccugggcgccgagaacagcguggccuacuccaacaacagcaucgccauccccaccaacuucacgaucuccgugaccaccgagauccugcccgucagcaugaccaagacgagcguggacugcaccauguacaucugcggggacuccaccgagugcagcaaccuccugcugcaguacggcuccuucugcacccagcucaaccgcgcgcugacggggaucgccguggagcaggacaagaacacccaggaggucuucgcccaggugaagcagaucuacaagacgcccccgaucaaggacuucggcggguucaacuucagccagauccugcccgaccccuccaagcccagcaagcgguccuucaucgaggaccuccuguucaacaaggugacccuggccgacgccggcuucaucaagcaguacggcgacugccucggggacaucgcggcccgcgaccugaucugcgcccagaaguucaacggccugaccguccucccgccccugcugaccgacgagaugaucgcccaguacaccagcgcccuccuggcggggaccaucacguccggcuggaccuucggggccggcgccgcccugcagauccccuucgcgaugcagauggccuaccgguucaacggcaucggggugacccagaacgugcucuacgagaaccagaagcugaucgccaaccaguucaacagcgccaucggcaagauccaggacucccugagcuccaccgccagcgcgcucgggaagcugcaggacgucgugaaccagaacgcccaggcccugaacacgcucgugaagcagcuguccagcaacuucggcgccaucuccagcguccugaacgacauccucucccgccuggacaagguggaggccgaggugcagaucgaccggcugaucaccgggcgccuccagagccugcagaccuacgucacccagcagcugauccgggcggccgagauccgcgccagcgccaaccucgccgcgaccaagauguccgagugcgugcugggccagagcaagcggguggacuucugcggcaagggguaccaccugauguccuucccccagagcgccccgcacggcgucguguuccuccacgucacguacgugcccgcccaggagaagaacuucaccaccgcccccgcgaucugccacgacgggaaggcccacuucccccgcgagggcguguucgucuccaacgggacccacugguucgugacgcagcggaacuucuacgagccgcagaucaucaccaccgacaacaccuucgugagcggcaacugcgacgucgugaucggcaucgugaacaacacggucuacgacccccugcagcccgagcuggacuccuucaaggaggagcucgacaaguacuucaagaaccacaccagccccgacguggaccugggggacaucuccggcaucaacgccagcguggucaacauccagaaggagaucgaccgccugaacgagguggccaagaaccucaacgagucccugaucgaccugcaggagcucgggaaguacgagcaguacaucaaguggccgugguacaucuggcugggcuucaucgccggccugaucgcgaucgugauggucaccaucaugcucugcugcaugaccagcugcugcuccugccugaaggggugcugcagcugcggcuccugcugcaaguucgacgaggacgacagcgagcccgugcugaagggggugaagcuccacuacacguga

SEQ ID NO: 11787 - RNA, 3822 nt, Artificial Sequence
  SARS-CoV-2/Iceland/319/2020__EPI_ISL_417648 spike protein CDS gc (1-1273)
auguucguguuccugguccuccugccccuggugagcucccagugcgugaaccucaccacccgcacgcagcugccgcccgccuacaccaacagcuucacccggggcgucuacuaccccgacaagguguuccgcuccagcgugcugcacuccacccaggaccucuuccugcccuucuucagcaacgucacgugguuccacgccauccacguguccgggaccaacggcaccaagcgguucgacaacccggugcugcccuucaacgacggggucuacuucgcgagcaccgagaaguccaacaucauccgcggcuggaucuucgggacgacccucgacagcaagacccagucccugcugaucgugaacaacgccaccaacguggucaucaaggugugcgaguuccaguucugcaacgaccccuuccucggcguguacuaccacaagaacaacaagagcuggauggaguccgaguuccgggucuacagcuccgccaacaacugcacguucgaguacgugagccagcccuuccugaucgaccuggagggcaagcaggggaacuucaagaaccuccgcgaguucguguucaagaacaucgacggcuacuucaagaucuacuccaagcacaccccgaucaaccugguccgggaccugccccagggguucagcgcccucgagccccugguggaccugcccaucggcaucaacaucacccgcuuccagacccuccuggcccugcaccgguccuaccucacgccgggggacagcagcuccggcuggaccgcgggcgccgccgccuacuacgugggguaccugcagccccgcaccuuccugcucaaguacaacgagaacggcaccaucacggacgcggucgacugcgcccuggacccccugagcgagaccaagugcacccucaaguccuucaccguggagaaggggaucuaccagacgagcaacuuccgggugcagcccaccgaguccaucguccgcuucccgaacaucaccaaccugugccccuucggcgagguguucaacgccacccgguucgccagcgucuacgccuggaaccgcaagcggaucuccaacugcguggcggacuacagcgugcuguacaacuccgccagcuucuccacguucaagugcuacggcgucagccccaccaagcucaacgaccugugcuucaccaacguguacgccgacuccuucgugauccgcggggacgagguccggcagaucgcccccggccagaccgggaagaucgccgacuacaacuacaagcugccggacgacuucacgggcugcgugaucgcguggaacagcaacaaccucgacuccaaggucgggggcaacuacaacuaccuguaccgccuguuccgcaagagcaaccucaagcccuucgagcgggacaucuccaccgagaucuaccaggccggcagcacccccugcaacgggguggagggcuucaacugcuacuucccccugcaguccuacggguuccagccgaccaacggcgugggguaccagcccuaccggguggucgugcugagcuucgagcuccugcacgcccccgccacggugugcggccccaagaaguccaccaaccuggucaagaacaagugcgugaacuucaacuucaacggccucaccgggaccggcgugcugaccgagagcaacaagaaguuccugccguuccagcaguucgggcgcgacaucgccgacacgaccgacgcgguccgcgacccccagacccuggagauccucgacaucacccccugcagcuucggcgggguguccgugaucacgccgggcaccaacaccagcaaccaggucgccgugcuguaccagggcgugaacugcaccgagguccccguggccauccacgccgaccagcugacgcccaccuggcggguguacuccaccgggagcaacgucuuccagacccgcgccggcugccucaucggggcggagcacgugaacaacuccuacgagugcgacauccccaucggcgccggcaucugcgccagcuaccagacgcagaccaacuccccgcggcgcgcccggagcguggcgucccagagcaucaucgccuacaccaugucccugggggccgagaacagcgucgccuacuccaacaacagcaucgccauccccaccaacuucacgaucuccgugaccaccgagauccugcccgugagcaugaccaagacgagcgucgacugcaccauguacaucugcggcgacuccaccgagugcagcaaccuccugcugcaguacggguccuucugcacccagcucaaccgcgcgcugacgggcaucgccguggagcaggacaagaacacccaggagguguucgcccaggucaagcagaucuacaagacgcccccgaucaaggacuucgggggcuucaacuucagccagauccugcccgaccccuccaagcccagcaagcgguccuucaucgaggaccuccuguucaacaaggugacccuggccgacgccggcuucaucaagcaguacggggacugccucggcgacaucgcggcccgcgaccugaucugcgcccagaaguucaacgggcugaccgugcucccgccccugcugaccgacgagaugaucgcccaguacaccagcgcccuccuggcgggcaccaucacguccggguggaccuucggcgccggcgccgcccugcagauccccuucgcgaugcagauggccuaccgguucaacgggaucggcgucacccagaacgugcucuacgagaaccagaagcugaucgccaaccaguucaacagcgccaucgggaagauccaggacucccugagcuccaccgccagcgcgcucggcaagcugcaggacguggucaaccagaacgcccaggcccugaacacgcucgugaagcagcuguccagcaacuucggggccaucuccagcgugcugaacgacauccucucccgccuggacaaggucgaggccgaggugcagaucgaccggcugaucaccggccgccuccagagccugcagaccuacgugacccagcagcugauccgggcggccgagauccgcgccagcgccaaccucgccgcgaccaagauguccgagugcguccugggccagagcaagcggguggacuucugcgggaagggcuaccaccugauguccuucccccagagcgccccgcacgggguggucuuccuccacgugacguacguccccgcccaggagaagaacuucaccaccgcccccgcgaucugccacgacggcaaggcccacuucccccgcgaggggguguucguguccaacggcacccacugguucgucacgcagcggaacuucuacgagccgcagaucaucaccaccgacaacaccuucgugagcggcaacugcgacguggucaucgggaucgugaacaacacgguguacgacccccugcagcccgagcuggacuccuucaaggaggagcucgacaaguacuucaagaaccacaccagccccgacgucgaccugggcgacaucuccgggaucaacgccagcguggugaacauccagaaggagaucgaccgccugaacgaggucgccaagaaccucaacgagucccugaucgaccugcaggagcucggcaaguacgagcaguacaucaaguggccgugguacaucuggcugggcuucaucgccgggcugaucgcgaucgugauggugaccaucaugcucugcugcaugaccagcugcugcuccugccugaagggcugcugcagcugcggguccugcugcaaguucgacgaggacgacagcgagcccguccugaagggcgugaagcuccacuacacguga

SEQ ID NO: 11788 - RNA, 3822 nt, Artificial Sequence
  SARS-CoV-2/Congo/94/2020__EPI_ISL_417947 spike protein CDS gc (1-1273)
auguucguguuccugguccuccugccccuggugagcucccagugcgugaaccucaccacccgcacgcagcugccgcccgccuacaccaacagcuucacccggggcgucuacuaccccgacaagguguuccgcuccagcgugcugcacuccacccaggaccucuuccugcccuucuucagcaacgucacgugguuccacgccauccacguguccgggaccaacggcaccaagcgguucgacaacccggugcugcccuucaacgacggggucuacuucgcgagcaccgagaaguccaacaucauccgcggcuggaucuucgggacgacccucgacagcaagacccagucccugcugaucgugaacaacgccaccaacguggucaucaaggugugcgaguuccaguucugcaacgaccccuuccucggcguguacuaccacaagaacaacaagagcuggauggaguccgaguuccgggucuacagcuccgccaacaacugcacguucgaguacgugagccagcccuuccugauggaccuggagggcaagcaggggaacuucaagaaccuccgcgaguucguguucaagaacaucgacggcuacuucaagaucuacuccaagcacaccccgaucaaccugguccgggaccugccccagggguucagcgcccucgagccccugguggaccugcccaucggcaucaacaucacccgcuuccagacccuccuggcccugcaccgguccuaccucacgccgggggacagcagcuccggcuggaccgcgggcgccgccgccuacuacgugggguaccugcagccccgcaccuuccugcucaaguacaacgagaacggcaccaucacggacgcggucgacugcgcccuggacccccugagcgagaccaagugcacccucaaguccuucaccguggagaaggggaucuaccagacgagcaacuuccgggugcagcccaccgaguccaucguccgcuucccgaacaucaccaaccugugccccuucggcgagguguucaacgccacccgguucgccagcgucuacgccuggaaccgcaagcggaucuccaacugcguggcggacuacagcgugcuguacaacuccgccagcuucuccacguucaagugcuacggcgucagccccaccaagcucaacgaccugugcuucaccaacguguacgccgacuccuucgugauccgcggggacgagguccggcagaucgcccccggccagaccgggaagaucgccgacuacaacuacaagcugccggacgacuucacgggcugcgugaucgcguggaacagcaacaaccucgacuccaaggucgggggcaacuacaacuaccuguaccgccuguuccgcaagagcaaccucaagcccuucgagcgggacaucuccaccgagaucuaccaggccggcagcacccccugcaacgggguggagggcuucaacugcuacuucccccugcaguccuacggguuccagccgaccaacggcgugggguaccagcccuaccggguggucgugcugagcuucgagcuccugcacgcccccgccacggugugcggccccaagaaguccaccaaccuggucaagaacaagugcgugaacuucaacuucaacggccucaccgggaccggcgugcugaccgagagcaacaagaaguuccugccguuccagcaguucgggcgcgacaucgccgacacgaccgacgcgguccgcgacccccagacccuggagauccucgacaucacccccugcagcuucggcgggguguccgugaucacgccgggcaccaacaccagcaaccaggucgccgugcuguaccagggcgugaacugcaccgagguccccguggccauccacgccgaccagcugacgcccaccuggcggguguacuccaccgggagcaacgucuuccagacccgcgccggcugccucaucggggcggagcacgugaacaacuccuacgagugcgacauccccaucggcgccggcaucugcgccagcuaccagacgcagaccaacuccccgcggcgcgcccggagcguggcgucccagagcaucaucgccuacaccaugucccugggggccgagaacagcgucgccuacuccaacaacagcaucgccauccccaccaacuucacgaucuccgugaccaccgagauccugcccgugagcaugaccaagacgagcgucgacugcaccauguacaucugcggcgacuccaccgagugcagcaaccuccugcugcaguacggguccuucugcacccagcucaaccgcgcgcugacgggcaucgccguggagcaggacaagaacacccaggagguguucgcccaggucaagcagaucuacaagacgcccccgaucaaggacuucgggggcuucaacuucagccagauccugcccgaccccuccaagcccagcaagcgguccuucaucgaggacauccucuucaacaaggugacccuggccgacgccggcuucaucaagcaguacggggacugccugggcgacaucgcggcccgcgaccucaucugcgcccagaaguucaacgggcugaccgugcugccgccccuccugaccgacgagaugaucgcccaguacaccagcgcccugcucgcgggcaccaucacguccggguggaccuucggcgccggcgccgcccugcagauccccuucgcgaugcagauggccuaccgguucaacgggaucggcgucacccagaacgugcuguacgagaaccagaagcucaucgccaaccaguucaacagcgccaucgggaagauccaggacucccugagcuccaccgccagcgcgcugggcaagcuccaggacguggucaaccagaacgcccaggcccugaacacgcuggugaagcagcucuccagcaacuucggggccaucuccagcgugcugaacgacauccugucccgccucgacaaggucgaggccgaggugcagaucgaccggcugaucaccggccgccugcagagccuccagaccuacgugacccagcagcugauccgggcggccgagauccgcgccagcgccaaccuggccgcgaccaagauguccgagugcguccucggccagagcaagcggguggacuucugcgggaagggcuaccaccugauguccuucccccagagcgccccgcacgggguggucuuccugcacgugacguacguccccgcccaggagaagaacuucaccaccgcccccgcgaucugccacgacggcaaggcccacuucccccgcgaggggguguucguguccaacggcacccacugguucgucacgcagcggaacuucuacgagccgcagaucaucaccaccgacaacaccuucgugagcggcaacugcgacguggucaucgggaucgugaacaacacgguguacgacccccuccagcccgagcuggacuccuucaaggaggagcuggacaaguacuucaagaaccacaccagccccgacgucgaccucggcgacaucuccgggaucaacgccagcguggugaacauccagaaggagaucgaccgccugaacgaggucgccaagaaccugaacgagucccucaucgaccugcaggagcugggcaaguacgagcaguacaucaaguggccgugguacaucuggcucggcuucaucgccgggcugaucgcgaucgugauggugaccaucaugcugugcugcaugaccagcugcugcuccugccucaagggcugcugcagcugcggguccugcugcaaguucgacgaggacgacagcgagcccguccugaagggcgugaagcugcacuacacguga

SEQ ID NO: 11789 - RNA, 3822 nt, Artificial Sequence
  SARS-CoV-2/Congo/158/2020__EPI_ISL_417950 spike protein CDS gc (1-1273)
auguucguguuccugguccuccugccccuggugagcucccagugcgugaaccucaccacccgcacgcagcugccgcccgccuacaccaacagcuucacccggggcgucuacuaccccgacaagguguuccgcuccagcgugcugcacuccacccaggaccucuuccugcccuucuucagcaacgucacgugguuccacgccauccacguguccgggaccaacggcaccaagcgguucgacaacccggugcugcccuucaacgacggggucuacuucgcgagcaccgagaaguccaacaucauccgcggcuggaucuucgggacgacccucgacagcaagacccagucccugcugaucgugaacaacgccaccaacguggucaucaaggugugcgaguuccaguucugcaacgaccccuuccucggcguguacuaccacaagaacaacaagagcuggauggaguccgaguuccgggucuacagcuccgccaacaacugcacguucgaguacgugagccagcccuuccugauggaccuggagggcaagcaggggaacuucaagaaccuccgcgaguucguguucaagaacaucgacggcuacuucaagaucuacuccaagcacaccccgaucaaccugguccgggaccugccccagggguucagcgcccucgagccccugguggaccugcccaucggcaucaacaucacccgcuuccagacccuccuggcccugcaccgguccuaccucacgccgggggacagcagcuccggcuggaccgcgggcgccgccgccuacuacgugggguaccugcagccccgcaccuuccugcucaaguacaacgagaacggcaccaucacggacgcggucgacugcgcccuggacccccugagcgagaccaagugcacccucaaguccuucaccguggagaaggggaucuaccagacgagcaacuuccgggugcagcccaccgaguccaucguccgcuucccgaacaucaccaaccugugccccuucggcgagguguucaacgccacccgguucgccagcgucuacgccuggaaccgcaagcggaucuccaacugcguggcggacuacagcgugcuguacaacuccgccagcuucuccacguucaagugcuacggcgucagccccaccaagcucaacgaccugugcuucaccaacguguacgccgacuccuucgugauccgcggggacgagguccggcagaucgcccccggccagaccgggaagaucgccgacuacaacuacaagcugccggacgacuucacgggcugcgugaucgcguggaacagcaacaaccucgacuccaaggucgggggcaacuacaacuaccuguaccgccuguuccgcaagagcaaccucaagcccuucgagcgggacaucuccaccgagaucuaccaggccggcagcacccccugcaacgggguggagggcuucaacugcuacuucccccugcaguccuacggguuccagccgaccaacggcgugggguaccagcccuaccggguggucgugcugagcuucgagcuccugcacgcccccgccacggugugcggccccaagaaguccaccaaccuggucaagaacaagugcgugaacuucaacuucaacggccucaccgggaccggcgugcugaccgagagcaacaagaaguuccugccguuccagcaguucgggcgcgacaucgccgacacgaccgacgcgguccgcgacccccagacccuggagauccucgacaucacccccugcagcuucggcgggguguccgugaucacgccgggcaccaacaccagcaaccaggucgccgugcuguaccaggacgugaacugcaccgagguccccguggccauccacgccgaccagcugacgcccaccuggcggguguacuccaccggcagcaacgucuuccagacccgcgccgggugccucaucggcgcggagcacgugaacaacuccuacgagugcgacauccccaucggggccggcaucugcgccagcuaccagacgcagaccaacuccccgcggcgcgcccggagcguggcgucccagagcaucaucgccuacaccaugucccugggcgccgagaacagcgucgccuacuccaacaacagcaucgccauccccaccaacuucacgaucuccgugaccaccgagauccugcccgugagcaugaccaagacgagcgucgacugcaccauguacaucugcggggacuccaccgagugcagcaaccuccugcugcaguacggcuccuucugcacccagcucaaccgcgcgcugacggggaucgccguggagcaggacaagaacacccaggagguguucgcccaggucaagcagaucuacaagacgcccccgaucaaggacuucggcggguucaacuucagccagauccugcccgaccccuccaagcccagcaagcgguccuucaucgaggaccuccuguucaacaaggugacccuggccgacgccggcuucaucaagcaguacggcgacugccucggggacaucgcggcccgcgaccugaucugcgcccagaaguucaacggccugaccgugcucccgccccugcugaccgacgagaugaucgcccaguacaccagcgcccuccuggcggggaccaucacguccggcuggaccuucggggccggcgccgcccugcagauccccuucgcgaugcagauggccuaccgguucaacggcaucggggucacccagaacgugcucuacgagaaccagaagcugaucgccaaccaguucaacagcgccaucggcaagauccaggacucccugagcuccaccgccagcgcgcucgggaagcugcaggacguggucaaccagaacgcccaggcccugaacacgcucgugaagcagcuguccagcaacuucggcgccaucuccagcgugcugaacgacauccucucccgccuggacaaggucgaggccgaggugcagaucgaccggcugaucaccgggcgccuccagagccugcagaccuacgugacccagcagcugauccgggcggccgagauccgcgccagcgccaaccucgccgcgaccaagauguccgagugcguccugggccagagcaagcggguggacuucugcggcaagggguaccaccugauguccuucccccagagcgccccgcacggcguggucuuccuccacgugacguacguccccgcccaggagaagaacuucaccaccgcccccgcgaucugccacgacgggaaggcccacuucccccgcgagggcguguucguguccaacgggacccacugguucgucacgcagcggaacuucuacgagccgcagaucaucaccaccgacaacaccuuccugagcggcaacugcgacguggugaucggcaucgucaacaacacgguguacgacccccugcagcccgagcucgacuccuucaaggaggagcuggacaaguacuucaagaaccacaccagccccgacguggaccugggggacaucuccggcaucaacgccagcgucgugaacauccagaaggagaucgaccgccucaacgagguggccaagaaccugaacgagucccugaucgaccuccaggagcuggggaaguacgagcaguacaucaaguggccgugguacaucuggcugggcuucaucgccggccucaucgcgaucgucauggugaccaucaugcugugcugcaugaccagcugcugcuccugccugaaggggugcugcagcugcggcuccugcugcaaguucgacgaggacgacagcgagcccgugcucaagggggucaagcugcacuacacguga

SEQ ID NO: 11790 - RNA, 3822 nt, Artificial Sequence
  SARS-CoV-2/USA/UT-00034/2020__EPI_ISL_417977 spike protein CDS gc (1-1273)
auguucguguuccugguccuccugccccuggugagcucccagugcgugaaccucaccacccgcacgcagcugccgcccgccuacaccaacagcuucacccggggcgucuacuaccccgacaagguguuccgcuccagcgugcugcacuccacccaggaccucuuccugcccuucuucagcaacgucacgugguuccacgccauccacguguccgggaccaacggcaccaagcgguucgacaacccggugcugcccuucaacgacggggucuacuucgcgagcaccgagaaguccaacaucauccgcggcuggaucuucgggacgacccucgacagcaagacccagucccugcugaucgugaacaacgccaccaacguggucaucaaggugugcgaguuccaguucugcaacgaccccuuccucggcguguacuacuacaagaacaacaagagcuggauggaguccgaguuccgggucuacagcuccgccaacaacugcacguucgaguacgugagccagcccuuccugauggaccuggagggcaagcaggggaacuucaagaaccuccgcgaguucguguucaagaacaucgacggcuacuucaagaucuacuccaagcacaccccgaucaaccugguccgggaccugccccagggguucagcgcccucgagccccugguggaccugcccaucggcaucaacaucacccgcuuccagacccuccuggcccugcaccgguccuaccucacgccgggggacagcagcuccggcuggaccgcgggcgccgccgccuacuacgugggguaccugcagccccgcaccuuccugcucaaguacaacgagaacggcaccaucacggacgcggucgacugcgcccuggacccccugagcgagaccaagugcacccucaaguccuucaccguggagaaggggaucuaccagacgagcaacuuccgggugcagcccaccgaguccaucguccgcuucccgaacaucaccaaccugugccccuucggcgagguguucaacgccacccgguucgccagcgucuacgccuggaaccgcaagcggaucuccaacugcguggcggacuacagcgugcuguacaacuccgccagcuucuccacguucaagugcuacggcgucagccccaccaagcucaacgaccugugcuucaccaacguguacgccgacuccuucgugauccgcggggacgagguccggcagaucgcccccggccagaccgggaagaucgccgacuacaacuacaagcugccggacgacuucacgggcugcgugaucgcguggaacagcaacaaccucgacuccaaggucgggggcaacuacaacuaccuguaccgccuguuccgcaagagcaaccucaagcccuucgagcgggacaucuccaccgagaucuaccaggccggcagcacccccugcaacgggguggagggcuucaacugcuacuucccccugcaguccuacggguuccagccgaccaacggcgugggguaccagcccuaccggguggucgugcugagcuucgagcuccugcacgcccccgccacggugugcggccccaagaaguccaccaaccuggucaagaacaagugcgugaacuucaacuucaacggccucaccgggaccggcgugcugaccgagagcaacaagaaguuccugccguuccagcaguucgggcgcgacaucgccgacacgaccgacgcgguccgcgacccccagacccuggagauccucgacaucacccccugcagcuucggcgggguguccgugaucacgccgggcaccaacaccagcaaccaggucgccgugcuguaccagggcgugaacugcaccgagguccccguggccauccacgccgaccagcugacgcccaccuggcggguguacuccaccgggagcaacgucuuccagacccgcgccggcugccucaucggggcggagcacgugaacaacuccuacgagugcgacauccccaucggcgccggcaucugcgccagcuaccagacgcagaccaacuccccgcggcgcgcccggagcguggcgucccagagcaucaucgccuacaccaugucccugggggccgagaacagcgucgccuacuccaacaacagcaucgccauccccaccaacuucacgaucuccgugaccaccgagauccugcccgugagcaugaccaagacgagcgucgacugcaccauguacaucugcggcgacuccaccgagugcagcaaccuccugcugcaguacggguccuucugcacccagcucaaccgcgcgcugacgggcaucgccguggagcaggacaagaacacccaggagguguucgcccaggucaagcagaucuacaagacgcccccgaucaaggacuucgggggcuucaacuucagccagauccugcccgaccccuccaagcccagcaagcgguccuucaucgaggaccuccuguucaacaaggugacccuggccgacgccggcuucaucaagcaguacggggacugccucggcgacaucgcggcccgcgaccugaucugcgcccagaaguucaacgggcugaccgugcucccgccccugcugaccgacgagaugaucgcccaguacaccagcgcccuccuggcgggcaccaucacguccggguggaccuucggcgccggcgccgcccugcagauccccuucgcgaugcagauggccuaccgguucaacgggaucggcgucacccagaacgugcucuacgagaaccagaagcugaucgccaaccaguucaacagcgccaucgggaagauccaggacucccugagcuccaccgccagcgcgcucggcaagcugcaggacguggucaaccagaacgcccaggcccugaacacgcucgugaagcagcuguccagcaacuucggggccaucuccagcgugcugaacgacauccucucccgccuggacaaggucgaggccgaggugcagaucgaccggcugaucaccggccgccuccagagccugcagaccuacgugacccagcagcugauccgggcggccgagauccgcgccagcgccaaccucgccgcgaccaagauguccgagugcguccugggccagagcaagcggguggacuucugcgggaagggcuaccaccugauguccuucccccagagcgccccgcacgggguggucuuccuccacgugacguacguccccgcccaggagaagaacuucaccaccgcccccgcgaucugccacgacggcaaggcccacuucccccgcgaggggguguucguguccaacggcacccacugguucgucacgcagcggaacuucuacgagccgcagaucaucaccaccgacaacaccuucgugagcggcaacugcgacguggucaucgggaucgugaacaacacgguguacgacccccugcagcccgagcuggacuccuucaaggaggagcucgacaaguacuucaagaaccacaccagccccgacgucgaccugggcgacaucuccgggaucaacgccagcguggugaacauccagaaggagaucgaccgccugaacgaggucgccaagaaccucaacgagucccugaucgaccugcaggagcucggcaaguacgagcaguacaucaaguggccgugguacaucuggcugggcuucaucgccgggcugaucgcgaucgugauggugaccaucaugcucugcugcaugaccagcugcugcuccugccugaagggcugcugcagcugcggguccugcugcaaguucgacgaggacgacagcgagcccguccugaagggcgugaagcuccacuacacguga

SEQ ID NO: 11791 - RNA, 3822 nt, Artificial Sequence
  SARS-CoV-2/USA/UT-00033/2020__EPI_ISL_417976 spike protein CDS gc (1-1273)
auguucguguuccugguccuccugccccuggugagcucccagugcgugaaccucaccacccgcacgcagcugccgcccgccuacaccaacagcuucacccggggcgucuacuaccccgacaagguguuccgcuccagcgugcugcacuccacccaggaccucuuccugcccuucuucagcaacgucacgugguuccacgccauccacguguccgggaccaacggcaccaagcgguucgacaacccggugcugcccuucaacgacggggucuacuucgcgagcaccgagaaguccaacaucauccgcggcuggaucuucgggacgacccucgacagcaagacccagucccugcugaucgugaacaacgccaccaacguggucaucaaggugugcgaguuccaguucugcaacgaccccuuccucggcguguacuaccacaagaacaacaagagcuggauggaguccgaguuccgggucuacagcuccgccaacaacugcacguucgaguacgugagccagcccuuccugauggaccuggagggcaagcaggggaacuucaagaaccuccgcgaguucguguucaagaacaucgacggcuacuucaagaucuacuccaagcacaccccgaucaaccugguccgggaccugccccagggguucagcgcccucgagccccugguggaccugcccaucggcaucaacaucacccgcuuccagacccuccuggcccugcaccgguccuaccucacgccgggggacagcagcuccggccugaccgcgggcgccgccgccuacuacgugggguaccugcagccccgcaccuuccuccugaaguacaacgagaacggcaccaucacggacgcggucgacugcgcccuggacccccucagcgagaccaagugcacccugaaguccuucaccguggagaaggggaucuaccagacgagcaacuuccgggugcagcccaccgaguccaucguccgcuucccgaacaucaccaaccugugccccuucggcgagguguucaacgccacccgguucgccagcgucuacgccuggaaccgcaagcggaucuccaacugcguggcggacuacagcgugcucuacaacuccgccagcuucuccacguucaagugcuacggcgucagccccaccaagcugaacgaccugugcuucaccaacguguacgccgacuccuucgugauccgcggggacgagguccggcagaucgcccccggccagaccgggaagaucgccgacuacaacuacaagcucccggacgacuucacgggcugcgugaucgcguggaacagcaacaaccuggacuccaaggucgggggcaacuacaacuaccuguaccgccucuuccgcaagagcaaccugaagcccuucgagcgggacaucuccaccgagaucuaccaggccggcagcacccccugcaacgggguggagggcuucaacugcuacuucccccugcaguccuacggguuccagccgaccaacggcgugggguaccagcccuaccggguggucgugcucagcuucgagcugcugcacgcccccgccacggugugcggccccaagaaguccaccaaccucgucaagaacaagugcgugaacuucaacuucaacggccugaccgggaccggcgugcugaccgagagcaacaagaaguuccugccguuccagcaguucgggcgcgacaucgccgacacgaccgacgcgguccgcgacccccagacccucgagauccuggacaucacccccugcagcuucggcgggguguccgugaucacgccgggcaccaacaccagcaaccaggucgccgugcuguaccagggcgugaacugcaccgagguccccguggccauccacgccgaccagcucacgcccaccuggcggguguacuccaccgggagcaacgucuuccagacccgcgccggcugccugaucggggcggagcacgugaacaacuccuacgagugcgacauccccaucggcgccggcaucugcgccagcuaccagacgcagaccaacuccccgcggcgcgcccggagcguggcgucccagagcaucaucgccuacaccaugucccugggggccgagaacagcgucgccuacuccaacaacagcaucgccauccccaccaacuucacgaucuccgugaccaccgagauccuccccgugagcaugaccaagacgagcgucgacugcaccauguacaucugcggcgacuccaccgagugcagcaaccugcugcuccaguacggguccuucugcacccagcugaaccgcgcgcugacgggcaucgccguggagcaggacaagaacacccaggagguguucgcccaggucaagcagaucuacaagacgcccccgaucaaggacuucgggggcuucaacuucagccagauccuccccgaccccuccaagcccagcaagcgguccuucaucgaggaccugcuguucaacaaggugacccucgccgacgccggcuucaucaagcaguacggggacugccugggcgacaucgcggcccgcgaccugaucugcgcccagaaguucaacgggcucaccgugcugccgccccugcucaccgacgagaugaucgcccaguacaccagcgcccugcuggcgggcaccaucacguccggguggaccuucggcgccggcgccgcccuccagauccccuucgcgaugcagauggccuaccgguucaacgggaucggcgucacccagaacgugcuguacgagaaccagaagcugaucgccaaccaguucaacagcgccaucgggaagauccaggacucccucagcuccaccgccagcgcgcugggcaagcugcaggacguggucaaccagaacgcccaggcccucaacacgcuggugaagcagcuguccagcaacuucggggccaucuccagcgugcucaacgacauccugucccgccuggacaaggucgaggccgaggugcagaucgaccggcucaucaccggccgccugcagagccugcagaccuacgugacccagcagcucauccgggcggccgagauccgcgccagcgccaaccuggccgcgaccaagauguccgagugcguccugggccagagcaagcggguggacuucugcgggaagggcuaccaccucauguccuucccccagagcgccccgcacgggguggucuuccugcacgugacguacguccccgcccaggagaagaacuucaccaccgcccccgcgaucugccacgacggcaaggcccacuucccccgcgaggggguguucguguccaacggcacccacugguucgucacgcagcggaacuucuacgagccgcagaucaucaccaccgacaacaccuucgugagcggcaacugcgacguggucaucgggaucgugaacaacacgguguacgacccccugcagcccgagcucgacuccuucaaggaggagcuggacaaguacuucaagaaccacaccagccccgacgucgaccugggcgacaucuccgggaucaacgccagcguggugaacauccagaaggagaucgaccgccucaacgaggucgccaagaaccugaacgagucccugaucgaccuccaggagcugggcaaguacgagcaguacaucaaguggccgugguacaucuggcugggcuucaucgccgggcucaucgcgaucgugauggugaccaucaugcugugcugcaugaccagcugcugcuccugccugaagggcugcugcagcugcggguccugcugcaaguucgacgaggacgacagcgagcccguccucaagggcgugaagcugcacuacacguga

SEQ ID NO: 11792 - RNA, 3822 nt, Artificial Sequence
  SARS-CoV-2/USA/WI-13/2020__EPI_ISL_417516 spike protein CDS gc (1-1273)
auguucguguuccugguccuccugccccuggugagcucccagugcgugaaccucaccacccgcacgcagcugccgcccgccuacaccaacagcuucacccggggcgucuacuaccccgacaagguguuccgcuccagcgugcugcacuccacccaggaccucuuccugcccuucuucagcaacgucacgugguuccacgccauccacguguccgggaccaacggcaccaagcgguucgacaacccggugcugcccuucaacgacggggucuacuucgcgagcaccgagaaguccaacaucauccgcggcuggaucuucgggacgacccucgacagcaagacccagucccugcugaucgugaacaacgccaccaacguggucaucaaggugugcgaguuccaguucugcaacgaccccuuccucggcguguacuaccacaagaacaacaagagcuggauggaguccgaguuccgggucuacagcuccgccaacaacugcacguucgaguacgugagccagcccuuccugauggaccuggagggcaagcaggggaacuucaagaaccuccgcgaguucguguucaagaacaucgacggcuacuucaagaucuacuccaagcacaccccgaucaaccugguccgggaccugccccagggguucagcgcccucgagccccugguggaccugcccaucggcaucaacaucacccgcuuccagacccuccuggcccugcaccgguccuaccucacgccgggggacagcagcuccggcuggaccgcgggcgccgccgccuacuacgugggguaccugcagccccgcaccuuccugcucaaguacaacgagaacggcaccaucacggacgcggucgacugcgcccuggacccccugagcgagaccaagugcacccucaaguccuucaccguggagaaggggaucuaccagacgagcaacuuccgggugcugcccaccgaguccaucguccgcuucccgaacaucaccaaccugugccccuucggcgagguguucaacgccacccgguucgccagcgucuacgccuggaaccgcaagcggaucuccaacugcguggcggacuacagcgugcucuacaacuccgccagcuucuccacguucaagugcuacggcgucagccccaccaagcugaacgaccugugcuucaccaacguguacgccgacuccuucgugauccgcggggacgagguccggcagaucgcccccggccagaccgggaagaucgccgacuacaacuacaagcucccggacgacuucacgggcugcgugaucgcguggaacagcaacaaccuggacuccaaggucgggggcaacuacaacuaccuguaccgccucuuccgcaagagcaaccugaagcccuucgagcgggacaucuccaccgagaucuaccaggccggcagcacccccugcaacgggguggagggcuucaacugcuacuucccccugcaguccuacggguuccagccgaccaacggcgugggguaccagcccuaccggguggucgugcucagcuucgagcugcugcacgcccccgccacggugugcggccccaagaaguccaccaaccucgucaagaacaagugcgugaacuucaacuucaacggccugaccgggaccggcgugcugaccgagagcaacaagaaguuccugccguuccagcaguucgggcgcgacaucgccgacacgaccgacgcgguccgcgacccccagacccucgagauccuggacaucacccccugcagcuucggcgggguguccgugaucacgccgggcaccaacaccagcaaccaggucgccgugcuguaccagggcgugaacugcaccgagguccccguggccauccacgccgaccagcucacgcccaccuggcggguguacuccaccgggagcaacgucuuccagacccgcgccggcugccugaucggggcggagcacgugaacaacuccuacgagugcgacauccccaucggcgccggcaucugcgccagcuaccagacgcagaccaacuccccgcggcgcgcccggagcguggcgucccagagcaucaucgccuacaccaugucccugggggccgagaacagcgucgccuacuccaacaacagcaucgccauccccaccaacuucacgaucuccgugaccaccgagauccuccccgugagcaugaccaagacgagcgucgacugcaccauguacaucugcggcgacuccaccgagugcagcaaccugcugcuccaguacggguccuucugcacccagcugaaccgcgcgcugacgggcaucgccguggagcaggacaagaacacccaggagguguucgcccaggucaagcagaucuacaagacgcccccgaucaaggacuucgggggcuucaacuucagccagauccuccccgaccccuccaagcccagcaagcgguccuucaucgaggaccugcuguucaacaaggugacccucgccgacgccggcuucaucaagcaguacggggacugccugggcgacaucgcggcccgcgaccugaucugcgcccagaaguucaacgggcucaccgugcugccgccccugcucaccgacgagaugaucgcccaguacaccagcgcccugcuggcgggcaccaucacguccggguggaccuucggcgccggcgccgcccuccagauccccuucgcgaugcagauggccuaccgguucaacgggaucggcgucacccagaacgugcuguacgagaaccagaagcugaucgccaaccaguucaacagcgccaucgggaagauccaggacucccucagcuccaccgccagcgcgcugggcaagcugcaggacguggucaaccagaacgcccaggcccucaacacgcuggugaagcagcuguccagcaacuucggggccaucuccagcgugcucaacgacauccugucccgccuggacaaggucgaggccgaggugcagaucgaccggcucaucaccggccgccugcagagccugcagaccuacgugacccagcagcucauccgggcggccgagauccgcgccagcgccaaccuggccgcgaccaagauguccgagugcguccugggccagagcaagcggguggacuucugcgggaagggcuaccaccucauguccuucccccagagcgccccgcacgggguggucuuccugcacgugacguacguccccgcccaggagaagaacuucaccaccgcccccgcgaucugccacgacggcaaggcccacuucccccgcgaggggguguucguguccaacggcacccacugguucgucacgcagcggaacuucuacgagccgcagaucaucaccaccgacaacaccuucgugagcggcaacugcgacguggucaucgggaucgugaacaacacgguguacgacccccugcagcccgagcucgacuccuucaaggaggagcuggacaaguacuucaagaaccacaccagccccgacgucgaccugggcgacaucuccgggaucaacgccagcguggugaacauccagaaggagaucgaccgccucaacgaggucgccaagaaccugaacgagucccugaucgaccuccaggagcugggcaaguacgagcaguacaucaaguggccgugguacaucuggcugggcuucaucgccgggcucaucgcgaucgugauggugaccaucaugcugugcugcaugaccagcugcugcuccugccugaagggcugcugcagcugcggguccugcugcaaguucgacgaggacgacagcgagcccguccucaagggcgugaagcugcacuacacguga

SEQ ID NO: 11793 - RNA, 3819 nt, Artificial Sequence
  SARS-CoV-2/India/1-27/2020__EPI_ISL_413522 spike protein CDS gc (1-1272)
auguucguguuccugguccuccugccccuggugagcucccagugcgugaaccucaccacccgcacgcagcugccgcccgccuacaccaacagcuucacccggggcgucuacuaccccgacaagguguuccgcuccagcgugcugcacuccacccaggaccucuuccugcccuucuucagcaacgucacgugguuccacgccauccacguguccgggaccaacggcaccaagcgguucgacaacccggugcugcccuucaacgacggggucuacuucgcgagcaccgagaaguccaacaucauccgcggcuggaucuucgggacgacccucgacagcaagacccagucccugcugaucgugaacaacgccaccaacguggucaucaaggugugcgaguuccaguucugcaacgaccccuuccucggcguguaccacaagaacaacaagagcuggauggaguccgaguuccgggucuacagcuccgccaacaacugcacguucgaguacgugagccagcccuuccugauggaccuggagggcaagcaggggaacuucaagaaccuccgcgaguucguguucaagaacaucgacggcuacuucaagaucuacuccaagcacaccccgaucaaccugguccgggaccugccccagggguucagcgcccucgagccccugguggaccugcccaucggcaucaacaucacccgcuuccagacccuccuggcccugcaccgguccuaccucacgccgggggacagcagcuccggcuggaccgcgggcgccgccgccuacuacgugggguaccugcagccccgcaccuuccugcucaaguacaacgagaacggcaccaucacggacgcggucgacugcgcccuggacccccugagcgagaccaagugcacccucaaguccuucaccguggagaaggggaucuaccagacgagcaacuuccgggugcagcccaccgaguccaucguccgcuucccgaacaucaccaaccugugccccuucggcgagguguucaacgccacccgguucgccagcgucuacgccuggaaccgcaagcggaucuccaacugcguggcggacuacagcgugcuguacaacuccgccagcuucuccacguucaagugcuacggcgucagccccaccaagcucaacgaccugugcuucaccaacguguacgccgacuccuucgugauccgcggggacgaggucauccagaucgcccccggccagaccgggaagaucgccgacuacaacuacaagcugccggacgacuucacgggcugcgugaucgcguggaacagcaacaaccucgacuccaaggucgggggcaacuacaacuaccuguaccggcuguuccgcaagagcaaccucaagcccuucgagcgggacaucuccaccgagaucuaccaggccggcagcacccccugcaacgggguggagggcuucaacugcuacuucccccugcaguccuacggguuccagccgaccaacggcgugggguaccagcccuaccgcguggucgugcugagcuucgagcuccugcacgcccccgccacggugugcggccccaagaaguccaccaaccuggucaagaacaagugcgugaacuucaacuucaacggccucaccgggaccggcgugcugaccgagagcaacaagaaguuccugccguuccagcaguucgggcgggacaucgccgacacgaccgacgcgguccgcgacccccagacccuggagauccucgacaucacccccugcagcuucggcgggguguccgugaucacgccgggcaccaacaccagcaaccaggucgccgugcuguaccaggacgugaacugcaccgagguccccguggccauccacgccgaccagcugacgcccaccuggcgcguguacuccaccggcagcaacgucuuccagacccgggccgggugccucaucggcgcggagcacgugaacaacuccuacgagugcgacauccccaucggggccggcaucugcgccagcuaccagacgcagaccaacuccccgcgccgggcccgcagcguggcgucccagagcaucaucgccuacaccaugucccugggcgccgagaacagcgucgccuacuccaacaacagcaucgccauccccaccaacuucacgaucuccgugaccaccgagauccugcccgugagcaugaccaagacgagcgucgacugcaccauguacaucugcggggacuccaccgagugcagcaaccuccugcugcaguacggcuccuucugcacccagcucaaccgggcgcugacggggaucgccguggagcaggacaagaacacccaggagguguucgcccaggucaagcagaucuacaagacgcccccgaucaaggacuucggcggguucaacuucagccagauccugcccgaccccuccaagcccagcaagcgcuccuucaucgaggaccuccuguucaacaaggugacccuggccgacgccggcuucaucaagcaguacggcgacugccucggggacaucgcggcccgggaccugaucugcgcccagaaguucaacggccugaccgugcucccgccccugcugaccgacgagaugaucgcccaguacaccagcgcccuccuggcggggaccaucacguccggcuggaccuucggggccggcgccgcccugcagauccccuucgcgaugcagauggccuaccgcuucaacggcaucggggucacccagaacgugcucuacgagaaccagaagcugaucgccaaccaguucaacagcgccaucggcaagauccaggacucccugagcuccaccgccagcgcgcucgggaagcugcaggacguggucaaccagaacgcccaggcccugaacacgcucgugaagcagcuguccagcaacuucggcgccaucuccagcgugcugaacgacauccucucccggcuggacaaggucgaggccgaggugcagaucgaccgccugaucaccgggcggcuccagagccugcagaccuacgugacccagcagcugauccgcgcggccgagauccgggccagcgccaaccucgccgcgaccaagauguccgagugcguccugggccagagcaagcgcguggacuucugcggcaagggguaccaccugauguccuucccccagagcgccccgcacggcguggucuuccuccacgugacguacguccccgcccaggagaagaacuucaccaccgcccccgcgaucugccacgacgggaaggcccacuucccccgggagggcguguucguguccaacgggacccacugguucgucacgcagcgcaacuucuacgagccgcagaucaucaccaccgacaacaccuucgugagcggcaacugcgacguggucaucggcaucgugaacaacacgguguacgacccccugcagcccgagcuggacuccuucaaggaggagcucgacaaguacuucaagaaccacaccagccccgacgucgaccugggggacaucuccggcaucaacgccagcguggugaacauccagaaggagaucgaccggcugaacgaggucgccaagaaccucaacgagucccugaucgaccugcaggagcucgggaaguacgagcaguacaucaaguggccgugguacaucuggcugggcuucaucgccggccugaucgcgaucgugauggugaccaucaugcucugcugcaugaccagcugcugcuccugccugaaggggugcugcagcugcggcuccugcugcaaguucgacgaggacgacagcgagcccguccugaagggggugaagcuccacuacacguga

SEQ ID NO: 11794 - RNA, 3804 nt, Artificial Sequence
  SARS-CoV-2/pangolin/Guangxi/P4L/2017__EPI_ISL_410538 spike protein CDS gc (1-1267)
auguucguguuccuguucguccucccccuggugagcucccagugcgugaaccugaccacccgcacgggcaucccgcccggguacaccaacagcuccacccggggcgucuacuaccccgacaagguguuccgcagcuccauccuccaccugacccaggaccuguuccuccccuucuucagcaacgugacgugguucaacaccaucaacuaccagggcggguucaagaaguucgacaacccgguccugcccuucaacgacgggguguacuucgccuccaccgagaaguccaacaucauccggggcuggaucuucggcaccacgcuggacgcccgcacccagagccuccugaucgugaacaacgcgaccaacgucgugaucaaggugugcgaguuccaguucugcaccgaccccuuccugggggucuacuaccacaacaacaacaagacguggguggagaacgaguuccggguguacagcuccgccaacaacugcaccuucgaguacaucagccagcccuuccucauggaccuggagggcaagcaggggaacuucaagaaccugcgcgaguucgucuucaagaacguggacggcuacuucaagaucuacuccaagcacaccccgaucgaccucgugcgggaccugccccgcggguucgccgcccuggagccccucgucgaccugcccaucggcaucaacaucacccgguuccagacgcugcucgcccugcaccgcagcuaccugaccccgggcaaccucgaguccggguggaccaccggcgcggccgccuacuacgugggguaccugcagcagcggacguuccugcucagcuacaaccagaacggcaccaucaccgacgccguggacugcucccuggacccccugagcgagaccaagugcacgcucaagucccugaccgucgagaagggcaucuaccagaccagcaacuuccgcgugcagcccaccaucagcaucgugcgguuccccaacaucacgaaccugugcccguucggggaggucuucaacgcguccaaguucgccagcguguacgccuggaaccgcaagcggaucuccaacugcgucgccgacuacagcgugcucuacaacuccaccagcuucuccaccuucaagugcuacggcgugagccccaccaagcugaacgaccugugcuucacgaacgucuacgccgacuccuucguggugaagggggacgagguccgccagaucgcgcccggccagaccggggugaucgccgacuacaacuacaagcuccccgacgacuucaccggcugcgugaucgccuggaacagcgucaagcaggacgcccugaccggcgggaacuacggcuaccuguaccgccucuuccggaaguccaagcugaagccguucgagcgggacaucagcacggagaucuaccaggccggguccacccccugcaacggccagguggggcugaacugcuacuacccccucgagcgcuacggcuuccaccccaccaccggcgugaacuaccagccguuccgggucguggugcugagcuucgagcugcucaacgggcccgcgaccgucugcggccccaagcuguccacgacccuggugaaggacaagugcgugaacuucaacuucaacgggcugaccggcaccgggguccucacgaccagcaagaagcaguuccugcccuuccagcaguucggccgcgacaucuccgacaccaccgacgccgugcgcgacccgcagacgcuggagauccucgacaucacccccugcagcuucggcgggguguccgucaucacccccggcaccaacacgagcaaccagguggccgugcuguaccaggacgucaacugcaccgaggugccgauggccauccacgccgagcagcugacccccgcguggcggguguacagcgccggggccaacgucuuccagacccgcgccggcugccucgugggcgccgagcacgugaacaacuccuacgagugcgacauccccgucggggcgggcaucugcgccagcuaccacuccaugagcucccugcggagcgugaaccagcgcuccaucaucgccuacacgaugagccugggggccgagaacuccguggcguacagcaacaacuccaucgccauccccaccaacuucaccaucagcgucaccacggagauccucccgguguccaugaccaagaccagcguggacugcaccauguacaucugcggcgacuccaucgagugcagcaaccugcugcuccaguacggguccuucugcacgcagcugaaccgggcccugaccggcaucgccgucgagcaggacaagaacacccaggagguguucgcccaggugaagcagaucuacaagaccccgcccaucaaggacuucggcggguucaacuucagccagauccuccccgaccccagcaagcccuccaagcgcagcuucaucgaggaccugcuguucaacaaggucacgcucgcggacgccggcuucaucaagcaguacggggacugccugggcgacaucgccgcccgggaccugaucugcgcccagaaguucaacgggcucaccgugcugccgccccugcucaccgacgagaugaucgcgcaguacaccuccgcccugcuggccggcacgaucaccagcggcuggaccuucggggccggcgccgcgcuccagauccccuucgccaugcagauggccuaccgcuucaacgggaucggcgugacccagaacguccuguacgagaaccagaagcugaucgccaaccaguucaacuccgcgaucgggaagauccaggacagccucuccagcacggccuccgcccugggcaagcugcaggacguggugaaccagaacgcccaggcccucaacacccuggucaagcagcugagcuccaacuucggcgcgaucagcuccgugcucaacgacauccugagccggcuggacaagguggaggccgagguccagaucgaccgccucaucaccgggcggcugcagucccugcagaccuacgugacccagcagcucauccgcgccgccgagauccgggccagcgcgaaccuggccgccacgaagauguccgagugcgugcugggccagagcaagcgcgucgacuucugcgggaagggcuaccaccucauguccuucccccagagcgcgccccacgggguggucuuccugcacgugaccuacgugcccgcccaggagaagaacuucaccaccgccccggccaucugccacgagggcaaggcccacuucccccgggagggcgucuucgugagcaacgggacgcacugguucaucacccagcgcaacuucuacgagccccagaucaucaccaccgacaacacguucguguccggcagcugcgacgucgugaucgggaucgugaacaacaccgucuacgacccccugcagccggagcucgacuccuucaaggaggagcuggacaaguacuucaagaaccacaccagccccgacguggaccugggcgacaucuccggcaucaacgccagcguggucaacauccagaaggagaucgaccggcucaacgagguggcgaagaaccugaacgagucccccaucgaccugcaggagcucgggaaguacgagcaguacaucaaguggcccugguacaucuggcugggcuucaucgccgggcugaucgccaucaucauggugaccaucaugcucugcugcaugacgagcugcugcuccugccugaagggcugcugcagcugcggguccugcugcaaguucgacgaggacgacagcgagccgguccugaagggcgugaagcuccacuacaccuga

SEQ ID NO: 11795 - RNA, 3804 nt, Artificial Sequence
  SARS-CoV-2/pangolin/Guangxi/P5L/2017__EPI_ISL_410540 spike protein CDS gc (1-1267)
auguucguguuccuguucguccucccccuggugagcucccagugcgugaaccugaccacccgcacgggcaucccgcccggguacaccaacagcuccacccggggcgucuacuaccccgacaagguguuccgcagcuccauccuccaccugacccaggaccuguuccuccccuucuucagcaacgugacgugguucaacaccaucaacuaccagggcggguucaagaaguucgacaacccgguccugcccuucaacgacgggguguacuucgccuccaccgagaaguccaacaucauccggggcuggaucuucggcaccacgcuggacgcccgcacccagagccuccugaucgugaacaacgcgaccaacgucgugaucaaggugugcgaguuccaguucugcaccgaccccuuccugggggucuacuaccacaacaacaacaagacguggguggagaacgaguuccggguguacagcuccgccaacaacugcaccuucgaguacaucagccagcccuuccucauggaccuggagggcaagcaggggaacuucaagaaccugcgcgaguucgucuucaagaacguggacggcuacuucaagaucuacuccaagcacaccccgaucgaccucgugcgggaccugccccgcggguucgccgcccuggagccccucgucgaccugcccaucggcaucaacaucacccgguuccagacgcugcucgcccugcaccgcagcuaccugaccccgggcaagcucgaguccggguggaccaccggcgcggccgccuacuacgugggguaccugcagcagcggacguuccugcucagcuacaaccagaacggcaccaucaccgacgccguggacugcucccuggacccccugagcgagaccaagugcacgcucaagucccugaccgucgagaagggcaucuaccagaccagcaacuuccgcgugcagcccaccaucagcaucgugcgguuccccaacaucacgaaccugugcccguucggggaggucuucaacgcguccaaguucgccagcguguacgccuggaaccgcaagcggaucuccaacugcgucgccgacuacagcgugcucuacaacuccaccagcuucuccaccuucaagugcuacggcgugagccccaccaagcugaacgaccugugcuucacgaacgucuacgccgacuccuucguggugaagggggacgagguccgccagaucgcgcccggccagaccggggugaucgccgacuacaacuacaagcuccccgacgacuucaccggcugcgugaucgccuggaacagcgucaagcaggacgcccugaccggcgggaacuacggcuaccuguaccgccucuuccggaaguccaagcugaagccguucgagcgggacaucagcacggagaucuaccaggccggguccacccccugcaacggccagguggggcugaacugcuacuacccccucgagcgcuacggcuuccaccccaccaccggcgugaacuaccagccguuccgggucguggugcugagcuucgagcugcucaacgggcccgcgaccgucugcggccccaagcuguccacgacccuggugaaggacaagugcgugaacuucaacuucaacgggcugaccggcaccgggguccucacgaccagcaagaagcaguuccugcccuuccagcaguucggccgcgacaucuccgacaccaccgacgccgugcgcgacccgcagacgcuggagauccucgacaucacccccugcagcuucggcgggguguccgucaucacccccggcaccaacacgagcaaccagguggccgugcuguaccaggacgucaacugcaccgaggugccgauggccauccacgccgagcagcugacccccgcguggcggguguacagcgccggggccaacgucuuccagacccgcgccggcugccucgugggcgccgagcacgugaacaacuccuacgagugcgacauccccgucggggcgggcaucugcgccagcuaccacuccaugagcuccuuccggagcgugaaccagcgcuccaucaucgccuacacgaugagccugggggccgagaacuccguggcguacagcaacaacuccaucgccauccccaccaacuucaccaucagcgucaccacggagauccugccgguguccaugaccaagaccagcguggacugcaccauguacaucugcggcgacuccaucgagugcagcaaccuccugcugcaguacggguccuucugcacgcagcucaaccgggcccugaccggcaucgccgucgagcaggacaagaacacccaggagguguucgcccaggugaagcagaucuacaagaccccgcccaucaaggacuucggcggguucaacuucagccagauccugcccgaccccagcaagcccuccaagcgcagcuucaucgaggaccuccuguucaacaaggucacgcuggcggacgccggcuucaucaagcaguacggggacugccucggcgacaucgccgcccgggaccugaucugcgcccagaaguucaacgggcugaccgugcucccgccccugcugaccgacgagaugaucgcgcaguacaccuccgcccuccuggccggcacgaucaccagcggcuggaccuucggggccggcgccgcgcugcagauccccuucgccaugcagauggccuaccgcuucaacgggaucggcgugacccagaacguccucuacgagaaccagaagcugaucgccaaccaguucaacuccgcgaucgggaagauccaggacagccuguccagcacggccuccgcccucggcaagcugcaggacguggugaaccagaacgcccaggcccugaacacccucgucaagcagcugagcuccaacuucggcgcgaucagcuccgugcugaacgacauccucagccggcuggacaagguggaggccgagguccagaucgaccgccugaucaccgggcggcuccagucccugcagaccuacgugacccagcagcugauccgcgccgccgagauccgggccagcgcgaaccucgccgccacgaagauguccgagugcgugcugggccagagcaagcgcgucgacuucugcgggaagggcuaccaccugauguccuucccccagagcgcgccccacgggguggucuuccuccacgugaccuacgugcccgcccaggagaagaacuucaccaccgccccggccaucugccacgagggcaaggcccacuucccccgggagggcgucuucgugagcaacgggacgcacugguucaucacccagcgcaacuucuacgagccccagaucaucaccaccgacaacacguucguguccggcagcugcgacgucgugaucgggaucgugaacaacaccgucuacgacccccugcagccggagcuggacuccuucaaggaggagcucgacaaguacuucaagaaccacaccagccccgacguggaccugggcgacaucuccggcaucaacgccagcguggucaacauccagaaggagaucgaccggcugaacgagguggcgaagaaccucaacgagucccugaucgaccugcaggagcucgggaaguacgagcaguacaucaaguggcccugguacaucuggcugggcuucaucgccgggcugaucgccaucaucauggugaccaucaugcucugcugcaugacgagcugcugcuccugccugaagggcugcugcagcugcggguccugcugcaaguucgacgaggacgacagcgagcccguccugaagggcgugaagcuccacuacaccuga

SEQ ID NO: 11796 - RNA, 3804 nt, Artificial Sequence
  SARS-CoV-2/pangolin/Guangxi/P5E/2017__EPI_ISL_410541 spike protein CDS gc (1-1267)
auguucguguuccuguucguccucccccuggugagcucccagugcgugaaccugaccacccgcacgggcaucccgcccggguacaccaacagcuccacccggggcgucuacuaccccgacaagguguuccgcagcuccauccuccaccugacccaggaccuguuccuccccuucuucagcaacgugacgugguucaacaccaucaccuaccagggcggguccaagaaguucgacaacccgguccugcccuucaacgacgggguguacuucgccagcaccgagaaguccaacaucauccggggcuggaucuucggcacgacccuggacgcccgcacccagagccuccugaucgugaacaacgcgaccaacgucgugaucaaggugugcgaguuccaguucugcacggaccccuuccugggggucuacuaccacaacaacaacaagaccuggguggagaacgaguuccggguguacuccagcgccaacaacugcaccuucgaguacaucucccagcccuuccucauggaccuggagggcaagcaggggaacuucaagaaccugcgcgaguucgucuucaagaacguggacggcuacuucaagaucuacagcaagcacaccccgaucgaccucgugcgggaccugccccgcggguucgccgcccuggagccccucgucgaccugcccaucggcaucaacaucacgcgguuccagacccugcucgcccugcaccgcuccuaccugaccccgggcaagcucgagagcggguggaccacgggcgcggccgccuacuacgugggguaccugcagcagcggaccuuccugcucuccuacaaccagaacggcaccaucaccgacgccguggacugcagccuggacccccuguccgagacgaagugcacccucaagagccugaccgucgagaagggcaucuaccagaccagcaacuuccgcgugcagcccacgaucuccaucgugcgguuccccaacaucaccaaccugugcccguucggggaggucuucaacgcgagcaaguucgccuccguguacgccuggaaccgcaagcggaucagcaacugcgucgccgacuacuccgugcucuacaacagcaccuccuucagcaccuucaagugcuacggcgugucccccacgaagcugaacgaccugugcuucaccaacgucuacgccgacagcuucguggugaagggggacgagguccgccagaucgcgcccggccagaccggggugaucgccgacuacaacuacaagcuccccgacgacuucaccggcugcgugaucgccuggaacuccgucaagcaggacgcccugacgggcgacaacuacggguaccuguaccggcuguuccgcaagagcaagcucaagccguucgagcgggacaucuccaccgagaucuaccaggccggcagcacccccugcaacggccagguggggcugaacugcuacuacccccucgagcgcuacggguuccaccccaccaccggcgugaacuaccagccguuccgggucguggugcuguccuucgagcugcucaacggccccgcgacggucugcgggcccaagcugagcaccacccuggugaaggacaagugcgugaacuucaacuucaacggccugaccgggacgggcguccucaccaccuccaagaagcaguuccugcccuuccagcaguucgggcgcgacaucagcgacaccacggacgccgugcgcgacccgcagacccuggagauccucgacaucacccccugcuccuucggcggcgugagcgucaucacccccgggacgaacaccagcaaccagguggccgugcuguaccaggacgucaacugcaccgaggugccgauggccauccacgccgagcagcugacccccgcguggcggguguacuccgccggcgccaacgucuuccagacgcgcgccgggugccucgugggcgccgagcacgugaacaacagcuacgagugcgacauccccgucggcgcggggaucugcgccuccuaccacagcauguccagcuuccgguccgugaaccagcgcagcaucaucgccuacaccaugucccugggcgccgagaacagcguggcguacuccaacaacagcaucgccauccccaccaacuucaccaucuccgucacgaccgagauccugccggugagcaugaccaagaccuccguggacugcacgauguacaucugcggggacagcaucgagugcuccaaccuccugcugcaguacggcagcuucugcacccagcucaaccgggcccugaccgggaucgccgucgagcaggacaagaacacccaggagguguucgcccaggugaagcagaucuacaagacgccgcccaucaaggacuucggcggcuucaacuucagccagauccugcccgaccccuccaagcccagcaagcgcuccuucaucgaggaccuccuguucaacaaggucacccuggcggacgccggguucaucaagcaguacggcgacugccucggggacaucgccgcccgggaccugaucugcgcccagaaguucaacggccugaccgugcucccgccccugcugaccgacgagaugaucgcgcaguacacgagcgcccuccuggccgggaccaucaccuccggcuggaccuucggcgccggggccgcgcugcagauccccuucgccaugcagauggccuaccgcuucaacggcaucggggugacgcagaacguccucuacgagaaccagaagcugaucgccaaccaguucaacagcgcgaucggcaagauccaggacucccugagcuccaccgccagcgcccucgggaagcugcaggacguggugaaccagaacgcccaggcccugaacacccucgucaagcagcuguccagcaacuucggcgcgaucuccagcgugcugaacgacauccucucccggcuggacaagguggaggccgagguccagaucgaccgccugaucaccggccggcuccagagccugcagaccuacgugacgcagcagcugauccgcgccgccgagauccgggccuccgcgaaccucgccgccaccaagaugagcgagugcgugcuggggcaguccaagcgcgucgacuucugcggcaagggguaccaccugaugagcuucccccagagcgcgccccacggcguggucuuccuccacgugaccuacgugcccgcccaggagaagaacuucaccacggccccggccaucugccacgaggggaaggcccacuucccccgggagggcgucuucguguccaacggcacccacugguucaucacccagcgcaacuucuacgagccccagaucaucaccacggacaacaccuucgugagcggguccugcgacgucgugaucggcaucgugaacaacaccgucuacgacccccugcagccggagcuggacagcuucaaggaggagcucgacaaguacuucaagaaccacaccucccccgacguggaccugggggacaucagcggcaucaacgccuccguggucaacauccagaaggagaucgaccggcugaacgagguggcgaagaaccucaacgagagccugaucgaccugcaggagcucggcaaguacgagcaguacaucaaguggcccugguacaucuggcugggguucaucgccggccugaucgccaucaucauggugacgaucaugcucugcugcaugaccuccugcugcagcugccugaaggggugcugcuccugcggcagcugcugcaaguucgacgaggacgacuccgagcccguccugaagggggugaagcuccacuacaccuga

SEQ ID NO: 11797 - RNA, 3798 nt, Artificial Sequence
  SARS-CoV-2/pangolin/Guangxi/P1E/2017__EPI_ISL_410539 spike protein CDS gc (1-1265)
auguucguguuccuguucguccucccccuggugagcucccagugcgugaaccugaccacccgcacgggcauccagccgggguacaccaacagcuccacccggggcgucuacuaccccgacaagguguuccgcagcuccauccuccaccugacccaggaccuguuccuccccuucuucagcaacgugacgugguucaacaccaucaacuaccagggcggguucaagaaguucgacaaccccguccugccguucaacgacgggguguacuucgccuccaccgagaaguccaacaucauccggggcuggaucuucggcaccacgcuggacgcccgcacccagagccuccugaucgugaacaacgcgaccaacgucgugaucaaggugugcgaguuccaguucugcaccgaccccuuccugggggucuacuaccacaacaacaacaagacguggguggagaacgaguuccggguguacagcuccgccaacaacugcaccuucgaguacaucagccagcccuuccucauggaccuggagggcaagcaggggaacuucaagaaccugcgcgaguucgucuucaagaacguggacggcuacuucaagaucuacuccaagcacacccccaucgaccucgugcgggaccugccgcgcggguucgccgcccuggagccccucgucgaccugcccaucggcaucaacaucacccgguuccagacgcugcucgcccugcaccgcagcuaccugacccccggcaagcucgaguccggguggaccaccggcgcggccgccuacuacgugggguaccugcagcagcggacguuccugcucagcuacaaccagaacggcaccaucaccgacgccguggacugcucccuggacccgcugagcgagaccaagugcacgcucaagucccugaccgucgagaagggcaucuaccagaccagcaacuuccgcgugcagcccaccaucagcaucgugcgguuccccaacaucacgaaccugugccccuucggggaggucuucaacgcguccaaguucgccagcguguacgccuggaaccgcaagcggaucuccaacugcgucgccgacuacagcgugcucuacaacuccaccagcuucuccaccuucaagugcuacggcgugagcccgaccaagcugaacgaccugugcuucacgaacgucuacgccgacuccuucguggugaagggggacgagguccgccagaucgcgcccggccagaccggggugaucgccgacuacaacuacaagcuccccgacgacuucaccggcugcgugaucgccuggaacagcgucaagcaggacgcccugaccggcgggaacuaccuguaccgccucuuccggaaguccaagcugaagcccuucgagcgggacaucagcacggagaucuaccaggccggcuccaccccgugcaacggccagguggggcugaacugcuacuacccccucgagcgcuacggguuccaccccaccaccggcgugaacuaccagcccuuccgggucguggugcugagcuucgagcugcucaacggcccggcgaccgucugcgggcccaagcuguccacgacccuggugaaggacaagugcgugaacuucaacuucaacggccugaccgggaccggcguccucacgaccagcaagaagcaguuccugcccuuccagcaguucgggcgcgacaucuccgacaccaccgacgccgugcgcgacccccagacgcuggagauccucgacaucaccccgugcagcuucggcggcguguccgucaucacccccgggaccaacacgagcaaccagguggccgugcuguaccaggacgucaacugcaccgaggugcccauggccauccacgccgagcagcugaccccggcguggcggguguacagcgccggcgccaacgucuuccagacccgcgccgggugccucgugggcgccgagcacgugaacaacuccuacgagugcgacauccccgucggcgcggggaucugcgccagcuaccacuccaugagcucccugcggagcgugaaccagcgcuccaucaucgccuacacgaugagccugggcgccgagaacuccguggcguacagcaacaacuccaucgccauccccaccaacuucaccaucagcgucaccacggagauccuccccguguccaugaccaagaccagcguggacugcaccauguacaucugcggggacuccaucgagugcagcaaccugcugcuccaguacggcuccuucugcacgcagcugaaccgggcccugaccgggaucgccgucgagcaggacaagaacacccaggagguguucgcccaggugaagcagaucuacaagaccccgcccaucaaggacuucggcggcuucaacuucagccagauccuccccgaccccagcaagccguccaagcgcagcuucaucgaggaccugcuguucaacaaggucacgcucgcggacgccggguucaucaagcaguacggcgacugccugggggacaucgccgcccgggaccugaucugcgcccagaaguucaacggccucaccgugcugccgccccugcucaccgacgagaugaucgcgcaguacaccuccgcccugcuggccgggacgaucaccagcggcuggaccuucggcgccggggccgcgcuccagauccccuucgccaugcagauggccuaccgcuucaacggcaucggggugacccagaacguccuguacgagaaccagaagcugaucgccaaccaguucaacuccgcgaucggcaagauccaggacagccucuccagcacggccuccgcccuggggaagcugcaggacguggugaaccagaacgcccaggcccucaacacccuggucaagcagcugagcuccaacuucggcgcgaucagcuccgugcucaacgacauccugagccggcuggacaagguggaggccgagguccagaucgaccgccucaucaccggccggcugcagucccugcagaccuacgugacccagcagcucauccgcgccgccgagauccgggccagcgcgaaccuggccgccacgaagauguccgagugcgugcuggggcagagcaagcgcgucgacuucugcggcaagggguaccaccucauguccuucccccagagcgcgccccacggcguggucuuccugcacgugaccuacgugcccgcccaggagaagaacuucaccaccgcccccgccaucugccacgaggggaaggcccacuucccgcgggagggcgucuucgugagcaacggcacgcacugguucaucacccagcgcaacuucuacgagccccagaucaucaccaccgacaacacguucguguccgggagcugcgacgucgugaucggcaucgugaacaacaccgucuacgacccccugcagcccgagcucgacuccuucaaggaggagcuggacaaguacuucaagaaccacaccagcccggacguggaccugggggacaucuccggcaucaacgccagcguggucaacauccagaaggagaucgaccggcucaacgagguggcgaagaaccugaacgagucccugaucgaccuccaggagcugggcaaguacgagcaguacaucaaguggcccugguacaucuggcugggguucaucgccggccucaucgccaucaucauggugaccaucaugcugugcugcaugacgagcugcugcuccugccugaaggggugcugcagcugcggcuccugcugcaaguucgacgaggacgacagcgagcccguccucaagggggugaagcugcacuacaccuga

SEQ ID NO: 11798 - RNA, 3822 nt, Artificial Sequence; identical to SEQ ID NO: 137
  SARS-CoV-2/Wuhan/WIV05/2019__EPI_ISL_402128 spike protein CDS gc (1-1273)(K986P_V987P)

SEQ ID NO: 11799 - RNA, 3822 nt, Artificial Sequence
  SARS-CoV-2/Wuhan/WIV05/2019__EPI_ISL_402128 spike protein CDS gc (1-1273)(K986P_V987P_T887WN_A1020W)
auguucguguuccugguccuccugccccuggugagcucccagugcgugaaccucaccacccgcacgcagcugccgcccgccuacaccaacagcuucacccggggcgucuacuaccccgacaagguguuccgcuccagcgugcugcacuccacccaggaccucuuccugcccuucuucagcaacgucacgugguuccacgccauccacguguccgggaccaacggcaccaagcgguucgacaacccggugcugcccuucaacgacggggucuacuucgcgagcaccgagaaguccaacaucauccgcggcuggaucuucgggacgacccucgacagcaagacccagucccugcugaucgugaacaacgccaccaacguggucaucaaggugugcgaguuccaguucugcaacgaccccuuccucggcguguacuaccacaagaacaacaagagcuggauggaguccgaguuccgggucuacagcuccgccaacaacugcacguucgaguacgugagccagcccuuccugauggaccuggagggcaagcaggggaacuucaagaaccuccgcgaguucguguucaagaacaucgacggcuacuucaagaucuacuccaagcacaccccgaucaaccugguccgggaccugccccagggguucagcgcccucgagccccugguggaccugcccaucggcaucaacaucacccgcuuccagacccuccuggcccugcaccgguccuaccucacgccgggggacagcagcuccggcuggaccgcgggcgccgccgccuacuacgugggguaccugcagccccgcaccuuccugcucaaguacaacgagaacggcaccaucacggacgcggucgacugcgcccuggacccccugagcgagaccaagugcacccucaaguccuucaccguggagaaggggaucuaccagacgagcaacuuccgggugcagcccaccgaguccaucguccgcuucccgaacaucaccaaccugugccccuucggcgagguguucaacgccacccgguucgccagcgucuacgccuggaaccgcaagcggaucuccaacugcguggcggacuacagcgugcuguacaacuccgccagcuucuccacguucaagugcuacggcgucagccccaccaagcucaacgaccugugcuucaccaacguguacgccgacuccuucgugauccgcggggacgagguccggcagaucgcccccggccagaccgggaagaucgccgacuacaacuacaagcugccggacgacuucacgggcugcgugaucgcguggaacagcaacaaccucgacuccaaggucgggggcaacuacaacuaccuguaccgccuguuccgcaagagcaaccucaagcccuucgagcgggacaucuccaccgagaucuaccaggccggcagcacccccugcaacgggguggagggcuucaacugcuacuucccccugcaguccuacggguuccagccgaccaacggcgugggguaccagcccuaccggguggucgugcugagcuucgagcuccugcacgcccccgccacggugugcggccccaagaaguccaccaaccuggucaagaacaagugcgugaacuucaacuucaacggccucaccgggaccggcgugcugaccgagagcaacaagaaguuccugccguuccagcaguucgggcgcgacaucgccgacacgaccgacgcgguccgcgacccccagacccuggagauccucgacaucacccccugcagcuucggcgggguguccgugaucacgccgggcaccaacaccagcaaccaggucgccgugcuguaccaggacgugaacugcaccgagguccccguggccauccacgccgaccagcugacgcccaccuggcggguguacuccaccggcagcaacgucuuccagacccgcgccgggugccucaucggcgcggagcacgugaacaacuccuacgagugcgacauccccaucggggccggcaucugcgccagcuaccagacgcagaccaacuccccgcggcgcgcccggagcguggcgucccagagcaucaucgccuacaccaugucccugggcgccgagaacagcgucgccuacuccaacaacagcaucgccauccccaccaacuucacgaucuccgugaccaccgagauccugcccgugagcaugaccaagacgagcgucgacugcaccauguacaucugcggggacuccaccgagugcagcaaccuccugcugcaguacggcuccuucugcacccagcucaaccgcgcgcugacggggaucgccguggagcaggacaagaacacccaggagguguucgcccaggucaagcagaucuacaagacgcccccgaucaaggacuucggcggguucaacuucagccagauccugcccgaccccuccaagcccagcaagcgguccuucaucgaggaccuccuguucaacaaggugacccuggccgacgccggcuucaucaagcaguacggcgacugccucggggacaucgcggcccgcgaccugaucugcgcccagaaguucaacggccugaccgugcucccgccccugcugaccgacgagaugaucgcccaguacaccagcgcccuccuggcggggaccaucacguccggcuggugguucggggccggcgccgcccugcagauccccuucgcgaugcagauggccuaccgguucaacggcaucggggucacccagaacgugcucuacgagaaccagaagcugaucgccaaccaguucaacagcgccaucggcaagauccaggacucccugagcuccaccgccagcgcgcucgggaagcugcaggacguggucaaccagaacgcccaggcccugaacacgcucgugaagcagcuguccagcaacuucggcgccaucuccagcgugcugaacgacauccucucccgccuggacccgcccgaggccgaggugcagaucgaccggcugaucaccgggcgccuccagagccugcagaccuacgugacccagcagcugauccgggcggccgagauccgcuggagcgccaaccucgccgcgaccaagauguccgagugcguccugggccagagcaagcggguggacuucugcggcaagggguaccaccugauguccuucccccagagcgccccgcacggcguggucuuccuccacgugacguacguccccgcccaggagaagaacuucaccaccgcccccgcgaucugccacgacgggaaggcccacuucccccgcgagggcguguucguguccaacgggacccacugguucgucacgcagcggaacuucuacgagccgcagaucaucaccaccgacaacaccuucgugagcggcaacugcgacguggucaucggcaucgugaacaacacgguguacgacccccugcagcccgagcuggacuccuucaaggaggagcucgacaaguacuucaagaaccacaccagccccgacgucgaccugggggacaucuccggcaucaacgccagcguggugaacauccagaaggagaucgaccgccugaacgaggucgccaagaaccucaacgagucccugaucgaccugcaggagcucgggaaguacgagcaguacaucaaguggccgugguacaucuggcugggcuucaucgccggccugaucgcgaucgugauggugaccaucaugcucugcugcaugaccagcugcugcuccugccugaaggggugcugcagcugcggcuccugcugcaaguucgacgaggacgacagcgagcccguccugaagggggugaagcuccacuacacguga

SEQ ID NO: 11800 - RNA, 3822 nt, Artificial Sequence
  SARS-CoV-2/Wuhan/WIV05/2019__EPI_ISL_402128 spike protein CDS gc (1-1273)(K986P_V987P_P1069F)
auguucguguuccugguccuccugccccuggugagcucccagugcgugaaccucaccacccgcacgcagcugccgcccgccuacaccaacagcuucacccggggcgucuacuaccccgacaagguguuccgcuccagcgugcugcacuccacccaggaccucuuccugcccuucuucagcaacgucacgugguuccacgccauccacguguccgggaccaacggcaccaagcgguucgacaacccggugcugcccuucaacgacggggucuacuucgcgagcaccgagaaguccaacaucauccgcggcuggaucuucgggacgacccucgacagcaagacccagucccugcugaucgugaacaacgccaccaacguggucaucaaggugugcgaguuccaguucugcaacgaccccuuccucggcguguacuaccacaagaacaacaagagcuggauggaguccgaguuccgggucuacagcuccgccaacaacugcacguucgaguacgugagccagcccuuccugauggaccuggagggcaagcaggggaacuucaagaaccuccgcgaguucguguucaagaacaucgacggcuacuucaagaucuacuccaagcacaccccgaucaaccugguccgggaccugccccagggguucagcgcccucgagccccugguggaccugcccaucggcaucaacaucacccgcuuccagacccuccuggcccugcaccgguccuaccucacgccgggggacagcagcuccggcuggaccgcgggcgccgccgccuacuacgugggguaccugcagccccgcaccuuccugcucaaguacaacgagaacggcaccaucacggacgcggucgacugcgcccuggacccccugagcgagaccaagugcacccucaaguccuucaccguggagaaggggaucuaccagacgagcaacuuccgggugcagcccaccgaguccaucguccgcuucccgaacaucaccaaccugugccccuucggcgagguguucaacgccacccgguucgccagcgucuacgccuggaaccgcaagcggaucuccaacugcguggcggacuacagcgugcuguacaacuccgccagcuucuccacguucaagugcuacggcgucagccccaccaagcucaacgaccugugcuucaccaacguguacgccgacuccuucgugauccgcggggacgagguccggcagaucgcccccggccagaccgggaagaucgccgacuacaacuacaagcugccggacgacuucacgggcugcgugaucgcguggaacagcaacaaccucgacuccaaggucgggggcaacuacaacuaccuguaccgccuguuccgcaagagcaaccucaagcccuucgagcgggacaucuccaccgagaucuaccaggccggcagcacccccugcaacgggguggagggcuucaacugcuacuucccccugcaguccuacggguuccagccgaccaacggcgugggguaccagcccuaccggguggucgugcugagcuucgagcuccugcacgcccccgccacggugugcggccccaagaaguccaccaaccuggucaagaacaagugcgugaacuucaacuucaacggccucaccgggaccggcgugcugaccgagagcaacaagaaguuccugccguuccagcaguucgggcgcgacaucgccgacacgaccgacgcgguccgcgacccccagacccuggagauccucgacaucacccccugcagcuucggcgggguguccgugaucacgccgggcaccaacaccagcaaccaggucgccgugcuguaccaggacgugaacugcaccgagguccccguggccauccacgccgaccagcugacgcccaccuggcggguguacuccaccggcagcaacgucuuccagacccgcgccgggugccucaucggcgcggagcacgugaacaacuccuacgagugcgacauccccaucggggccggcaucugcgccagcuaccagacgcagaccaacuccccgcggcgcgcccggagcguggcgucccagagcaucaucgccuacaccaugucccugggcgccgagaacagcgucgccuacuccaacaacagcaucgccauccccaccaacuucacgaucuccgugaccaccgagauccugcccgugagcaugaccaagacgagcgucgacugcaccauguacaucugcggggacuccaccgagugcagcaaccuccugcugcaguacggcuccuucugcacccagcucaaccgcgcgcugacggggaucgccguggagcaggacaagaacacccaggagguguucgcccaggucaagcagaucuacaagacgcccccgaucaaggacuucggcggguucaacuucagccagauccugcccgaccccuccaagcccagcaagcgguccuucaucgaggaccuccuguucaacaaggugacccuggccgacgccggcuucaucaagcaguacggcgacugccucggggacaucgcggcccgcgaccugaucugcgcccagaaguucaacggccugaccgugcucccgccccugcugaccgacgagaugaucgcccaguacaccagcgcccuccuggcggggaccaucacguccggcuggaccuucggggccggcgccgcccugcagauccccuucgcgaugcagauggccuaccgguucaacggcaucggggucacccagaacgugcucuacgagaaccagaagcugaucgccaaccaguucaacagcgccaucggcaagauccaggacucccugagcuccaccgccagcgcgcucgggaagcugcaggacguggucaaccagaacgcccaggcccugaacacgcucgugaagcagcuguccagcaacuucggcgccaucuccagcgugcugaacgacauccucucccgccuggacccgcccgaggccgaggugcagaucgaccggcugaucaccgggcgccuccagagccugcagaccuacgugacccagcagcugauccgggcggccgagauccgcgccagcgccaaccucgccgcgaccaagauguccgagugcguccugggccagagcaagcggguggacuucugcggcaagggguaccaccugauguccuucccccagagcgccccgcacggcguggucuuccuccacgugacguacgucuucgcccaggagaagaacuucaccaccgcccccgcgaucugccacgacgggaaggcccacuucccccgcgagggcguguucguguccaacgggacccacugguucgucacgcagcggaacuucuacgagccgcagaucaucaccaccgacaacaccuucgugagcggcaacugcgacguggucaucggcaucgugaacaacacgguguacgacccccugcagcccgagcuggacuccuucaaggaggagcucgacaaguacuucaagaaccacaccagccccgacgucgaccugggggacaucuccggcaucaacgccagcguggugaacauccagaaggagaucgaccgccugaacgaggucgccaagaaccucaacgagucccugaucgaccugcaggagcucgggaaguacgagcaguacaucaaguggccgugguacaucuggcugggcuucaucgccggccugaucgcgaucgugauggugaccaucaugcucugcugcaugaccagcugcugcuccugccugaaggggugcugcagcugcggcuccugcugcaaguucgacgaggacgacagcgagcccguccugaagggggugaagcuccacuacacguga

SEQ ID NO: 11801 - RNA, 3822 nt, Artificial Sequence
  SARS-CoV-2/Wuhan/WIV05/2019__EPI_ISL_402128 spike protein CDS gc (1-1273)(K986P_V987P_ H1048Q_H1064N_ H1083N_H1101N)
auguucguguuccugguccuccugccccuggugagcucccagugcgugaaccucaccacccgcacgcagcugccgcccgccuacaccaacagcuucacccggggcgucuacuaccccgacaagguguuccgcuccagcgugcugcacuccacccaggaccucuuccugcccuucuucagcaacgucacgugguuccacgccauccacguguccgggaccaacggcaccaagcgguucgacaacccggugcugcccuucaacgacggggucuacuucgcgagcaccgagaaguccaacaucauccgcggcuggaucuucgggacgacccucgacagcaagacccagucccugcugaucgugaacaacgccaccaacguggucaucaaggugugcgaguuccaguucugcaacgaccccuuccucggcguguacuaccacaagaacaacaagagcuggauggaguccgaguuccgggucuacagcuccgccaacaacugcacguucgaguacgugagccagcccuuccugauggaccuggagggcaagcaggggaacuucaagaaccuccgcgaguucguguucaagaacaucgacggcuacuucaagaucuacuccaagcacaccccgaucaaccugguccgggaccugccccagggguucagcgcccucgagccccugguggaccugcccaucggcaucaacaucacccgcuuccagacccuccuggcccugcaccgguccuaccucacgccgggggacagcagcuccggcuggaccgcgggcgccgccgccuacuacgugggguaccugcagccccgcaccuuccugcucaaguacaacgagaacggcaccaucacggacgcggucgacugcgcccuggacccccugagcgagaccaagugcacccucaaguccuucaccguggagaaggggaucuaccagacgagcaacuuccgggugcagcccaccgaguccaucguccgcuucccgaacaucaccaaccugugccccuucggcgagguguucaacgccacccgguucgccagcgucuacgccuggaaccgcaagcggaucuccaacugcguggcggacuacagcgugcuguacaacuccgccagcuucuccacguucaagugcuacggcgucagccccaccaagcucaacgaccugugcuucaccaacguguacgccgacuccuucgugauccgcggggacgagguccggcagaucgcccccggccagaccgggaagaucgccgacuacaacuacaagcugccggacgacuucacgggcugcgugaucgcguggaacagcaacaaccucgacuccaaggucgggggcaacuacaacuaccuguaccgccuguuccgcaagagcaaccucaagcccuucgagcgggacaucuccaccgagaucuaccaggccggcagcacccccugcaacgggguggagggcuucaacugcuacuucccccugcaguccuacggguuccagccgaccaacggcgugggguaccagcccuaccggguggucgugcugagcuucgagcuccugcacgcccccgccacggugugcggccccaagaaguccaccaaccuggucaagaacaagugcgugaacuucaacuucaacggccucaccgggaccggcgugcugaccgagagcaacaagaaguuccugccguuccagcaguucgggcgcgacaucgccgacacgaccgacgcgguccgcgacccccagacccuggagauccucgacaucacccccugcagcuucggcgggguguccgugaucacgccgggcaccaacaccagcaaccaggucgccgugcuguaccaggacgugaacugcaccgagguccccguggccauccacgccgaccagcugacgcccaccuggcggguguacuccaccggcagcaacgucuuccagacccgcgccgggugccucaucggcgcggagcacgugaacaacuccuacgagugcgacauccccaucggggccggcaucugcgccagcuaccagacgcagaccaacuccccgcggcgcgcccggagcguggcgucccagagcaucaucgccuacaccaugucccugggcgccgagaacagcgucgccuacuccaacaacagcaucgccauccccaccaacuucacgaucuccgugaccaccgagauccugcccgugagcaugaccaagacgagcgucgacugcaccauguacaucugcggggacuccaccgagugcagcaaccuccugcugcaguacggcuccuucugcacccagcucaaccgcgcgcugacggggaucgccguggagcaggacaagaacacccaggagguguucgcccaggucaagcagaucuacaagacgcccccgaucaaggacuucggcggguucaacuucagccagauccugcccgaccccuccaagcccagcaagcgguccuucaucgaggaccuccuguucaacaaggugacccuggccgacgccggcuucaucaagcaguacggcgacugccucggggacaucgcggcccgcgaccugaucugcgcccagaaguucaacggccugaccgugcucccgccccugcugaccgacgagaugaucgcccaguacaccagcgcccuccuggcggggaccaucacguccggcuggaccuucggggccggcgccgcccugcagauccccuucgcgaugcagauggccuaccgguucaacggcaucggggucacccagaacgugcucuacgagaaccagaagcugaucgccaaccaguucaacagcgccaucggcaagauccaggacucccugagcuccaccgccagcgcgcucgggaagcugcaggacguggucaaccagaacgcccaggcccugaacacgcucgugaagcagcuguccagcaacuucggcgccaucuccagcgugcugaacgacauccucucccgccuggacccgcccgaggccgaggugcagaucgaccggcugaucaccgggcgccuccagagccugcagaccuacgugacccagcagcugauccgggcggccgagauccgcgccagcgccaaccucgccgcgaccaagauguccgagugcguccugggccagagcaagcggguggacuucugcggcaagggguaccagcugauguccuucccccagagcgccccgcacggcguggucuuccucaacgugacguacguccccgcccaggagaagaacuucaccaccgcccccgcgaucugcaacgacgggaaggcccacuucccccgcgagggcguguucguguccaacgggaccaacugguucgucacgcagcggaacuucuacgagccgcagaucaucaccaccgacaacaccuucgugagcggcaacugcgacguggucaucggcaucgugaacaacacgguguacgacccccugcagcccgagcuggacuccuucaaggaggagcucgacaaguacuucaagaaccacaccagccccgacgucgaccugggggacaucuccggcaucaacgccagcguggugaacauccagaaggagaucgaccgccugaacgaggucgccaagaaccucaacgagucccugaucgaccugcaggagcucgggaaguacgagcaguacaucaaguggccgugguacaucuggcugggcuucaucgccggccugaucgcgaucgugauggugaccaucaugcucugcugcaugaccagcugcugcuccugccugaaggggugcugcagcugcggcuccugcugcaaguucgacgaggacgacagcgagcccguccugaagggggugaagcuccacuacacguga

SEQ ID NO: 11802 - RNA, 3822 nt, Artificial Sequence
  SARS-CoV-2/Wuhan/WIV05/2019__EPI_ISL_402128 spike protein CDS gc (1-1273)(I712C_T1077C)
auguucguguuccugguccuccugccccuggugagcucccagugcgugaaccucaccacccgcacgcagcugccgcccgccuacaccaacagcuucacccggggcgucuacuaccccgacaagguguuccgcuccagcgugcugcacuccacccaggaccucuuccugcccuucuucagcaacgucacgugguuccacgccauccacguguccgggaccaacggcaccaagcgguucgacaacccggugcugcccuucaacgacggggucuacuucgcgagcaccgagaaguccaacaucauccgcggcuggaucuucgggacgacccucgacagcaagacccagucccugcugaucgugaacaacgccaccaacguggucaucaaggugugcgaguuccaguucugcaacgaccccuuccucggcguguacuaccacaagaacaacaagagcuggauggaguccgaguuccgggucuacagcuccgccaacaacugcacguucgaguacgugagccagcccuuccugauggaccuggagggcaagcaggggaacuucaagaaccuccgcgaguucguguucaagaacaucgacggcuacuucaagaucuacuccaagcacaccccgaucaaccugguccgggaccugccccagggguucagcgcccucgagccccugguggaccugcccaucggcaucaacaucacccgcuuccagacccuccuggcccugcaccgguccuaccucacgccgggggacagcagcuccggcuggaccgcgggcgccgccgccuacuacgugggguaccugcagccccgcaccuuccugcucaaguacaacgagaacggcaccaucacggacgcggucgacugcgcccuggacccccugagcgagaccaagugcacccucaaguccuucaccguggagaaggggaucuaccagacgagcaacuuccgggugcagcccaccgaguccaucguccgcuucccgaacaucaccaaccugugccccuucggcgagguguucaacgccacccgguucgccagcgucuacgccuggaaccgcaagcggaucuccaacugcguggcggacuacagcgugcuguacaacuccgccagcuucuccacguucaagugcuacggcgucagccccaccaagcucaacgaccugugcuucaccaacguguacgccgacuccuucgugauccgcggggacgagguccggcagaucgcccccggccagaccgggaagaucgccgacuacaacuacaagcugccggacgacuucacgggcugcgugaucgcguggaacagcaacaaccucgacuccaaggucgggggcaacuacaacuaccuguaccgccuguuccgcaagagcaaccucaagcccuucgagcgggacaucuccaccgagaucuaccaggccggcagcacccccugcaacgggguggagggcuucaacugcuacuucccccugcaguccuacggguuccagccgaccaacggcgugggguaccagcccuaccggguggucgugcugagcuucgagcuccugcacgcccccgccacggugugcggccccaagaaguccaccaaccuggucaagaacaagugcgugaacuucaacuucaacggccucaccgggaccggcgugcugaccgagagcaacaagaaguuccugccguuccagcaguucgggcgcgacaucgccgacacgaccgacgcgguccgcgacccccagacccuggagauccucgacaucacccccugcagcuucggcgggguguccgugaucacgccgggcaccaacaccagcaaccaggucgccgugcuguaccaggacgugaacugcaccgagguccccguggccauccacgccgaccagcugacgcccaccuggcggguguacuccaccggcagcaacgucuuccagacccgcgccgggugccucaucggcgcggagcacgugaacaacuccuacgagugcgacauccccaucggggccggcaucugcgccagcuaccagacgcagaccaacuccccgcggcgcgcccggagcguggcgucccagagcaucaucgccuacaccaugucccugggcgccgagaacagcgucgccuacuccaacaacagcugcgccauccccaccaacuucacgaucuccgugaccaccgagauccugcccgugagcaugaccaagacgagcgucgacugcaccauguacaucugcggggacuccaccgagugcagcaaccuccugcugcaguacggcuccuucugcacccagcucaaccgcgcgcugacggggaucgccguggagcaggacaagaacacccaggagguguucgcccaggucaagcagaucuacaagacgcccccgaucaaggacuucggcggguucaacuucagccagauccugcccgaccccuccaagcccagcaagcgguccuucaucgaggaccuccuguucaacaaggugacccuggccgacgccggcuucaucaagcaguacggcgacugccucggggacaucgcggcccgcgaccugaucugcgcccagaaguucaacggccugaccgugcucccgccccugcugaccgacgagaugaucgcccaguacaccagcgcccuccuggcggggaccaucacguccggcuggaccuucggggccggcgccgcccugcagauccccuucgcgaugcagauggccuaccgguucaacggcaucggggucacccagaacgugcucuacgagaaccagaagcugaucgccaaccaguucaacagcgccaucggcaagauccaggacucccugagcuccaccgccagcgcgcucgggaagcugcaggacguggucaaccagaacgcccaggcccugaacacgcucgugaagcagcuguccagcaacuucggcgccaucuccagcgugcugaacgacauccucucccgccuggacaaggucgaggccgaggugcagaucgaccggcugaucaccgggcgccuccagagccugcagaccuacgugacccagcagcugauccgggcggccgagauccgcgccagcgccaaccucgccgcgaccaagauguccgagugcguccugggccagagcaagcggguggacuucugcggcaagggguaccaccugauguccuucccccagagcgccccgcacggcguggucuuccuccacgugacguacguccccgcccaggagaagaacuucaccugcgcccccgcgaucugccacgacgggaaggcccacuucccccgcgagggcguguucguguccaacgggacccacugguucgucacgcagcggaacuucuacgagccgcagaucaucaccaccgacaacaccuucgugagcggcaacugcgacguggucaucggcaucgugaacaacacgguguacgacccccugcagcccgagcuggacuccuucaaggaggagcucgacaaguacuucaagaaccacaccagccccgacgucgaccugggggacaucuccggcaucaacgccagcguggugaacauccagaaggagaucgaccgccugaacgaggucgccaagaaccucaacgagucccugaucgaccugcaggagcucgggaaguacgagcaguacaucaaguggccgugguacaucuggcugggcuucaucgccggccugaucgcgaucgugauggugaccaucaugcucugcugcaugaccagcugcugcuccugccugaaggggugcugcagcugcggcuccugcugcaaguucgacgaggacgacagcgagcccguccugaagggggugaagcuccacuacacguga

SEQ ID NO: 11803 - RNA, 3822 nt, Artificial Sequence
  SARS-CoV-2/Wuhan/WIV05/2019__EPI_ISL_402128 spike protein CDS gc (1-1273)(I714C_Y1110C)
auguucguguuccugguccuccugccccuggugagcucccagugcgugaaccucaccacccgcacgcagcugccgcccgccuacaccaacagcuucacccggggcgucuacuaccccgacaagguguuccgcuccagcgugcugcacuccacccaggaccucuuccugcccuucuucagcaacgucacgugguuccacgccauccacguguccgggaccaacggcaccaagcgguucgacaacccggugcugcccuucaacgacggggucuacuucgcgagcaccgagaaguccaacaucauccgcggcuggaucuucgggacgacccucgacagcaagacccagucccugcugaucgugaacaacgccaccaacguggucaucaaggugugcgaguuccaguucugcaacgaccccuuccucggcguguacuaccacaagaacaacaagagcuggauggaguccgaguuccgggucuacagcuccgccaacaacugcacguucgaguacgugagccagcccuuccugauggaccuggagggcaagcaggggaacuucaagaaccuccgcgaguucguguucaagaacaucgacggcuacuucaagaucuacuccaagcacaccccgaucaaccugguccgggaccugccccagggguucagcgcccucgagccccugguggaccugcccaucggcaucaacaucacccgcuuccagacccuccuggcccugcaccgguccuaccucacgccgggggacagcagcuccggcuggaccgcgggcgccgccgccuacuacgugggguaccugcagccccgcaccuuccugcucaaguacaacgagaacggcaccaucacggacgcggucgacugcgcccuggacccccugagcgagaccaagugcacccucaaguccuucaccguggagaaggggaucuaccagacgagcaacuuccgggugcagcccaccgaguccaucguccgcuucccgaacaucaccaaccugugccccuucggcgagguguucaacgccacccgguucgccagcgucuacgccuggaaccgcaagcggaucuccaacugcguggcggacuacagcgugcuguacaacuccgccagcuucuccacguucaagugcuacggcgucagccccaccaagcucaacgaccugugcuucaccaacguguacgccgacuccuucgugauccgcggggacgagguccggcagaucgcccccggccagaccgggaagaucgccgacuacaacuacaagcugccggacgacuucacgggcugcgugaucgcguggaacagcaacaaccucgacuccaaggucgggggcaacuacaacuaccuguaccgccuguuccgcaagagcaaccucaagcccuucgagcgggacaucuccaccgagaucuaccaggccggcagcacccccugcaacgggguggagggcuucaacugcuacuucccccugcaguccuacggguuccagccgaccaacggcgugggguaccagcccuaccggguggucgugcugagcuucgagcuccugcacgcccccgccacggugugcggccccaagaaguccaccaaccuggucaagaacaagugcgugaacuucaacuucaacggccucaccgggaccggcgugcugaccgagagcaacaagaaguuccugccguuccagcaguucgggcgcgacaucgccgacacgaccgacgcgguccgcgacccccagacccuggagauccucgacaucacccccugcagcuucggcgggguguccgugaucacgccgggcaccaacaccagcaaccaggucgccgugcuguaccaggacgugaacugcaccgagguccccguggccauccacgccgaccagcugacgcccaccuggcggguguacuccaccggcagcaacgucuuccagacccgcgccgggugccucaucggcgcggagcacgugaacaacuccuacgagugcgacauccccaucggggccggcaucugcgccagcuaccagacgcagaccaacuccccgcggcgcgcccggagcguggcgucccagagcaucaucgccuacaccaugucccugggcgccgagaacagcgucgccuacuccaacaacagcaucgccugccccaccaacuucacgaucuccgugaccaccgagauccugcccgugagcaugaccaagacgagcgucgacugcaccauguacaucugcggggacuccaccgagugcagcaaccuccugcugcaguacggcuccuucugcacccagcucaaccgcgcgcugacggggaucgccguggagcaggacaagaacacccaggagguguucgcccaggucaagcagaucuacaagacgcccccgaucaaggacuucggcggguucaacuucagccagauccugcccgaccccuccaagcccagcaagcgguccuucaucgaggaccuccuguucaacaaggugacccuggccgacgccggcuucaucaagcaguacggcgacugccucggggacaucgcggcccgcgaccugaucugcgcccagaaguucaacggccugaccgugcucccgccccugcugaccgacgagaugaucgcccaguacaccagcgcccuccuggcggggaccaucacguccggcuggaccuucggggccggcgccgcccugcagauccccuucgcgaugcagauggccuaccgguucaacggcaucggggucacccagaacgugcucuacgagaaccagaagcugaucgccaaccaguucaacagcgccaucggcaagauccaggacucccugagcuccaccgccagcgcgcucgggaagcugcaggacguggucaaccagaacgcccaggcccugaacacgcucgugaagcagcuguccagcaacuucggcgccaucuccagcgugcugaacgacauccucucccgccuggacaaggucgaggccgaggugcagaucgaccggcugaucaccgggcgccuccagagccugcagaccuacgugacccagcagcugauccgggcggccgagauccgcgccagcgccaaccucgccgcgaccaagauguccgagugcguccugggccagagcaagcggguggacuucugcggcaagggguaccaccugauguccuucccccagagcgccccgcacggcguggucuuccuccacgugacguacguccccgcccaggagaagaacuucaccaccgcccccgcgaucugccacgacgggaaggcccacuucccccgcgagggcguguucguguccaacgggacccacugguucgucacgcagcggaacuucugcgagccgcagaucaucaccaccgacaacaccuucgugagcggcaacugcgacguggucaucggcaucgugaacaacacgguguacgacccccugcagcccgagcuggacuccuucaaggaggagcucgacaaguacuucaagaaccacaccagccccgacgucgaccugggggacaucuccggcaucaacgccagcguggugaacauccagaaggagaucgaccgccugaacgaggucgccaagaaccucaacgagucccugaucgaccugcaggagcucgggaaguacgagcaguacaucaaguggccgugguacaucuggcugggcuucaucgccggccugaucgcgaucgugauggugaccaucaugcucugcugcaugaccagcugcugcuccugccugaaggggugcugcagcugcggcuccugcugcaaguucgacgaggacgacagcgagcccguccugaagggggugaagcuccacuacacguga

SEQ ID NO: 11804 - RNA, 3822 nt, Artificial Sequence
  SARS-CoV-2/Wuhan/WIV05/2019__EPI_ISL_402128 spike protein CDS gc (1-1273)(P715C_P1069C)
auguucguguuccugguccuccugccccuggugagcucccagugcgugaaccucaccacccgcacgcagcugccgcccgccuacaccaacagcuucacccggggcgucuacuaccccgacaagguguuccgcuccagcgugcugcacuccacccaggaccucuuccugcccuucuucagcaacgucacgugguuccacgccauccacguguccgggaccaacggcaccaagcgguucgacaacccggugcugcccuucaacgacggggucuacuucgcgagcaccgagaaguccaacaucauccgcggcuggaucuucgggacgacccucgacagcaagacccagucccugcugaucgugaacaacgccaccaacguggucaucaaggugugcgaguuccaguucugcaacgaccccuuccucggcguguacuaccacaagaacaacaagagcuggauggaguccgaguuccgggucuacagcuccgccaacaacugcacguucgaguacgugagccagcccuuccugauggaccuggagggcaagcaggggaacuucaagaaccuccgcgaguucguguucaagaacaucgacggcuacuucaagaucuacuccaagcacaccccgaucaaccugguccgggaccugccccagggguucagcgcccucgagccccugguggaccugcccaucggcaucaacaucacccgcuuccagacccuccuggcccugcaccgguccuaccucacgccgggggacagcagcuccggcuggaccgcgggcgccgccgccuacuacgugggguaccugcagccccgcaccuuccugcucaaguacaacgagaacggcaccaucacggacgcggucgacugcgcccuggacccccugagcgagaccaagugcacccucaaguccuucaccguggagaaggggaucuaccagacgagcaacuuccgggugcagcccaccgaguccaucguccgcuucccgaacaucaccaaccugugccccuucggcgagguguucaacgccacccgguucgccagcgucuacgccuggaaccgcaagcggaucuccaacugcguggcggacuacagcgugcuguacaacuccgccagcuucuccacguucaagugcuacggcgucagccccaccaagcucaacgaccugugcuucaccaacguguacgccgacuccuucgugauccgcggggacgagguccggcagaucgcccccggccagaccgggaagaucgccgacuacaacuacaagcugccggacgacuucacgggcugcgugaucgcguggaacagcaacaaccucgacuccaaggucgggggcaacuacaacuaccuguaccgccuguuccgcaagagcaaccucaagcccuucgagcgggacaucuccaccgagaucuaccaggccggcagcacccccugcaacgggguggagggcuucaacugcuacuucccccugcaguccuacggguuccagccgaccaacggcgugggguaccagcccuaccggguggucgugcugagcuucgagcuccugcacgcccccgccacggugugcggccccaagaaguccaccaaccuggucaagaacaagugcgugaacuucaacuucaacggccucaccgggaccggcgugcugaccgagagcaacaagaaguuccugccguuccagcaguucgggcgcgacaucgccgacacgaccgacgcgguccgcgacccccagacccuggagauccucgacaucacccccugcagcuucggcgggguguccgugaucacgccgggcaccaacaccagcaaccaggucgccgugcuguaccaggacgugaacugcaccgagguccccguggccauccacgccgaccagcugacgcccaccuggcggguguacuccaccggcagcaacgucuuccagacccgcgccgggugccucaucggcgcggagcacgugaacaacuccuacgagugcgacauccccaucggggccggcaucugcgccagcuaccagacgcagaccaacuccccgcggcgcgcccggagcguggcgucccagagcaucaucgccuacaccaugucccugggcgccgagaacagcgucgccuacuccaacaacagcaucgccaucugcaccaacuucacgaucuccgugaccaccgagauccugcccgugagcaugaccaagacgagcgucgacugcaccauguacaucugcggggacuccaccgagugcagcaaccuccugcugcaguacggcuccuucugcacccagcucaaccgcgcgcugacggggaucgccguggagcaggacaagaacacccaggagguguucgcccaggucaagcagaucuacaagacgcccccgaucaaggacuucggcggguucaacuucagccagauccugcccgaccccuccaagcccagcaagcgguccuucaucgaggaccuccuguucaacaaggugacccuggccgacgccggcuucaucaagcaguacggcgacugccucggggacaucgcggcccgcgaccugaucugcgcccagaaguucaacggccugaccgugcucccgccccugcugaccgacgagaugaucgcccaguacaccagcgcccuccuggcggggaccaucacguccggcuggaccuucggggccggcgccgcccugcagauccccuucgcgaugcagauggccuaccgguucaacggcaucggggucacccagaacgugcucuacgagaaccagaagcugaucgccaaccaguucaacagcgccaucggcaagauccaggacucccugagcuccaccgccagcgcgcucgggaagcugcaggacguggucaaccagaacgcccaggcccugaacacgcucgugaagcagcuguccagcaacuucggcgccaucuccagcgugcugaacgacauccucucccgccuggacaaggucgaggccgaggugcagaucgaccggcugaucaccgggcgccuccagagccugcagaccuacgugacccagcagcugauccgggcggccgagauccgcgccagcgccaaccucgccgcgaccaagauguccgagugcguccugggccagagcaagcggguggacuucugcggcaagggguaccaccugauguccuucccccagagcgccccgcacggcguggucuuccuccacgugacguacgucugcgcccaggagaagaacuucaccaccgcccccgcgaucugccacgacgggaaggcccacuucccccgcgagggcguguucguguccaacgggacccacugguucgucacgcagcggaacuucuacgagccgcagaucaucaccaccgacaacaccuucgugagcggcaacugcgacguggucaucggcaucgugaacaacacgguguacgacccccugcagcccgagcuggacuccuucaaggaggagcucgacaaguacuucaagaaccacaccagccccgacgucgaccugggggacaucuccggcaucaacgccagcguggugaacauccagaaggagaucgaccgccugaacgaggucgccaagaaccucaacgagucccugaucgaccugcaggagcucgggaaguacgagcaguacaucaaguggccgugguacaucuggcugggcuucaucgccggccugaucgcgaucgugauggugaccaucaugcucugcugcaugaccagcugcugcuccugccugaaggggugcugcagcugcggcuccugcugcaaguucgacgaggacgacagcgagcccguccugaagggggugaagcuccacuacacguga

SEQ ID NO: 11805 - RNA, 3822 nt, Artificial Sequence
  SARS-CoV-2/Wuhan/WIV05/2019__EPI_ISL_402128 spike protein CDS gc (1-1273)(G889C_L1034C)
auguucguguuccugguccuccugccccuggugagcucccagugcgugaaccucaccacccgcacgcagcugccgcccgccuacaccaacagcuucacccggggcgucuacuaccccgacaagguguuccgcuccagcgugcugcacuccacccaggaccucuuccugcccuucuucagcaacgucacgugguuccacgccauccacguguccgggaccaacggcaccaagcgguucgacaacccggugcugcccuucaacgacggggucuacuucgcgagcaccgagaaguccaacaucauccgcggcuggaucuucgggacgacccucgacagcaagacccagucccugcugaucgugaacaacgccaccaacguggucaucaaggugugcgaguuccaguucugcaacgaccccuuccucggcguguacuaccacaagaacaacaagagcuggauggaguccgaguuccgggucuacagcuccgccaacaacugcacguucgaguacgugagccagcccuuccugauggaccuggagggcaagcaggggaacuucaagaaccuccgcgaguucguguucaagaacaucgacggcuacuucaagaucuacuccaagcacaccccgaucaaccugguccgggaccugccccagggguucagcgcccucgagccccugguggaccugcccaucggcaucaacaucacccgcuuccagacccuccuggcccugcaccgguccuaccucacgccgggggacagcagcuccggcuggaccgcgggcgccgccgccuacuacgugggguaccugcagccccgcaccuuccugcucaaguacaacgagaacggcaccaucacggacgcggucgacugcgcccuggacccccugagcgagaccaagugcacccucaaguccuucaccguggagaaggggaucuaccagacgagcaacuuccgggugcagcccaccgaguccaucguccgcuucccgaacaucaccaaccugugccccuucggcgagguguucaacgccacccgguucgccagcgucuacgccuggaaccgcaagcggaucuccaacugcguggcggacuacagcgugcuguacaacuccgccagcuucuccacguucaagugcuacggcgucagccccaccaagcucaacgaccugugcuucaccaacguguacgccgacuccuucgugauccgcggggacgagguccggcagaucgcccccggccagaccgggaagaucgccgacuacaacuacaagcugccggacgacuucacgggcugcgugaucgcguggaacagcaacaaccucgacuccaaggucgggggcaacuacaacuaccuguaccgccuguuccgcaagagcaaccucaagcccuucgagcgggacaucuccaccgagaucuaccaggccggcagcacccccugcaacgggguggagggcuucaacugcuacuucccccugcaguccuacggguuccagccgaccaacggcgugggguaccagcccuaccggguggucgugcugagcuucgagcuccugcacgcccccgccacggugugcggccccaagaaguccaccaaccuggucaagaacaagugcgugaacuucaacuucaacggccucaccgggaccggcgugcugaccgagagcaacaagaaguuccugccguuccagcaguucgggcgcgacaucgccgacacgaccgacgcgguccgcgacccccagacccuggagauccucgacaucacccccugcagcuucggcgggguguccgugaucacgccgggcaccaacaccagcaaccaggucgccgugcuguaccaggacgugaacugcaccgagguccccguggccauccacgccgaccagcugacgcccaccuggcggguguacuccaccggcagcaacgucuuccagacccgcgccgggugccucaucggcgcggagcacgugaacaacuccuacgagugcgacauccccaucggggccggcaucugcgccagcuaccagacgcagaccaacuccccgcggcgcgcccggagcguggcgucccagagcaucaucgccuacaccaugucccugggcgccgagaacagcgucgccuacuccaacaacagcaucgccauccccaccaacuucacgaucuccgugaccaccgagauccugcccgugagcaugaccaagacgagcgucgacugcaccauguacaucugcggggacuccaccgagugcagcaaccuccugcugcaguacggcuccuucugcacccagcucaaccgcgcgcugacggggaucgccguggagcaggacaagaacacccaggagguguucgcccaggucaagcagaucuacaagacgcccccgaucaaggacuucggcggguucaacuucagccagauccugcccgaccccuccaagcccagcaagcgguccuucaucgaggaccuccuguucaacaaggugacccuggccgacgccggcuucaucaagcaguacggcgacugccucggggacaucgcggcccgcgaccugaucugcgcccagaaguucaacggccugaccgugcucccgccccugcugaccgacgagaugaucgcccaguacaccagcgcccuccuggcggggaccaucacguccggcuggaccuucugcgccggcgccgcccugcagauccccuucgcgaugcagauggccuaccgguucaacggcaucggggucacccagaacgugcucuacgagaaccagaagcugaucgccaaccaguucaacagcgccaucggcaagauccaggacucccugagcuccaccgccagcgcgcucgggaagcugcaggacguggucaaccagaacgcccaggcccugaacacgcucgugaagcagcuguccagcaacuucggcgccaucuccagcgugcugaacgacauccucucccgccuggacaaggucgaggccgaggugcagaucgaccggcugaucaccgggcgccuccagagccugcagaccuacgugacccagcagcugauccgggcggccgagauccgcgccagcgccaaccucgccgcgaccaagauguccgagugcgucugcggccagagcaagcggguggacuucugcggcaagggguaccaccugauguccuucccccagagcgccccgcacggcguggucuuccuccacgugacguacguccccgcccaggagaagaacuucaccaccgcccccgcgaucugccacgacgggaaggcccacuucccccgcgagggcguguucguguccaacgggacccacugguucgucacgcagcggaacuucuacgagccgcagaucaucaccaccgacaacaccuucgugagcggcaacugcgacguggucaucggcaucgugaacaacacgguguacgacccccugcagcccgagcuggacuccuucaaggaggagcucgacaaguacuucaagaaccacaccagccccgacgucgaccugggggacaucuccggcaucaacgccagcguggugaacauccagaaggagaucgaccgccugaacgaggucgccaagaaccucaacgagucccugaucgaccugcaggagcucgggaaguacgagcaguacaucaaguggccgugguacaucuggcugggcuucaucgccggccugaucgcgaucgugauggugaccaucaugcucugcugcaugaccagcugcugcuccugccugaaggggugcugcagcugcggcuccugcugcaaguucgacgaggacgacagcgagcccguccugaagggggugaagcuccacuacacguga

SEQ ID NO: 11806 - RNA, 3822 nt, Artificial Sequence
  SARS-CoV-2/Wuhan/WIV05/2019__EPI_ISL_402128 spike protein CDS gc (1-1273)(I909C_Y1047C)
auguucguguuccugguccuccugccccuggugagcucccagugcgugaaccucaccacccgcacgcagcugccgcccgccuacaccaacagcuucacccggggcgucuacuaccccgacaagguguuccgcuccagcgugcugcacuccacccaggaccucuuccugcccuucuucagcaacgucacgugguuccacgccauccacguguccgggaccaacggcaccaagcgguucgacaacccggugcugcccuucaacgacggggucuacuucgcgagcaccgagaaguccaacaucauccgcggcuggaucuucgggacgacccucgacagcaagacccagucccugcugaucgugaacaacgccaccaacguggucaucaaggugugcgaguuccaguucugcaacgaccccuuccucggcguguacuaccacaagaacaacaagagcuggauggaguccgaguuccgggucuacagcuccgccaacaacugcacguucgaguacgugagccagcccuuccugauggaccuggagggcaagcaggggaacuucaagaaccuccgcgaguucguguucaagaacaucgacggcuacuucaagaucuacuccaagcacaccccgaucaaccugguccgggaccugccccagggguucagcgcccucgagccccugguggaccugcccaucggcaucaacaucacccgcuuccagacccuccuggcccugcaccgguccuaccucacgccgggggacagcagcuccggcuggaccgcgggcgccgccgccuacuacgugggguaccugcagccccgcaccuuccugcucaaguacaacgagaacggcaccaucacggacgcggucgacugcgcccuggacccccugagcgagaccaagugcacccucaaguccuucaccguggagaaggggaucuaccagacgagcaacuuccgggugcagcccaccgaguccaucguccgcuucccgaacaucaccaaccugugccccuucggcgagguguucaacgccacccgguucgccagcgucuacgccuggaaccgcaagcggaucuccaacugcguggcggacuacagcgugcuguacaacuccgccagcuucuccacguucaagugcuacggcgucagccccaccaagcucaacgaccugugcuucaccaacguguacgccgacuccuucgugauccgcggggacgagguccggcagaucgcccccggccagaccgggaagaucgccgacuacaacuacaagcugccggacgacuucacgggcugcgugaucgcguggaacagcaacaaccucgacuccaaggucgggggcaacuacaacuaccuguaccgccuguuccgcaagagcaaccucaagcccuucgagcgggacaucuccaccgagaucuaccaggccggcagcacccccugcaacgggguggagggcuucaacugcuacuucccccugcaguccuacggguuccagccgaccaacggcgugggguaccagcccuaccggguggucgugcugagcuucgagcuccugcacgcccccgccacggugugcggccccaagaaguccaccaaccuggucaagaacaagugcgugaacuucaacuucaacggccucaccgggaccggcgugcugaccgagagcaacaagaaguuccugccguuccagcaguucgggcgcgacaucgccgacacgaccgacgcgguccgcgacccccagacccuggagauccucgacaucacccccugcagcuucggcgggguguccgugaucacgccgggcaccaacaccagcaaccaggucgccgugcuguaccaggacgugaacugcaccgagguccccguggccauccacgccgaccagcugacgcccaccuggcggguguacuccaccggcagcaacgucuuccagacccgcgccgggugccucaucggcgcggagcacgugaacaacuccuacgagugcgacauccccaucggggccggcaucugcgccagcuaccagacgcagaccaacuccccgcggcgcgcccggagcguggcgucccagagcaucaucgccuacaccaugucccugggcgccgagaacagcgucgccuacuccaacaacagcaucgccauccccaccaacuucacgaucuccgugaccaccgagauccugcccgugagcaugaccaagacgagcgucgacugcaccauguacaucugcggggacuccaccgagugcagcaaccuccugcugcaguacggcuccuucugcacccagcucaaccgcgcgcugacggggaucgccguggagcaggacaagaacacccaggagguguucgcccaggucaagcagaucuacaagacgcccccgaucaaggacuucggcggguucaacuucagccagauccugcccgaccccuccaagcccagcaagcgguccuucaucgaggaccuccuguucaacaaggugacccuggccgacgccggcuucaucaagcaguacggcgacugccucggggacaucgcggcccgcgaccugaucugcgcccagaaguucaacggccugaccgugcucccgccccugcugaccgacgagaugaucgcccaguacaccagcgcccuccuggcggggaccaucacguccggcuggaccuucggggccggcgccgcccugcagauccccuucgcgaugcagauggccuaccgguucaacggcugcggggucacccagaacgugcucuacgagaaccagaagcugaucgccaaccaguucaacagcgccaucggcaagauccaggacucccugagcuccaccgccagcgcgcucgggaagcugcaggacguggucaaccagaacgcccaggcccugaacacgcucgugaagcagcuguccagcaacuucggcgccaucuccagcgugcugaacgacauccucucccgccuggacaaggucgaggccgaggugcagaucgaccggcugaucaccgggcgccuccagagccugcagaccuacgugacccagcagcugauccgggcggccgagauccgcgccagcgccaaccucgccgcgaccaagauguccgagugcguccugggccagagcaagcggguggacuucugcggcaaggggugccaccugauguccuucccccagagcgccccgcacggcguggucuuccuccacgugacguacguccccgcccaggagaagaacuucaccaccgcccccgcgaucugccacgacgggaaggcccacuucccccgcgagggcguguucguguccaacgggacccacugguucgucacgcagcggaacuucuacgagccgcagaucaucaccaccgacaacaccuucgugagcggcaacugcgacguggucaucggcaucgugaacaacacgguguacgacccccugcagcccgagcuggacuccuucaaggaggagcucgacaaguacuucaagaaccacaccagccccgacgucgaccugggggacaucuccggcaucaacgccagcguggugaacauccagaaggagaucgaccgccugaacgaggucgccaagaaccucaacgagucccugaucgaccugcaggagcucgggaaguacgagcaguacaucaaguggccgugguacaucuggcugggcuucaucgccggccugaucgcgaucgugauggugaccaucaugcucugcugcaugaccagcugcugcuccugccugaaggggugcugcagcugcggcuccugcugcaaguucgacgaggacgacagcgagcccguccugaagggggugaagcuccacuacacguga

SEQ ID NO: 11807 - RNA, 3822 nt, Artificial Sequence
  SARS-CoV-2/Wuhan/WIV05/2019__EPI_ISL_402128 spike protein CDS gc (1-1273)(Q965C_S1003C)
auguucguguuccugguccuccugccccuggugagcucccagugcgugaaccucaccacccgcacgcagcugccgcccgccuacaccaacagcuucacccggggcgucuacuaccccgacaagguguuccgcuccagcgugcugcacuccacccaggaccucuuccugcccuucuucagcaacgucacgugguuccacgccauccacguguccgggaccaacggcaccaagcgguucgacaacccggugcugcccuucaacgacggggucuacuucgcgagcaccgagaaguccaacaucauccgcggcuggaucuucgggacgacccucgacagcaagacccagucccugcugaucgugaacaacgccaccaacguggucaucaaggugugcgaguuccaguucugcaacgaccccuuccucggcguguacuaccacaagaacaacaagagcuggauggaguccgaguuccgggucuacagcuccgccaacaacugcacguucgaguacgugagccagcccuuccugauggaccuggagggcaagcaggggaacuucaagaaccuccgcgaguucguguucaagaacaucgacggcuacuucaagaucuacuccaagcacaccccgaucaaccugguccgggaccugccccagggguucagcgcccucgagccccugguggaccugcccaucggcaucaacaucacccgcuuccagacccuccuggcccugcaccgguccuaccucacgccgggggacagcagcuccggcuggaccgcgggcgccgccgccuacuacgugggguaccugcagccccgcaccuuccugcucaaguacaacgagaacggcaccaucacggacgcggucgacugcgcccuggacccccugagcgagaccaagugcacccucaaguccuucaccguggagaaggggaucuaccagacgagcaacuuccgggugcagcccaccgaguccaucguccgcuucccgaacaucaccaaccugugccccuucggcgagguguucaacgccacccgguucgccagcgucuacgccuggaaccgcaagcggaucuccaacugcguggcggacuacagcgugcuguacaacuccgccagcuucuccacguucaagugcuacggcgucagccccaccaagcucaacgaccugugcuucaccaacguguacgccgacuccuucgugauccgcggggacgagguccggcagaucgcccccggccagaccgggaagaucgccgacuacaacuacaagcugccggacgacuucacgggcugcgugaucgcguggaacagcaacaaccucgacuccaaggucgggggcaacuacaacuaccuguaccgccuguuccgcaagagcaaccucaagcccuucgagcgggacaucuccaccgagaucuaccaggccggcagcacccccugcaacgggguggagggcuucaacugcuacuucccccugcaguccuacggguuccagccgaccaacggcgugggguaccagcccuaccggguggucgugcugagcuucgagcuccugcacgcccccgccacggugugcggccccaagaaguccaccaaccuggucaagaacaagugcgugaacuucaacuucaacggccucaccgggaccggcgugcugaccgagagcaacaagaaguuccugccguuccagcaguucgggcgcgacaucgccgacacgaccgacgcgguccgcgacccccagacccuggagauccucgacaucacccccugcagcuucggcgggguguccgugaucacgccgggcaccaacaccagcaaccaggucgccgugcuguaccaggacgugaacugcaccgagguccccguggccauccacgccgaccagcugacgcccaccuggcggguguacuccaccggcagcaacgucuuccagacccgcgccgggugccucaucggcgcggagcacgugaacaacuccuacgagugcgacauccccaucggggccggcaucugcgccagcuaccagacgcagaccaacuccccgcggcgcgcccggagcguggcgucccagagcaucaucgccuacaccaugucccugggcgccgagaacagcgucgccuacuccaacaacagcaucgccauccccaccaacuucacgaucuccgugaccaccgagauccugcccgugagcaugaccaagacgagcgucgacugcaccauguacaucugcggggacuccaccgagugcagcaaccuccugcugcaguacggcuccuucugcacccagcucaaccgcgcgcugacggggaucgccguggagcaggacaagaacacccaggagguguucgcccaggucaagcagaucuacaagacgcccccgaucaaggacuucggcggguucaacuucagccagauccugcccgaccccuccaagcccagcaagcgguccuucaucgaggaccuccuguucaacaaggugacccuggccgacgccggcuucaucaagcaguacggcgacugccucggggacaucgcggcccgcgaccugaucugcgcccagaaguucaacggccugaccgugcucccgccccugcugaccgacgagaugaucgcccaguacaccagcgcccuccuggcggggaccaucacguccggcuggaccuucggggccggcgccgcccugcagauccccuucgcgaugcagauggccuaccgguucaacggcaucggggucacccagaacgugcucuacgagaaccagaagcugaucgccaaccaguucaacagcgccaucggcaagauccaggacucccugagcuccaccgccagcgcgcucgggaagcugcaggacguggucaaccagaacgcccaggcccugaacacgcucgugaagugccuguccagcaacuucggcgccaucuccagcgugcugaacgacauccucucccgccuggacaaggucgaggccgaggugcagaucgaccggcugaucaccgggcgccuccagugccugcagaccuacgugacccagcagcugauccgggcggccgagauccgcgccagcgccaaccucgccgcgaccaagauguccgagugcguccugggccagagcaagcggguggacuucugcggcaagggguaccaccugauguccuucccccagagcgccccgcacggcguggucuuccuccacgugacguacguccccgcccaggagaagaacuucaccaccgcccccgcgaucugccacgacgggaaggcccacuucccccgcgagggcguguucguguccaacgggacccacugguucgucacgcagcggaacuucuacgagccgcagaucaucaccaccgacaacaccuucgugagcggcaacugcgacguggucaucggcaucgugaacaacacgguguacgacccccugcagcccgagcuggacuccuucaaggaggagcucgacaaguacuucaagaaccacaccagccccgacgucgaccugggggacaucuccggcaucaacgccagcguggugaacauccagaaggagaucgaccgccugaacgaggucgccaagaaccucaacgagucccugaucgaccugcaggagcucgggaaguacgagcaguacaucaaguggccgugguacaucuggcugggcuucaucgccggccugaucgcgaucgugauggugaccaucaugcucugcugcaugaccagcugcugcuccugccugaaggggugcugcagcugcggcuccugcugcaaguucgacgaggacgacagcgagcccguccugaagggggugaagcuccacuacacguga

SEQ ID NO: 11808 - RNA, 3822 nt, Artificial Sequence
  SARS-CoV-2/Wuhan/WIV05/2019__EPI_ISL_402128 spike protein CDS gc (1-1273)(F970C_G999C)
auguucguguuccugguccuccugccccuggugagcucccagugcgugaaccucaccacccgcacgcagcugccgcccgccuacaccaacagcuucacccggggcgucuacuaccccgacaagguguuccgcuccagcgugcugcacuccacccaggaccucuuccugcccuucuucagcaacgucacgugguuccacgccauccacguguccgggaccaacggcaccaagcgguucgacaacccggugcugcccuucaacgacggggucuacuucgcgagcaccgagaaguccaacaucauccgcggcuggaucuucgggacgacccucgacagcaagacccagucccugcugaucgugaacaacgccaccaacguggucaucaaggugugcgaguuccaguucugcaacgaccccuuccucggcguguacuaccacaagaacaacaagagcuggauggaguccgaguuccgggucuacagcuccgccaacaacugcacguucgaguacgugagccagcccuuccugauggaccuggagggcaagcaggggaacuucaagaaccuccgcgaguucguguucaagaacaucgacggcuacuucaagaucuacuccaagcacaccccgaucaaccugguccgggaccugccccagggguucagcgcccucgagccccugguggaccugcccaucggcaucaacaucacccgcuuccagacccuccuggcccugcaccgguccuaccucacgccgggggacagcagcuccggcuggaccgcgggcgccgccgccuacuacgugggguaccugcagccccgcaccuuccugcucaaguacaacgagaacggcaccaucacggacgcggucgacugcgcccuggacccccugagcgagaccaagugcacccucaaguccuucaccguggagaaggggaucuaccagacgagcaacuuccgggugcagcccaccgaguccaucguccgcuucccgaacaucaccaaccugugccccuucggcgagguguucaacgccacccgguucgccagcgucuacgccuggaaccgcaagcggaucuccaacugcguggcggacuacagcgugcuguacaacuccgccagcuucuccacguucaagugcuacggcgucagccccaccaagcucaacgaccugugcuucaccaacguguacgccgacuccuucgugauccgcggggacgagguccggcagaucgcccccggccagaccgggaagaucgccgacuacaacuacaagcugccggacgacuucacgggcugcgugaucgcguggaacagcaacaaccucgacuccaaggucgggggcaacuacaacuaccuguaccgccuguuccgcaagagcaaccucaagcccuucgagcgggacaucuccaccgagaucuaccaggccggcagcacccccugcaacgggguggagggcuucaacugcuacuucccccugcaguccuacggguuccagccgaccaacggcgugggguaccagcccuaccggguggucgugcugagcuucgagcuccugcacgcccccgccacggugugcggccccaagaaguccaccaaccuggucaagaacaagugcgugaacuucaacuucaacggccucaccgggaccggcgugcugaccgagagcaacaagaaguuccugccguuccagcaguucgggcgcgacaucgccgacacgaccgacgcgguccgcgacccccagacccuggagauccucgacaucacccccugcagcuucggcgggguguccgugaucacgccgggcaccaacaccagcaaccaggucgccgugcuguaccaggacgugaacugcaccgagguccccguggccauccacgccgaccagcugacgcccaccuggcggguguacuccaccggcagcaacgucuuccagacccgcgccgggugccucaucggcgcggagcacgugaacaacuccuacgagugcgacauccccaucggggccggcaucugcgccagcuaccagacgcagaccaacuccccgcggcgcgcccggagcguggcgucccagagcaucaucgccuacaccaugucccugggcgccgagaacagcgucgccuacuccaacaacagcaucgccauccccaccaacuucacgaucuccgugaccaccgagauccugcccgugagcaugaccaagacgagcgucgacugcaccauguacaucugcggggacuccaccgagugcagcaaccuccugcugcaguacggcuccuucugcacccagcucaaccgcgcgcugacggggaucgccguggagcaggacaagaacacccaggagguguucgcccaggucaagcagaucuacaagacgcccccgaucaaggacuucggcggguucaacuucagccagauccugcccgaccccuccaagcccagcaagcgguccuucaucgaggaccuccuguucaacaaggugacccuggccgacgccggcuucaucaagcaguacggcgacugccucggggacaucgcggcccgcgaccugaucugcgcccagaaguucaacggccugaccgugcucccgccccugcugaccgacgagaugaucgcccaguacaccagcgcccuccuggcggggaccaucacguccggcuggaccuucggggccggcgccgcccugcagauccccuucgcgaugcagauggccuaccgguucaacggcaucggggucacccagaacgugcucuacgagaaccagaagcugaucgccaaccaguucaacagcgccaucggcaagauccaggacucccugagcuccaccgccagcgcgcucgggaagcugcaggacguggucaaccagaacgcccaggcccugaacacgcucgugaagcagcuguccagcaacugcggcgccaucuccagcgugcugaacgacauccucucccgccuggacaaggucgaggccgaggugcagaucgaccggcugaucaccugucgccuccagagccugcagaccuacgugacccagcagcugauccgggcggccgagauccgcgccagcgccaaccucgccgcgaccaagauguccgagugcguccugggccagagcaagcggguggacuucugcggcaagggguaccaccugauguccuucccccagagcgccccgcacggcguggucuuccuccacgugacguacguccccgcccaggagaagaacuucaccaccgcccccgcgaucugccacgacgggaaggcccacuucccccgcgagggcguguucguguccaacgggacccacugguucgucacgcagcggaacuucuacgagccgcagaucaucaccaccgacaacaccuucgugagcggcaacugcgacguggucaucggcaucgugaacaacacgguguacgacccccugcagcccgagcuggacuccuucaaggaggagcucgacaaguacuucaagaaccacaccagccccgacgucgaccugggggacaucuccggcaucaacgccagcguggugaacauccagaaggagaucgaccgccugaacgaggucgccaagaaccucaacgagucccugaucgaccugcaggagcucgggaaguacgagcaguacaucaaguggccgugguacaucuggcugggcuucaucgccggccugaucgcgaucgugauggugaccaucaugcucugcugcaugaccagcugcugcuccugccugaaggggugcugcagcugcggcuccugcugcaaguucgacgaggacgacagcgagcccguccugaagggggugaagcuccacuacacguga

SEQ ID NO: 11809 - RNA, 3822 nt, Artificial Sequence
  SARS-CoV-2/Wuhan/WIV05/2019__EPI_ISL_402128 spike protein CDS gc (1-1273)(A972C_R995C)
auguucguguuccugguccuccugccccuggugagcucccagugcgugaaccucaccacccgcacgcagcugccgcccgccuacaccaacagcuucacccggggcgucuacuaccccgacaagguguuccgcuccagcgugcugcacuccacccaggaccucuuccugcccuucuucagcaacgucacgugguuccacgccauccacguguccgggaccaacggcaccaagcgguucgacaacccggugcugcccuucaacgacggggucuacuucgcgagcaccgagaaguccaacaucauccgcggcuggaucuucgggacgacccucgacagcaagacccagucccugcugaucgugaacaacgccaccaacguggucaucaaggugugcgaguuccaguucugcaacgaccccuuccucggcguguacuaccacaagaacaacaagagcuggauggaguccgaguuccgggucuacagcuccgccaacaacugcacguucgaguacgugagccagcccuuccugauggaccuggagggcaagcaggggaacuucaagaaccuccgcgaguucguguucaagaacaucgacggcuacuucaagaucuacuccaagcacaccccgaucaaccugguccgggaccugccccagggguucagcgcccucgagccccugguggaccugcccaucggcaucaacaucacccgcuuccagacccuccuggcccugcaccgguccuaccucacgccgggggacagcagcuccggcuggaccgcgggcgccgccgccuacuacgugggguaccugcagccccgcaccuuccugcucaaguacaacgagaacggcaccaucacggacgcggucgacugcgcccuggacccccugagcgagaccaagugcacccucaaguccuucaccguggagaaggggaucuaccagacgagcaacuuccgggugcagcccaccgaguccaucguccgcuucccgaacaucaccaaccugugccccuucggcgagguguucaacgccacccgguucgccagcgucuacgccuggaaccgcaagcggaucuccaacugcguggcggacuacagcgugcuguacaacuccgccagcuucuccacguucaagugcuacggcgucagccccaccaagcucaacgaccugugcuucaccaacguguacgccgacuccuucgugauccgcggggacgagguccggcagaucgcccccggccagaccgggaagaucgccgacuacaacuacaagcugccggacgacuucacgggcugcgugaucgcguggaacagcaacaaccucgacuccaaggucgggggcaacuacaacuaccuguaccgccuguuccgcaagagcaaccucaagcccuucgagcgggacaucuccaccgagaucuaccaggccggcagcacccccugcaacgggguggagggcuucaacugcuacuucccccugcaguccuacggguuccagccgaccaacggcgugggguaccagcccuaccggguggucgugcugagcuucgagcuccugcacgcccccgccacggugugcggccccaagaaguccaccaaccuggucaagaacaagugcgugaacuucaacuucaacggccucaccgggaccggcgugcugaccgagagcaacaagaaguuccugccguuccagcaguucgggcgcgacaucgccgacacgaccgacgcgguccgcgacccccagacccuggagauccucgacaucacccccugcagcuucggcgggguguccgugaucacgccgggcaccaacaccagcaaccaggucgccgugcuguaccaggacgugaacugcaccgagguccccguggccauccacgccgaccagcugacgcccaccuggcggguguacuccaccggcagcaacgucuuccagacccgcgccgggugccucaucggcgcggagcacgugaacaacuccuacgagugcgacauccccaucggggccggcaucugcgccagcuaccagacgcagaccaacuccccgcggcgcgcccggagcguggcgucccagagcaucaucgccuacaccaugucccugggcgccgagaacagcgucgccuacuccaacaacagcaucgccauccccaccaacuucacgaucuccgugaccaccgagauccugcccgugagcaugaccaagacgagcgucgacugcaccauguacaucugcggggacuccaccgagugcagcaaccuccugcugcaguacggcuccuucugcacccagcucaaccgcgcgcugacggggaucgccguggagcaggacaagaacacccaggagguguucgcccaggucaagcagaucuacaagacgcccccgaucaaggacuucggcggguucaacuucagccagauccugcccgaccccuccaagcccagcaagcgguccuucaucgaggaccuccuguucaacaaggugacccuggccgacgccggcuucaucaagcaguacggcgacugccucggggacaucgcggcccgcgaccugaucugcgcccagaaguucaacggccugaccgugcucccgccccugcugaccgacgagaugaucgcccaguacaccagcgcccuccuggcggggaccaucacguccggcuggaccuucggggccggcgccgcccugcagauccccuucgcgaugcagauggccuaccgguucaacggcaucggggucacccagaacgugcucuacgagaaccagaagcugaucgccaaccaguucaacagcgccaucggcaagauccaggacucccugagcuccaccgccagcgcgcucgggaagcugcaggacguggucaaccagaacgcccaggcccugaacacgcucgugaagcagcuguccagcaacuucggcugcaucuccagcgugcugaacgacauccucucccgccuggacaaggucgaggccgaggugcagaucgacugccugaucaccgggcgccuccagagccugcagaccuacgugacccagcagcugauccgggcggccgagauccgcgccagcgccaaccucgccgcgaccaagauguccgagugcguccugggccagagcaagcggguggacuucugcggcaagggguaccaccugauguccuucccccagagcgccccgcacggcguggucuuccuccacgugacguacguccccgcccaggagaagaacuucaccaccgcccccgcgaucugccacgacgggaaggcccacuucccccgcgagggcguguucguguccaacgggacccacugguucgucacgcagcggaacuucuacgagccgcagaucaucaccaccgacaacaccuucgugagcggcaacugcgacguggucaucggcaucgugaacaacacgguguacgacccccugcagcccgagcuggacuccuucaaggaggagcucgacaaguacuucaagaaccacaccagccccgacgucgaccugggggacaucuccggcaucaacgccagcguggugaacauccagaaggagaucgaccgccugaacgaggucgccaagaaccucaacgagucccugaucgaccugcaggagcucgggaaguacgagcaguacaucaaguggccgugguacaucuggcugggcuucaucgccggccugaucgcgaucgugauggugaccaucaugcucugcugcaugaccagcugcugcuccugccugaaggggugcugcagcugcggcuccugcugcaaguucgacgaggacgacagcgagcccguccugaagggggugaagcuccacuacacguga

SEQ ID NO: 11810 - RNA, 3822 nt, Artificial Sequence
  SARS-CoV-2/Wuhan/WIV05/2019__EPI_ISL_402128 spike protein CDS gc (1-1273)(A890C_V1040C)
auguucguguuccugguccuccugccccuggugagcucccagugcgugaaccucaccacccgcacgcagcugccgcccgccuacaccaacagcuucacccggggcgucuacuaccccgacaagguguuccgcuccagcgugcugcacuccacccaggaccucuuccugcccuucuucagcaacgucacgugguuccacgccauccacguguccgggaccaacggcaccaagcgguucgacaacccggugcugcccuucaacgacggggucuacuucgcgagcaccgagaaguccaacaucauccgcggcuggaucuucgggacgacccucgacagcaagacccagucccugcugaucgugaacaacgccaccaacguggucaucaaggugugcgaguuccaguucugcaacgaccccuuccucggcguguacuaccacaagaacaacaagagcuggauggaguccgaguuccgggucuacagcuccgccaacaacugcacguucgaguacgugagccagcccuuccugauggaccuggagggcaagcaggggaacuucaagaaccuccgcgaguucguguucaagaacaucgacggcuacuucaagaucuacuccaagcacaccccgaucaaccugguccgggaccugccccagggguucagcgcccucgagccccugguggaccugcccaucggcaucaacaucacccgcuuccagacccuccuggcccugcaccgguccuaccucacgccgggggacagcagcuccggcuggaccgcgggcgccgccgccuacuacgugggguaccugcagccccgcaccuuccugcucaaguacaacgagaacggcaccaucacggacgcggucgacugcgcccuggacccccugagcgagaccaagugcacccucaaguccuucaccguggagaaggggaucuaccagacgagcaacuuccgggugcagcccaccgaguccaucguccgcuucccgaacaucaccaaccugugccccuucggcgagguguucaacgccacccgguucgccagcgucuacgccuggaaccgcaagcggaucuccaacugcguggcggacuacagcgugcuguacaacuccgccagcuucuccacguucaagugcuacggcgucagccccaccaagcucaacgaccugugcuucaccaacguguacgccgacuccuucgugauccgcggggacgagguccggcagaucgcccccggccagaccgggaagaucgccgacuacaacuacaagcugccggacgacuucacgggcugcgugaucgcguggaacagcaacaaccucgacuccaaggucgggggcaacuacaacuaccuguaccgccuguuccgcaagagcaaccucaagcccuucgagcgggacaucuccaccgagaucuaccaggccggcagcacccccugcaacgggguggagggcuucaacugcuacuucccccugcaguccuacggguuccagccgaccaacggcgugggguaccagcccuaccggguggucgugcugagcuucgagcuccugcacgcccccgccacggugugcggccccaagaaguccaccaaccuggucaagaacaagugcgugaacuucaacuucaacggccucaccgggaccggcgugcugaccgagagcaacaagaaguuccugccguuccagcaguucgggcgcgacaucgccgacacgaccgacgcgguccgcgacccccagacccuggagauccucgacaucacccccugcagcuucggcgggguguccgugaucacgccgggcaccaacaccagcaaccaggucgccgugcuguaccaggacgugaacugcaccgagguccccguggccauccacgccgaccagcugacgcccaccuggcggguguacuccaccggcagcaacgucuuccagacccgcgccgggugccucaucggcgcggagcacgugaacaacuccuacgagugcgacauccccaucggggccggcaucugcgccagcuaccagacgcagaccaacuccccgcggcgcgcccggagcguggcgucccagagcaucaucgccuacaccaugucccugggcgccgagaacagcgucgccuacuccaacaacagcaucgccauccccaccaacuucacgaucuccgugaccaccgagauccugcccgugagcaugaccaagacgagcgucgacugcaccauguacaucugcggggacuccaccgagugcagcaaccuccugcugcaguacggcuccuucugcacccagcucaaccgcgcgcugacggggaucgccguggagcaggacaagaacacccaggagguguucgcccaggucaagcagaucuacaagacgcccccgaucaaggacuucggcggguucaacuucagccagauccugcccgaccccuccaagcccagcaagcgguccuucaucgaggaccuccuguucaacaaggugacccuggccgacgccggcuucaucaagcaguacggcgacugccucggggacaucgcggcccgcgaccugaucugcgcccagaaguucaacggccugaccgugcucccgccccugcugaccgacgagaugaucgcccaguacaccagcgcccuccuggcggggaccaucacguccggcuggaccuucgggugcggcgccgcccugcagauccccuucgcgaugcagauggccuaccgguucaacggcaucggggucacccagaacgugcucuacgagaaccagaagcugaucgccaaccaguucaacagcgccaucggcaagauccaggacucccugagcuccaccgccagcgcgcucgggaagcugcaggacguggucaaccagaacgcccaggcccugaacacgcucgugaagcagcuguccagcaacuucggcgccaucuccagcgugcugaacgacauccucucccgccuggacaaggucgaggccgaggugcagaucgaccggcugaucaccgggcgccuccagagccugcagaccuacgugacccagcagcugauccgggcggccgagauccgcgccagcgccaaccucgccgcgaccaagauguccgagugcguccugggccagagcaagcggugcgacuucugcggcaagggguaccaccugauguccuucccccagagcgccccgcacggcguggucuuccuccacgugacguacguccccgcccaggagaagaacuucaccaccgcccccgcgaucugccacgacgggaaggcccacuucccccgcgagggcguguucguguccaacgggacccacugguucgucacgcagcggaacuucuacgagccgcagaucaucaccaccgacaacaccuucgugagcggcaacugcgacguggucaucggcaucgugaacaacacgguguacgacccccugcagcccgagcuggacuccuucaaggaggagcucgacaaguacuucaagaaccacaccagccccgacgucgaccugggggacaucuccggcaucaacgccagcguggugaacauccagaaggagaucgaccgccugaacgaggucgccaagaaccucaacgagucccugaucgaccugcaggagcucgggaaguacgagcaguacaucaaguggccgugguacaucuggcugggcuucaucgccggccugaucgcgaucgugauggugaccaucaugcucugcugcaugaccagcugcugcuccugccugaaggggugcugcagcugcggcuccugcugcaaguucgacgaggacgacagcgagcccguccugaagggggugaagcuccacuacacguga

SEQ ID NO: 11811 - RNA, 3822 nt, Artificial Sequence
  SARS-CoV-2/Wuhan/WIV05/2019__EPI_ISL_402128 spike protein CDS gc (1-1273)(T874C_S1055C)
auguucguguuccugguccuccugccccuggugagcucccagugcgugaaccucaccacccgcacgcagcugccgcccgccuacaccaacagcuucacccggggcgucuacuaccccgacaagguguuccgcuccagcgugcugcacuccacccaggaccucuuccugcccuucuucagcaacgucacgugguuccacgccauccacguguccgggaccaacggcaccaagcgguucgacaacccggugcugcccuucaacgacggggucuacuucgcgagcaccgagaaguccaacaucauccgcggcuggaucuucgggacgacccucgacagcaagacccagucccugcugaucgugaacaacgccaccaacguggucaucaaggugugcgaguuccaguucugcaacgaccccuuccucggcguguacuaccacaagaacaacaagagcuggauggaguccgaguuccgggucuacagcuccgccaacaacugcacguucgaguacgugagccagcccuuccugauggaccuggagggcaagcaggggaacuucaagaaccuccgcgaguucguguucaagaacaucgacggcuacuucaagaucuacuccaagcacaccccgaucaaccugguccgggaccugccccagggguucagcgcccucgagccccugguggaccugcccaucggcaucaacaucacccgcuuccagacccuccuggcccugcaccgguccuaccucacgccgggggacagcagcuccggcuggaccgcgggcgccgccgccuacuacgugggguaccugcagccccgcaccuuccugcucaaguacaacgagaacggcaccaucacggacgcggucgacugcgcccuggacccccugagcgagaccaagugcacccucaaguccuucaccguggagaaggggaucuaccagacgagcaacuuccgggugcagcccaccgaguccaucguccgcuucccgaacaucaccaaccugugccccuucggcgagguguucaacgccacccgguucgccagcgucuacgccuggaaccgcaagcggaucuccaacugcguggcggacuacagcgugcuguacaacuccgccagcuucuccacguucaagugcuacggcgucagccccaccaagcucaacgaccugugcuucaccaacguguacgccgacuccuucgugauccgcggggacgagguccggcagaucgcccccggccagaccgggaagaucgccgacuacaacuacaagcugccggacgacuucacgggcugcgugaucgcguggaacagcaacaaccucgacuccaaggucgggggcaacuacaacuaccuguaccgccuguuccgcaagagcaaccucaagcccuucgagcgggacaucuccaccgagaucuaccaggccggcagcacccccugcaacgggguggagggcuucaacugcuacuucccccugcaguccuacggguuccagccgaccaacggcgugggguaccagcccuaccggguggucgugcugagcuucgagcuccugcacgcccccgccacggugugcggccccaagaaguccaccaaccuggucaagaacaagugcgugaacuucaacuucaacggccucaccgggaccggcgugcugaccgagagcaacaagaaguuccugccguuccagcaguucgggcgcgacaucgccgacacgaccgacgcgguccgcgacccccagacccuggagauccucgacaucacccccugcagcuucggcgggguguccgugaucacgccgggcaccaacaccagcaaccaggucgccgugcuguaccaggacgugaacugcaccgagguccccguggccauccacgccgaccagcugacgcccaccuggcggguguacuccaccggcagcaacgucuuccagacccgcgccgggugccucaucggcgcggagcacgugaacaacuccuacgagugcgacauccccaucggggccggcaucugcgccagcuaccagacgcagaccaacuccccgcggcgcgcccggagcguggcgucccagagcaucaucgccuacaccaugucccugggcgccgagaacagcgucgccuacuccaacaacagcaucgccauccccaccaacuucacgaucuccgugaccaccgagauccugcccgugagcaugaccaagacgagcgucgacugcaccauguacaucugcggggacuccaccgagugcagcaaccuccugcugcaguacggcuccuucugcacccagcucaaccgcgcgcugacggggaucgccguggagcaggacaagaacacccaggagguguucgcccaggucaagcagaucuacaagacgcccccgaucaaggacuucggcggguucaacuucagccagauccugcccgaccccuccaagcccagcaagcgguccuucaucgaggaccuccuguucaacaaggugacccuggccgacgccggcuucaucaagcaguacggcgacugccucggggacaucgcggcccgcgaccugaucugcgcccagaaguucaacggccugaccgugcucccgccccugcugaccgacgagaugaucgcccaguacugcagcgcccuccuggcggggaccaucacguccggcuggaccuucggggccggcgccgcccugcagauccccuucgcgaugcagauggccuaccgguucaacggcaucggggucacccagaacgugcucuacgagaaccagaagcugaucgccaaccaguucaacagcgccaucggcaagauccaggacucccugagcuccaccgccagcgcgcucgggaagcugcaggacguggucaaccagaacgcccaggcccugaacacgcucgugaagcagcuguccagcaacuucggcgccaucuccagcgugcugaacgacauccucucccgccuggacaaggucgaggccgaggugcagaucgaccggcugaucaccgggcgccuccagagccugcagaccuacgugacccagcagcugauccgggcggccgagauccgcgccagcgccaaccucgccgcgaccaagauguccgagugcguccugggccagagcaagcggguggacuucugcggcaagggguaccaccugauguccuucccccagugcgccccgcacggcguggucuuccuccacgugacguacguccccgcccaggagaagaacuucaccaccgcccccgcgaucugccacgacgggaaggcccacuucccccgcgagggcguguucguguccaacgggacccacugguucgucacgcagcggaacuucuacgagccgcagaucaucaccaccgacaacaccuucgugagcggcaacugcgacguggucaucggcaucgugaacaacacgguguacgacccccugcagcccgagcuggacuccuucaaggaggagcucgacaaguacuucaagaaccacaccagccccgacgucgaccugggggacaucuccggcaucaacgccagcguggugaacauccagaaggagaucgaccgccugaacgaggucgccaagaaccucaacgagucccugaucgaccugcaggagcucgggaaguacgagcaguacaucaaguggccgugguacaucuggcugggcuucaucgccggccugaucgcgaucgugauggugaccaucaugcucugcugcaugaccagcugcugcuccugccugaaggggugcugcagcugcggcuccugcugcaaguucgacgaggacgacagcgagcccguccugaagggggugaagcuccacuacacguga

SEQ ID NO: 11812 - RNA, 2046 nt, Artificial Sequence; identical to SEQ ID NO: 138
  SARS-CoV-2/Wuhan/WIV05/2019__EPI_ISL_402128 spike protein CDS gc (1-681)

SEQ ID NO: 11813 - RNA, 1776 nt, Artificial Sequence; identical to SEQ ID NO: 141
  SARS-CoV-2/Wuhan/WIV05/2019__EPI_ISL_402128 spike protein CDS gc (682-1273)

SEQ ID NO: 11814 - RNA, 45 nt, Artificial Sequence; identical to SEQ ID NO: 139
  SARS-CoV-2/Wuhan/WIV05/2019__EPI_ISL_402128 spike protein CDS gc (1-15)

SEQ ID NO: 11815 - RNA, 1998 nt, Artificial Sequence; identical to SEQ ID NO: 140
  SARS-CoV-2/Wuhan/WIV05/2019__EPI_ISL_402128 spike protein CDS gc (16-681)

SEQ ID NO: 11816 - RNA, 189 nt, Artificial Sequence
  SARS-CoV-2/Wuhan/WIV05/2019__EPI_ISL_402128 spike protein CDS gc (1212-1273)
uggccgugguacaucuggcugggcuucaucgccggccugaucgcgaucgugauggugaccaucaugcucugcugcaugaccagcugcugcuccugccugaaggggugcugcagcugcggcuccugcugcaaguucgacgaggacgacagcgagcccguccugaagggggugaagcuccacuacacguga

SEQ ID NO: 11817 - RNA, 3633 nt, Artificial Sequence
  SARS-CoV-2/Wuhan/WIV05/2019__EPI_ISL_402128 spike protein CDS gc (1-1211)
auguucguguuccugguccuccugccccuggugagcucccagugcgugaaccucaccacccgcacgcagcugccgcccgccuacaccaacagcuucacccggggcgucuacuaccccgacaagguguuccgcuccagcgugcugcacuccacccaggaccucuuccugcccuucuucagcaacgucacgugguuccacgccauccacguguccgggaccaacggcaccaagcgguucgacaacccggugcugcccuucaacgacggggucuacuucgcgagcaccgagaaguccaacaucauccgcggcuggaucuucgggacgacccucgacagcaagacccagucccugcugaucgugaacaacgccaccaacguggucaucaaggugugcgaguuccaguucugcaacgaccccuuccucggcguguacuaccacaagaacaacaagagcuggauggaguccgaguuccgggucuacagcuccgccaacaacugcacguucgaguacgugagccagcccuuccugauggaccuggagggcaagcaggggaacuucaagaaccuccgcgaguucguguucaagaacaucgacggcuacuucaagaucuacuccaagcacaccccgaucaaccugguccgggaccugccccagggguucagcgcccucgagccccugguggaccugcccaucggcaucaacaucacccgcuuccagacccuccuggcccugcaccgguccuaccucacgccgggggacagcagcuccggcuggaccgcgggcgccgccgccuacuacgugggguaccugcagccccgcaccuuccugcucaaguacaacgagaacggcaccaucacggacgcggucgacugcgcccuggacccccugagcgagaccaagugcacccucaaguccuucaccguggagaaggggaucuaccagacgagcaacuuccgggugcagcccaccgaguccaucguccgcuucccgaacaucaccaaccugugccccuucggcgagguguucaacgccacccgguucgccagcgucuacgccuggaaccgcaagcggaucuccaacugcguggcggacuacagcgugcuguacaacuccgccagcuucuccacguucaagugcuacggcgucagccccaccaagcucaacgaccugugcuucaccaacguguacgccgacuccuucgugauccgcggggacgagguccggcagaucgcccccggccagaccgggaagaucgccgacuacaacuacaagcugccggacgacuucacgggcugcgugaucgcguggaacagcaacaaccucgacuccaaggucgggggcaacuacaacuaccuguaccgccuguuccgcaagagcaaccucaagcccuucgagcgggacaucuccaccgagaucuaccaggccggcagcacccccugcaacgggguggagggcuucaacugcuacuucccccugcaguccuacggguuccagccgaccaacggcgugggguaccagcccuaccggguggucgugcugagcuucgagcuccugcacgcccccgccacggugugcggccccaagaaguccaccaaccuggucaagaacaagugcgugaacuucaacuucaacggccucaccgggaccggcgugcugaccgagagcaacaagaaguuccugccguuccagcaguucgggcgcgacaucgccgacacgaccgacgcgguccgcgacccccagacccuggagauccucgacaucacccccugcagcuucggcgggguguccgugaucacgccgggcaccaacaccagcaaccaggucgccgugcuguaccaggacgugaacugcaccgagguccccguggccauccacgccgaccagcugacgcccaccuggcggguguacuccaccggcagcaacgucuuccagacccgcgccgggugccucaucggcgcggagcacgugaacaacuccuacgagugcgacauccccaucggggccggcaucugcgccagcuaccagacgcagaccaacuccccgcggcgcgcccggagcguggcgucccagagcaucaucgccuacaccaugucccugggcgccgagaacagcgucgccuacuccaacaacagcaucgccauccccaccaacuucacgaucuccgugaccaccgagauccugcccgugagcaugaccaagacgagcgucgacugcaccauguacaucugcggggacuccaccgagugcagcaaccuccugcugcaguacggcuccuucugcacccagcucaaccgcgcgcugacggggaucgccguggagcaggacaagaacacccaggagguguucgcccaggucaagcagaucuacaagacgcccccgaucaaggacuucggcggguucaacuucagccagauccugcccgaccccuccaagcccagcaagcgguccuucaucgaggaccuccuguucaacaaggugacccuggccgacgccggcuucaucaagcaguacggcgacugccucggggacaucgcggcccgcgaccugaucugcgcccagaaguucaacggccugaccgugcucccgccccugcugaccgacgagaugaucgcccaguacaccagcgcccuccuggcggggaccaucacguccggcuggaccuucggggccggcgccgcccugcagauccccuucgcgaugcagauggccuaccgguucaacggcaucggggucacccagaacgugcucuacgagaaccagaagcugaucgccaaccaguucaacagcgccaucggcaagauccaggacucccugagcuccaccgccagcgcgcucgggaagcugcaggacguggucaaccagaacgcccaggcccugaacacgcucgugaagcagcuguccagcaacuucggcgccaucuccagcgugcugaacgacauccucucccgccuggacaaggucgaggccgaggugcagaucgaccggcugaucaccgggcgccuccagagccugcagaccuacgugacccagcagcugauccgggcggccgagauccgcgccagcgccaaccucgccgcgaccaagauguccgagugcguccugggccagagcaagcggguggacuucugcggcaagggguaccaccugauguccuucccccagagcgccccgcacggcguggucuuccuccacgugacguacguccccgcccaggagaagaacuucaccaccgcccccgcgaucugccacgacgggaaggcccacuucccccgcgagggcguguucguguccaacgggacccacugguucgucacgcagcggaacuucuacgagccgcagaucaucaccaccgacaacaccuucgugagcggcaacugcgacguggucaucggcaucgugaacaacacgguguacgacccccugcagcccgagcuggacuccuucaaggaggagcucgacaaguacuucaagaaccacaccagccccgacgucgaccugggggacaucuccggcaucaacgccagcguggugaacauccagaaggagaucgaccgccugaacgaggucgccaagaaccucaacgagucccugaucgaccugcaggagcucgggaaguacgagcaguacaucaag

SEQ ID NO: 11818 - RNA, 3633 nt, Artificial Sequence
  SARS-CoV-2/Wuhan/WIV05/2019__EPI_ISL_402128 spike protein CDS gc (1-1211)(K986P_V987P)
auguucguguuccugguccuccugccccuggugagcucccagugcgugaaccucaccacccgcacgcagcugccgcccgccuacaccaacagcuucacccggggcgucuacuaccccgacaagguguuccgcuccagcgugcugcacuccacccaggaccucuuccugcccuucuucagcaacgucacgugguuccacgccauccacguguccgggaccaacggcaccaagcgguucgacaacccggugcugcccuucaacgacggggucuacuucgcgagcaccgagaaguccaacaucauccgcggcuggaucuucgggacgacccucgacagcaagacccagucccugcugaucgugaacaacgccaccaacguggucaucaaggugugcgaguuccaguucugcaacgaccccuuccucggcguguacuaccacaagaacaacaagagcuggauggaguccgaguuccgggucuacagcuccgccaacaacugcacguucgaguacgugagccagcccuuccugauggaccuggagggcaagcaggggaacuucaagaaccuccgcgaguucguguucaagaacaucgacggcuacuucaagaucuacuccaagcacaccccgaucaaccugguccgggaccugccccagggguucagcgcccucgagccccugguggaccugcccaucggcaucaacaucacccgcuuccagacccuccuggcccugcaccgguccuaccucacgccgggggacagcagcuccggcuggaccgcgggcgccgccgccuacuacgugggguaccugcagccccgcaccuuccugcucaaguacaacgagaacggcaccaucacggacgcggucgacugcgcccuggacccccugagcgagaccaagugcacccucaaguccuucaccguggagaaggggaucuaccagacgagcaacuuccgggugcagcccaccgaguccaucguccgcuucccgaacaucaccaaccugugccccuucggcgagguguucaacgccacccgguucgccagcgucuacgccuggaaccgcaagcggaucuccaacugcguggcggacuacagcgugcuguacaacuccgccagcuucuccacguucaagugcuacggcgucagccccaccaagcucaacgaccugugcuucaccaacguguacgccgacuccuucgugauccgcggggacgagguccggcagaucgcccccggccagaccgggaagaucgccgacuacaacuacaagcugccggacgacuucacgggcugcgugaucgcguggaacagcaacaaccucgacuccaaggucgggggcaacuacaacuaccuguaccgccuguuccgcaagagcaaccucaagcccuucgagcgggacaucuccaccgagaucuaccaggccggcagcacccccugcaacgggguggagggcuucaacugcuacuucccccugcaguccuacggguuccagccgaccaacggcgugggguaccagcccuaccggguggucgugcugagcuucgagcuccugcacgcccccgccacggugugcggccccaagaaguccaccaaccuggucaagaacaagugcgugaacuucaacuucaacggccucaccgggaccggcgugcugaccgagagcaacaagaaguuccugccguuccagcaguucgggcgcgacaucgccgacacgaccgacgcgguccgcgacccccagacccuggagauccucgacaucacccccugcagcuucggcgggguguccgugaucacgccgggcaccaacaccagcaaccaggucgccgugcuguaccaggacgugaacugcaccgagguccccguggccauccacgccgaccagcugacgcccaccuggcggguguacuccaccggcagcaacgucuuccagacccgcgccgggugccucaucggcgcggagcacgugaacaacuccuacgagugcgacauccccaucggggccggcaucugcgccagcuaccagacgcagaccaacuccccgcggcgcgcccggagcguggcgucccagagcaucaucgccuacaccaugucccugggcgccgagaacagcgucgccuacuccaacaacagcaucgccauccccaccaacuucacgaucuccgugaccaccgagauccugcccgugagcaugaccaagacgagcgucgacugcaccauguacaucugcggggacuccaccgagugcagcaaccuccugcugcaguacggcuccuucugcacccagcucaaccgcgcgcugacggggaucgccguggagcaggacaagaacacccaggagguguucgcccaggucaagcagaucuacaagacgcccccgaucaaggacuucggcggguucaacuucagccagauccugcccgaccccuccaagcccagcaagcgguccuucaucgaggaccuccuguucaacaaggugacccuggccgacgccggcuucaucaagcaguacggcgacugccucggggacaucgcggcccgcgaccugaucugcgcccagaaguucaacggccugaccgugcucccgccccugcugaccgacgagaugaucgcccaguacaccagcgcccuccuggcggggaccaucacguccggcuggaccuucggggccggcgccgcccugcagauccccuucgcgaugcagauggccuaccgguucaacggcaucggggucacccagaacgugcucuacgagaaccagaagcugaucgccaaccaguucaacagcgccaucggcaagauccaggacucccugagcuccaccgccagcgcgcucgggaagcugcaggacguggucaaccagaacgcccaggcccugaacacgcucgugaagcagcuguccagcaacuucggcgccaucuccagcgugcugaacgacauccucucccgccuggacccgcccgaggccgaggugcagaucgaccggcugaucaccgggcgccuccagagccugcagaccuacgugacccagcagcugauccgggcggccgagauccgcgccagcgccaaccucgccgcgaccaagauguccgagugcguccugggccagagcaagcggguggacuucugcggcaagggguaccaccugauguccuucccccagagcgccccgcacggcguggucuuccuccacgugacguacguccccgcccaggagaagaacuucaccaccgcccccgcgaucugccacgacgggaaggcccacuucccccgcgagggcguguucguguccaacgggacccacugguucgucacgcagcggaacuucuacgagccgcagaucaucaccaccgacaacaccuucgugagcggcaacugcgacguggucaucggcaucgugaacaacacgguguacgacccccugcagcccgagcuggacuccuucaaggaggagcucgacaaguacuucaagaaccacaccagccccgacgucgaccugggggacaucuccggcaucaacgccagcguggugaacauccagaaggagaucgaccgccugaacgaggucgccaagaaccucaacgagucccugaucgaccugcaggagcucgggaaguacgagcaguacaucaag

SEQ ID NO: 11819 - RNA, 3633 nt, Artificial Sequence
  SARS-CoV-2/Wuhan/WIV05/2019__EPI_ISL_402128 spike protein CDS gc (1-1211)(K986P_V987P_T887WN_A1020W)
auguucguguuccugguccuccugccccuggugagcucccagugcgugaaccucaccacccgcacgcagcugccgcccgccuacaccaacagcuucacccggggcgucuacuaccccgacaagguguuccgcuccagcgugcugcacuccacccaggaccucuuccugcccuucuucagcaacgucacgugguuccacgccauccacguguccgggaccaacggcaccaagcgguucgacaacccggugcugcccuucaacgacggggucuacuucgcgagcaccgagaaguccaacaucauccgcggcuggaucuucgggacgacccucgacagcaagacccagucccugcugaucgugaacaacgccaccaacguggucaucaaggugugcgaguuccaguucugcaacgaccccuuccucggcguguacuaccacaagaacaacaagagcuggauggaguccgaguuccgggucuacagcuccgccaacaacugcacguucgaguacgugagccagcccuuccugauggaccuggagggcaagcaggggaacuucaagaaccuccgcgaguucguguucaagaacaucgacggcuacuucaagaucuacuccaagcacaccccgaucaaccugguccgggaccugccccagggguucagcgcccucgagccccugguggaccugcccaucggcaucaacaucacccgcuuccagacccuccuggcccugcaccgguccuaccucacgccgggggacagcagcuccggcuggaccgcgggcgccgccgccuacuacgugggguaccugcagccccgcaccuuccugcucaaguacaacgagaacggcaccaucacggacgcggucgacugcgcccuggacccccugagcgagaccaagugcacccucaaguccuucaccguggagaaggggaucuaccagacgagcaacuuccgggugcagcccaccgaguccaucguccgcuucccgaacaucaccaaccugugccccuucggcgagguguucaacgccacccgguucgccagcgucuacgccuggaaccgcaagcggaucuccaacugcguggcggacuacagcgugcuguacaacuccgccagcuucuccacguucaagugcuacggcgucagccccaccaagcucaacgaccugugcuucaccaacguguacgccgacuccuucgugauccgcggggacgagguccggcagaucgcccccggccagaccgggaagaucgccgacuacaacuacaagcugccggacgacuucacgggcugcgugaucgcguggaacagcaacaaccucgacuccaaggucgggggcaacuacaacuaccuguaccgccuguuccgcaagagcaaccucaagcccuucgagcgggacaucuccaccgagaucuaccaggccggcagcacccccugcaacgggguggagggcuucaacugcuacuucccccugcaguccuacggguuccagccgaccaacggcgugggguaccagcccuaccggguggucgugcugagcuucgagcuccugcacgcccccgccacggugugcggccccaagaaguccaccaaccuggucaagaacaagugcgugaacuucaacuucaacggccucaccgggaccggcgugcugaccgagagcaacaagaaguuccugccguuccagcaguucgggcgcgacaucgccgacacgaccgacgcgguccgcgacccccagacccuggagauccucgacaucacccccugcagcuucggcgggguguccgugaucacgccgggcaccaacaccagcaaccaggucgccgugcuguaccaggacgugaacugcaccgagguccccguggccauccacgccgaccagcugacgcccaccuggcggguguacuccaccggcagcaacgucuuccagacccgcgccgggugccucaucggcgcggagcacgugaacaacuccuacgagugcgacauccccaucggggccggcaucugcgccagcuaccagacgcagaccaacuccccgcggcgcgcccggagcguggcgucccagagcaucaucgccuacaccaugucccugggcgccgagaacagcgucgccuacuccaacaacagcaucgccauccccaccaacuucacgaucuccgugaccaccgagauccugcccgugagcaugaccaagacgagcgucgacugcaccauguacaucugcggggacuccaccgagugcagcaaccuccugcugcaguacggcuccuucugcacccagcucaaccgcgcgcugacggggaucgccguggagcaggacaagaacacccaggagguguucgcccaggucaagcagaucuacaagacgcccccgaucaaggacuucggcggguucaacuucagccagauccugcccgaccccuccaagcccagcaagcgguccuucaucgaggaccuccuguucaacaaggugacccuggccgacgccggcuucaucaagcaguacggcgacugccucggggacaucgcggcccgcgaccugaucugcgcccagaaguucaacggccugaccgugcucccgccccugcugaccgacgagaugaucgcccaguacaccagcgcccuccuggcggggaccaucacguccggcuggugguucggggccggcgccgcccugcagauccccuucgcgaugcagauggccuaccgguucaacggcaucggggucacccagaacgugcucuacgagaaccagaagcugaucgccaaccaguucaacagcgccaucggcaagauccaggacucccugagcuccaccgccagcgcgcucgggaagcugcaggacguggucaaccagaacgcccaggcccugaacacgcucgugaagcagcuguccagcaacuucggcgccaucuccagcgugcugaacgacauccucucccgccuggacccgcccgaggccgaggugcagaucgaccggcugaucaccgggcgccuccagagccugcagaccuacgugacccagcagcugauccgggcggccgagauccgcuggagcgccaaccucgccgcgaccaagauguccgagugcguccugggccagagcaagcggguggacuucugcggcaagggguaccaccugauguccuucccccagagcgccccgcacggcguggucuuccuccacgugacguacguccccgcccaggagaagaacuucaccaccgcccccgcgaucugccacgacgggaaggcccacuucccccgcgagggcguguucguguccaacgggacccacugguucgucacgcagcggaacuucuacgagccgcagaucaucaccaccgacaacaccuucgugagcggcaacugcgacguggucaucggcaucgugaacaacacgguguacgacccccugcagcccgagcuggacuccuucaaggaggagcucgacaaguacuucaagaaccacaccagccccgacgucgaccugggggacaucuccggcaucaacgccagcguggugaacauccagaaggagaucgaccgccugaacgaggucgccaagaaccucaacgagucccugaucgaccugcaggagcucgggaaguacgagcaguacaucaag

SEQ ID NO: 11820 - RNA, 3633 nt, Artificial Sequence
  SARS-CoV-2/Wuhan/WIV05/2019__EPI_ISL_402128 spike protein CDS gc (1-1211)(K986P_V987P_P1069F)
auguucguguuccugguccuccugccccuggugagcucccagugcgugaaccucaccacccgcacgcagcugccgcccgccuacaccaacagcuucacccggggcgucuacuaccccgacaagguguuccgcuccagcgugcugcacuccacccaggaccucuuccugcccuucuucagcaacgucacgugguuccacgccauccacguguccgggaccaacggcaccaagcgguucgacaacccggugcugcccuucaacgacggggucuacuucgcgagcaccgagaaguccaacaucauccgcggcuggaucuucgggacgacccucgacagcaagacccagucccugcugaucgugaacaacgccaccaacguggucaucaaggugugcgaguuccaguucugcaacgaccccuuccucggcguguacuaccacaagaacaacaagagcuggauggaguccgaguuccgggucuacagcuccgccaacaacugcacguucgaguacgugagccagcccuuccugauggaccuggagggcaagcaggggaacuucaagaaccuccgcgaguucguguucaagaacaucgacggcuacuucaagaucuacuccaagcacaccccgaucaaccugguccgggaccugccccagggguucagcgcccucgagccccugguggaccugcccaucggcaucaacaucacccgcuuccagacccuccuggcccugcaccgguccuaccucacgccgggggacagcagcuccggcuggaccgcgggcgccgccgccuacuacgugggguaccugcagccccgcaccuuccugcucaaguacaacgagaacggcaccaucacggacgcggucgacugcgcccuggacccccugagcgagaccaagugcacccucaaguccuucaccguggagaaggggaucuaccagacgagcaacuuccgggugcagcccaccgaguccaucguccgcuucccgaacaucaccaaccugugccccuucggcgagguguucaacgccacccgguucgccagcgucuacgccuggaaccgcaagcggaucuccaacugcguggcggacuacagcgugcuguacaacuccgccagcuucuccacguucaagugcuacggcgucagccccaccaagcucaacgaccugugcuucaccaacguguacgccgacuccuucgugauccgcggggacgagguccggcagaucgcccccggccagaccgggaagaucgccgacuacaacuacaagcugccggacgacuucacgggcugcgugaucgcguggaacagcaacaaccucgacuccaaggucgggggcaacuacaacuaccuguaccgccuguuccgcaagagcaaccucaagcccuucgagcgggacaucuccaccgagaucuaccaggccggcagcacccccugcaacgggguggagggcuucaacugcuacuucccccugcaguccuacggguuccagccgaccaacggcgugggguaccagcccuaccggguggucgugcugagcuucgagcuccugcacgcccccgccacggugugcggccccaagaaguccaccaaccuggucaagaacaagugcgugaacuucaacuucaacggccucaccgggaccggcgugcugaccgagagcaacaagaaguuccugccguuccagcaguucgggcgcgacaucgccgacacgaccgacgcgguccgcgacccccagacccuggagauccucgacaucacccccugcagcuucggcgggguguccgugaucacgccgggcaccaacaccagcaaccaggucgccgugcuguaccaggacgugaacugcaccgagguccccguggccauccacgccgaccagcugacgcccaccuggcggguguacuccaccggcagcaacgucuuccagacccgcgccgggugccucaucggcgcggagcacgugaacaacuccuacgagugcgacauccccaucggggccggcaucugcgccagcuaccagacgcagaccaacuccccgcggcgcgcccggagcguggcgucccagagcaucaucgccuacaccaugucccugggcgccgagaacagcgucgccuacuccaacaacagcaucgccauccccaccaacuucacgaucuccgugaccaccgagauccugcccgugagcaugaccaagacgagcgucgacugcaccauguacaucugcggggacuccaccgagugcagcaaccuccugcugcaguacggcuccuucugcacccagcucaaccgcgcgcugacggggaucgccguggagcaggacaagaacacccaggagguguucgcccaggucaagcagaucuacaagacgcccccgaucaaggacuucggcggguucaacuucagccagauccugcccgaccccuccaagcccagcaagcgguccuucaucgaggaccuccuguucaacaaggugacccuggccgacgccggcuucaucaagcaguacggcgacugccucggggacaucgcggcccgcgaccugaucugcgcccagaaguucaacggccugaccgugcucccgccccugcugaccgacgagaugaucgcccaguacaccagcgcccuccuggcggggaccaucacguccggcuggaccuucggggccggcgccgcccugcagauccccuucgcgaugcagauggccuaccgguucaacggcaucggggucacccagaacgugcucuacgagaaccagaagcugaucgccaaccaguucaacagcgccaucggcaagauccaggacucccugagcuccaccgccagcgcgcucgggaagcugcaggacguggucaaccagaacgcccaggcccugaacacgcucgugaagcagcuguccagcaacuucggcgccaucuccagcgugcugaacgacauccucucccgccuggacccgcccgaggccgaggugcagaucgaccggcugaucaccgggcgccuccagagccugcagaccuacgugacccagcagcugauccgggcggccgagauccgcgccagcgccaaccucgccgcgaccaagauguccgagugcguccugggccagagcaagcggguggacuucugcggcaagggguaccaccugauguccuucccccagagcgccccgcacggcguggucuuccuccacgugacguacgucuucgcccaggagaagaacuucaccaccgcccccgcgaucugccacgacgggaaggcccacuucccccgcgagggcguguucguguccaacgggacccacugguucgucacgcagcggaacuucuacgagccgcagaucaucaccaccgacaacaccuucgugagcggcaacugcgacguggucaucggcaucgugaacaacacgguguacgacccccugcagcccgagcuggacuccuucaaggaggagcucgacaaguacuucaagaaccacaccagccccgacgucgaccugggggacaucuccggcaucaacgccagcguggugaacauccagaaggagaucgaccgccugaacgaggucgccaagaaccucaacgagucccugaucgaccugcaggagcucgggaaguacgagcaguacaucaag

SEQ ID NO: 11821 - RNA, 3633 nt, Artificial Sequence
  SARS-CoV-2/Wuhan/WIV05/2019__EPI_ISL_402128 spike protein CDS gc (1-1211)(K986P_V987P_ H1048Q_H1064N_ H1083N_H1101N)
auguucguguuccugguccuccugccccuggugagcucccagugcgugaaccucaccacccgcacgcagcugccgcccgccuacaccaacagcuucacccggggcgucuacuaccccgacaagguguuccgcuccagcgugcugcacuccacccaggaccucuuccugcccuucuucagcaacgucacgugguuccacgccauccacguguccgggaccaacggcaccaagcgguucgacaacccggugcugcccuucaacgacggggucuacuucgcgagcaccgagaaguccaacaucauccgcggcuggaucuucgggacgacccucgacagcaagacccagucccugcugaucgugaacaacgccaccaacguggucaucaaggugugcgaguuccaguucugcaacgaccccuuccucggcguguacuaccacaagaacaacaagagcuggauggaguccgaguuccgggucuacagcuccgccaacaacugcacguucgaguacgugagccagcccuuccugauggaccuggagggcaagcaggggaacuucaagaaccuccgcgaguucguguucaagaacaucgacggcuacuucaagaucuacuccaagcacaccccgaucaaccugguccgggaccugccccagggguucagcgcccucgagccccugguggaccugcccaucggcaucaacaucacccgcuuccagacccuccuggcccugcaccgguccuaccucacgccgggggacagcagcuccggcuggaccgcgggcgccgccgccuacuacgugggguaccugcagccccgcaccuuccugcucaaguacaacgagaacggcaccaucacggacgcggucgacugcgcccuggacccccugagcgagaccaagugcacccucaaguccuucaccguggagaaggggaucuaccagacgagcaacuuccgggugcagcccaccgaguccaucguccgcuucccgaacaucaccaaccugugccccuucggcgagguguucaacgccacccgguucgccagcgucuacgccuggaaccgcaagcggaucuccaacugcguggcggacuacagcgugcuguacaacuccgccagcuucuccacguucaagugcuacggcgucagccccaccaagcucaacgaccugugcuucaccaacguguacgccgacuccuucgugauccgcggggacgagguccggcagaucgcccccggccagaccgggaagaucgccgacuacaacuacaagcugccggacgacuucacgggcugcgugaucgcguggaacagcaacaaccucgacuccaaggucgggggcaacuacaacuaccuguaccgccuguuccgcaagagcaaccucaagcccuucgagcgggacaucuccaccgagaucuaccaggccggcagcacccccugcaacgggguggagggcuucaacugcuacuucccccugcaguccuacggguuccagccgaccaacggcgugggguaccagcccuaccggguggucgugcugagcuucgagcuccugcacgcccccgccacggugugcggccccaagaaguccaccaaccuggucaagaacaagugcgugaacuucaacuucaacggccucaccgggaccggcgugcugaccgagagcaacaagaaguuccugccguuccagcaguucgggcgcgacaucgccgacacgaccgacgcgguccgcgacccccagacccuggagauccucgacaucacccccugcagcuucggcgggguguccgugaucacgccgggcaccaacaccagcaaccaggucgccgugcuguaccaggacgugaacugcaccgagguccccguggccauccacgccgaccagcugacgcccaccuggcggguguacuccaccggcagcaacgucuuccagacccgcgccgggugccucaucggcgcggagcacgugaacaacuccuacgagugcgacauccccaucggggccggcaucugcgccagcuaccagacgcagaccaacuccccgcggcgcgcccggagcguggcgucccagagcaucaucgccuacaccaugucccugggcgccgagaacagcgucgccuacuccaacaacagcaucgccauccccaccaacuucacgaucuccgugaccaccgagauccugcccgugagcaugaccaagacgagcgucgacugcaccauguacaucugcggggacuccaccgagugcagcaaccuccugcugcaguacggcuccuucugcacccagcucaaccgcgcgcugacggggaucgccguggagcaggacaagaacacccaggagguguucgcccaggucaagcagaucuacaagacgcccccgaucaaggacuucggcggguucaacuucagccagauccugcccgaccccuccaagcccagcaagcgguccuucaucgaggaccuccuguucaacaaggugacccuggccgacgccggcuucaucaagcaguacggcgacugccucggggacaucgcggcccgcgaccugaucugcgcccagaaguucaacggccugaccgugcucccgccccugcugaccgacgagaugaucgcccaguacaccagcgcccuccuggcggggaccaucacguccggcuggaccuucggggccggcgccgcccugcagauccccuucgcgaugcagauggccuaccgguucaacggcaucggggucacccagaacgugcucuacgagaaccagaagcugaucgccaaccaguucaacagcgccaucggcaagauccaggacucccugagcuccaccgccagcgcgcucgggaagcugcaggacguggucaaccagaacgcccaggcccugaacacgcucgugaagcagcuguccagcaacuucggcgccaucuccagcgugcugaacgacauccucucccgccuggacccgcccgaggccgaggugcagaucgaccggcugaucaccgggcgccuccagagccugcagaccuacgugacccagcagcugauccgggcggccgagauccgcgccagcgccaaccucgccgcgaccaagauguccgagugcguccugggccagagcaagcggguggacuucugcggcaagggguaccagcugauguccuucccccagagcgccccgcacggcguggucuuccucaacgugacguacguccccgcccaggagaagaacuucaccaccgcccccgcgaucugcaacgacgggaaggcccacuucccccgcgagggcguguucguguccaacgggaccaacugguucgucacgcagcggaacuucuacgagccgcagaucaucaccaccgacaacaccuucgugagcggcaacugcgacguggucaucggcaucgugaacaacacgguguacgacccccugcagcccgagcuggacuccuucaaggaggagcucgacaaguacuucaagaaccacaccagccccgacgucgaccugggggacaucuccggcaucaacgccagcguggugaacauccagaaggagaucgaccgccugaacgaggucgccaagaaccucaacgagucccugaucgaccugcaggagcucgggaaguacgagcaguacaucaag

SEQ ID NO: 11822 - RNA, 3633 nt, Artificial Sequence
  SARS-CoV-2/Wuhan/WIV05/2019__EPI_ISL_402128 spike protein CDS gc (1-1211)(I712C_T1077C)
auguucguguuccugguccuccugccccuggugagcucccagugcgugaaccucaccacccgcacgcagcugccgcccgccuacaccaacagcuucacccggggcgucuacuaccccgacaagguguuccgcuccagcgugcugcacuccacccaggaccucuuccugcccuucuucagcaacgucacgugguuccacgccauccacguguccgggaccaacggcaccaagcgguucgacaacccggugcugcccuucaacgacggggucuacuucgcgagcaccgagaaguccaacaucauccgcggcuggaucuucgggacgacccucgacagcaagacccagucccugcugaucgugaacaacgccaccaacguggucaucaaggugugcgaguuccaguucugcaacgaccccuuccucggcguguacuaccacaagaacaacaagagcuggauggaguccgaguuccgggucuacagcuccgccaacaacugcacguucgaguacgugagccagcccuuccugauggaccuggagggcaagcaggggaacuucaagaaccuccgcgaguucguguucaagaacaucgacggcuacuucaagaucuacuccaagcacaccccgaucaaccugguccgggaccugccccagggguucagcgcccucgagccccugguggaccugcccaucggcaucaacaucacccgcuuccagacccuccuggcccugcaccgguccuaccucacgccgggggacagcagcuccggcuggaccgcgggcgccgccgccuacuacgugggguaccugcagccccgcaccuuccugcucaaguacaacgagaacggcaccaucacggacgcggucgacugcgcccuggacccccugagcgagaccaagugcacccucaaguccuucaccguggagaaggggaucuaccagacgagcaacuuccgggugcagcccaccgaguccaucguccgcuucccgaacaucaccaaccugugccccuucggcgagguguucaacgccacccgguucgccagcgucuacgccuggaaccgcaagcggaucuccaacugcguggcggacuacagcgugcuguacaacuccgccagcuucuccacguucaagugcuacggcgucagccccaccaagcucaacgaccugugcuucaccaacguguacgccgacuccuucgugauccgcggggacgagguccggcagaucgcccccggccagaccgggaagaucgccgacuacaacuacaagcugccggacgacuucacgggcugcgugaucgcguggaacagcaacaaccucgacuccaaggucgggggcaacuacaacuaccuguaccgccuguuccgcaagagcaaccucaagcccuucgagcgggacaucuccaccgagaucuaccaggccggcagcacccccugcaacgggguggagggcuucaacugcuacuucccccugcaguccuacggguuccagccgaccaacggcgugggguaccagcccuaccggguggucgugcugagcuucgagcuccugcacgcccccgccacggugugcggccccaagaaguccaccaaccuggucaagaacaagugcgugaacuucaacuucaacggccucaccgggaccggcgugcugaccgagagcaacaagaaguuccugccguuccagcaguucgggcgcgacaucgccgacacgaccgacgcgguccgcgacccccagacccuggagauccucgacaucacccccugcagcuucggcgggguguccgugaucacgccgggcaccaacaccagcaaccaggucgccgugcuguaccaggacgugaacugcaccgagguccccguggccauccacgccgaccagcugacgcccaccuggcggguguacuccaccggcagcaacgucuuccagacccgcgccgggugccucaucggcgcggagcacgugaacaacuccuacgagugcgacauccccaucggggccggcaucugcgccagcuaccagacgcagaccaacuccccgcggcgcgcccggagcguggcgucccagagcaucaucgccuacaccaugucccugggcgccgagaacagcgucgccuacuccaacaacagcugcgccauccccaccaacuucacgaucuccgugaccaccgagauccugcccgugagcaugaccaagacgagcgucgacugcaccauguacaucugcggggacuccaccgagugcagcaaccuccugcugcaguacggcuccuucugcacccagcucaaccgcgcgcugacggggaucgccguggagcaggacaagaacacccaggagguguucgcccaggucaagcagaucuacaagacgcccccgaucaaggacuucggcggguucaacuucagccagauccugcccgaccccuccaagcccagcaagcgguccuucaucgaggaccuccuguucaacaaggugacccuggccgacgccggcuucaucaagcaguacggcgacugccucggggacaucgcggcccgcgaccugaucugcgcccagaaguucaacggccugaccgugcucccgccccugcugaccgacgagaugaucgcccaguacaccagcgcccuccuggcggggaccaucacguccggcuggaccuucggggccggcgccgcccugcagauccccuucgcgaugcagauggccuaccgguucaacggcaucggggucacccagaacgugcucuacgagaaccagaagcugaucgccaaccaguucaacagcgccaucggcaagauccaggacucccugagcuccaccgccagcgcgcucgggaagcugcaggacguggucaaccagaacgcccaggcccugaacacgcucgugaagcagcuguccagcaacuucggcgccaucuccagcgugcugaacgacauccucucccgccuggacaaggucgaggccgaggugcagaucgaccggcugaucaccgggcgccuccagagccugcagaccuacgugacccagcagcugauccgggcggccgagauccgcgccagcgccaaccucgccgcgaccaagauguccgagugcguccugggccagagcaagcggguggacuucugcggcaagggguaccaccugauguccuucccccagagcgccccgcacggcguggucuuccuccacgugacguacguccccgcccaggagaagaacuucaccugcgcccccgcgaucugccacgacgggaaggcccacuucccccgcgagggcguguucguguccaacgggacccacugguucgucacgcagcggaacuucuacgagccgcagaucaucaccaccgacaacaccuucgugagcggcaacugcgacguggucaucggcaucgugaacaacacgguguacgacccccugcagcccgagcuggacuccuucaaggaggagcucgacaaguacuucaagaaccacaccagccccgacgucgaccugggggacaucuccggcaucaacgccagcguggugaacauccagaaggagaucgaccgccugaacgaggucgccaagaaccucaacgagucccugaucgaccugcaggagcucgggaaguacgagcaguacaucaag

SEQ ID NO: 11823 - RNA, 3633 nt, Artificial Sequence
  SARS-CoV-2/Wuhan/WIV05/2019__EPI_ISL_402128 spike protein CDS gc (1-1211)(I714C_Y1110C)
auguucguguuccugguccuccugccccuggugagcucccagugcgugaaccucaccacccgcacgcagcugccgcccgccuacaccaacagcuucacccggggcgucuacuaccccgacaagguguuccgcuccagcgugcugcacuccacccaggaccucuuccugcccuucuucagcaacgucacgugguuccacgccauccacguguccgggaccaacggcaccaagcgguucgacaacccggugcugcccuucaacgacggggucuacuucgcgagcaccgagaaguccaacaucauccgcggcuggaucuucgggacgacccucgacagcaagacccagucccugcugaucgugaacaacgccaccaacguggucaucaaggugugcgaguuccaguucugcaacgaccccuuccucggcguguacuaccacaagaacaacaagagcuggauggaguccgaguuccgggucuacagcuccgccaacaacugcacguucgaguacgugagccagcccuuccugauggaccuggagggcaagcaggggaacuucaagaaccuccgcgaguucguguucaagaacaucgacggcuacuucaagaucuacuccaagcacaccccgaucaaccugguccgggaccugccccagggguucagcgcccucgagccccugguggaccugcccaucggcaucaacaucacccgcuuccagacccuccuggcccugcaccgguccuaccucacgccgggggacagcagcuccggcuggaccgcgggcgccgccgccuacuacgugggguaccugcagccccgcaccuuccugcucaaguacaacgagaacggcaccaucacggacgcggucgacugcgcccuggacccccugagcgagaccaagugcacccucaaguccuucaccguggagaaggggaucuaccagacgagcaacuuccgggugcagcccaccgaguccaucguccgcuucccgaacaucaccaaccugugccccuucggcgagguguucaacgccacccgguucgccagcgucuacgccuggaaccgcaagcggaucuccaacugcguggcggacuacagcgugcuguacaacuccgccagcuucuccacguucaagugcuacggcgucagccccaccaagcucaacgaccugugcuucaccaacguguacgccgacuccuucgugauccgcggggacgagguccggcagaucgcccccggccagaccgggaagaucgccgacuacaacuacaagcugccggacgacuucacgggcugcgugaucgcguggaacagcaacaaccucgacuccaaggucgggggcaacuacaacuaccuguaccgccuguuccgcaagagcaaccucaagcccuucgagcgggacaucuccaccgagaucuaccaggccggcagcacccccugcaacgggguggagggcuucaacugcuacuucccccugcaguccuacggguuccagccgaccaacggcgugggguaccagcccuaccggguggucgugcugagcuucgagcuccugcacgcccccgccacggugugcggccccaagaaguccaccaaccuggucaagaacaagugcgugaacuucaacuucaacggccucaccgggaccggcgugcugaccgagagcaacaagaaguuccugccguuccagcaguucgggcgcgacaucgccgacacgaccgacgcgguccgcgacccccagacccuggagauccucgacaucacccccugcagcuucggcgggguguccgugaucacgccgggcaccaacaccagcaaccaggucgccgugcuguaccaggacgugaacugcaccgagguccccguggccauccacgccgaccagcugacgcccaccuggcggguguacuccaccggcagcaacgucuuccagacccgcgccgggugccucaucggcgcggagcacgugaacaacuccuacgagugcgacauccccaucggggccggcaucugcgccagcuaccagacgcagaccaacuccccgcggcgcgcccggagcguggcgucccagagcaucaucgccuacaccaugucccugggcgccgagaacagcgucgccuacuccaacaacagcaucgccugccccaccaacuucacgaucuccgugaccaccgagauccugcccgugagcaugaccaagacgagcgucgacugcaccauguacaucugcggggacuccaccgagugcagcaaccuccugcugcaguacggcuccuucugcacccagcucaaccgcgcgcugacggggaucgccguggagcaggacaagaacacccaggagguguucgcccaggucaagcagaucuacaagacgcccccgaucaaggacuucggcggguucaacuucagccagauccugcccgaccccuccaagcccagcaagcgguccuucaucgaggaccuccuguucaacaaggugacccuggccgacgccggcuucaucaagcaguacggcgacugccucggggacaucgcggcccgcgaccugaucugcgcccagaaguucaacggccugaccgugcucccgccccugcugaccgacgagaugaucgcccaguacaccagcgcccuccuggcggggaccaucacguccggcuggaccuucggggccggcgccgcccugcagauccccuucgcgaugcagauggccuaccgguucaacggcaucggggucacccagaacgugcucuacgagaaccagaagcugaucgccaaccaguucaacagcgccaucggcaagauccaggacucccugagcuccaccgccagcgcgcucgggaagcugcaggacguggucaaccagaacgcccaggcccugaacacgcucgugaagcagcuguccagcaacuucggcgccaucuccagcgugcugaacgacauccucucccgccuggacaaggucgaggccgaggugcagaucgaccggcugaucaccgggcgccuccagagccugcagaccuacgugacccagcagcugauccgggcggccgagauccgcgccagcgccaaccucgccgcgaccaagauguccgagugcguccugggccagagcaagcggguggacuucugcggcaagggguaccaccugauguccuucccccagagcgccccgcacggcguggucuuccuccacgugacguacguccccgcccaggagaagaacuucaccaccgcccccgcgaucugccacgacgggaaggcccacuucccccgcgagggcguguucguguccaacgggacccacugguucgucacgcagcggaacuucugcgagccgcagaucaucaccaccgacaacaccuucgugagcggcaacugcgacguggucaucggcaucgugaacaacacgguguacgacccccugcagcccgagcuggacuccuucaaggaggagcucgacaaguacuucaagaaccacaccagccccgacgucgaccugggggacaucuccggcaucaacgccagcguggugaacauccagaaggagaucgaccgccugaacgaggucgccaagaaccucaacgagucccugaucgaccugcaggagcucgggaaguacgagcaguacaucaag

SEQ ID NO: 11824 - RNA, 3633 nt, Artificial Sequence
  SARS-CoV-2/Wuhan/WIV05/2019__EPI_ISL_402128 spike protein CDS gc (1-1211)(P715C_P1069C)
auguucguguuccugguccuccugccccuggugagcucccagugcgugaaccucaccacccgcacgcagcugccgcccgccuacaccaacagcuucacccggggcgucuacuaccccgacaagguguuccgcuccagcgugcugcacuccacccaggaccucuuccugcccuucuucagcaacgucacgugguuccacgccauccacguguccgggaccaacggcaccaagcgguucgacaacccggugcugcccuucaacgacggggucuacuucgcgagcaccgagaaguccaacaucauccgcggcuggaucuucgggacgacccucgacagcaagacccagucccugcugaucgugaacaacgccaccaacguggucaucaaggugugcgaguuccaguucugcaacgaccccuuccucggcguguacuaccacaagaacaacaagagcuggauggaguccgaguuccgggucuacagcuccgccaacaacugcacguucgaguacgugagccagcccuuccugauggaccuggagggcaagcaggggaacuucaagaaccuccgcgaguucguguucaagaacaucgacggcuacuucaagaucuacuccaagcacaccccgaucaaccugguccgggaccugccccagggguucagcgcccucgagccccugguggaccugcccaucggcaucaacaucacccgcuuccagacccuccuggcccugcaccgguccuaccucacgccgggggacagcagcuccggcuggaccgcgggcgccgccgccuacuacgugggguaccugcagccccgcaccuuccugcucaaguacaacgagaacggcaccaucacggacgcggucgacugcgcccuggacccccugagcgagaccaagugcacccucaaguccuucaccguggagaaggggaucuaccagacgagcaacuuccgggugcagcccaccgaguccaucguccgcuucccgaacaucaccaaccugugccccuucggcgagguguucaacgccacccgguucgccagcgucuacgccuggaaccgcaagcggaucuccaacugcguggcggacuacagcgugcuguacaacuccgccagcuucuccacguucaagugcuacggcgucagccccaccaagcucaacgaccugugcuucaccaacguguacgccgacuccuucgugauccgcggggacgagguccggcagaucgcccccggccagaccgggaagaucgccgacuacaacuacaagcugccggacgacuucacgggcugcgugaucgcguggaacagcaacaaccucgacuccaaggucgggggcaacuacaacuaccuguaccgccuguuccgcaagagcaaccucaagcccuucgagcgggacaucuccaccgagaucuaccaggccggcagcacccccugcaacgggguggagggcuucaacugcuacuucccccugcaguccuacggguuccagccgaccaacggcgugggguaccagcccuaccggguggucgugcugagcuucgagcuccugcacgcccccgccacggugugcggccccaagaaguccaccaaccuggucaagaacaagugcgugaacuucaacuucaacggccucaccgggaccggcgugcugaccgagagcaacaagaaguuccugccguuccagcaguucgggcgcgacaucgccgacacgaccgacgcgguccgcgacccccagacccuggagauccucgacaucacccccugcagcuucggcgggguguccgugaucacgccgggcaccaacaccagcaaccaggucgccgugcuguaccaggacgugaacugcaccgagguccccguggccauccacgccgaccagcugacgcccaccuggcggguguacuccaccggcagcaacgucuuccagacccgcgccgggugccucaucggcgcggagcacgugaacaacuccuacgagugcgacauccccaucggggccggcaucugcgccagcuaccagacgcagaccaacuccccgcggcgcgcccggagcguggcgucccagagcaucaucgccuacaccaugucccugggcgccgagaacagcgucgccuacuccaacaacagcaucgccaucugcaccaacuucacgaucuccgugaccaccgagauccugcccgugagcaugaccaagacgagcgucgacugcaccauguacaucugcggggacuccaccgagugcagcaaccuccugcugcaguacggcuccuucugcacccagcucaaccgcgcgcugacggggaucgccguggagcaggacaagaacacccaggagguguucgcccaggucaagcagaucuacaagacgcccccgaucaaggacuucggcggguucaacuucagccagauccugcccgaccccuccaagcccagcaagcgguccuucaucgaggaccuccuguucaacaaggugacccuggccgacgccggcuucaucaagcaguacggcgacugccucggggacaucgcggcccgcgaccugaucugcgcccagaaguucaacggccugaccgugcucccgccccugcugaccgacgagaugaucgcccaguacaccagcgcccuccuggcggggaccaucacguccggcuggaccuucggggccggcgccgcccugcagauccccuucgcgaugcagauggccuaccgguucaacggcaucggggucacccagaacgugcucuacgagaaccagaagcugaucgccaaccaguucaacagcgccaucggcaagauccaggacucccugagcuccaccgccagcgcgcucgggaagcugcaggacguggucaaccagaacgcccaggcccugaacacgcucgugaagcagcuguccagcaacuucggcgccaucuccagcgugcugaacgacauccucucccgccuggacaaggucgaggccgaggugcagaucgaccggcugaucaccgggcgccuccagagccugcagaccuacgugacccagcagcugauccgggcggccgagauccgcgccagcgccaaccucgccgcgaccaagauguccgagugcguccugggccagagcaagcggguggacuucugcggcaagggguaccaccugauguccuucccccagagcgccccgcacggcguggucuuccuccacgugacguacgucugcgcccaggagaagaacuucaccaccgcccccgcgaucugccacgacgggaaggcccacuucccccgcgagggcguguucguguccaacgggacccacugguucgucacgcagcggaacuucuacgagccgcagaucaucaccaccgacaacaccuucgugagcggcaacugcgacguggucaucggcaucgugaacaacacgguguacgacccccugcagcccgagcuggacuccuucaaggaggagcucgacaaguacuucaagaaccacaccagccccgacgucgaccugggggacaucuccggcaucaacgccagcguggugaacauccagaaggagaucgaccgccugaacgaggucgccaagaaccucaacgagucccugaucgaccugcaggagcucgggaaguacgagcaguacaucaag

SEQ ID NO: 11825 - RNA, 3633 nt, Artificial Sequence
  SARS-CoV-2/Wuhan/WIV05/2019__EPI_ISL_402128 spike protein CDS gc (1-1211)(G889C_L1034C)
auguucguguuccugguccuccugccccuggugagcucccagugcgugaaccucaccacccgcacgcagcugccgcccgccuacaccaacagcuucacccggggcgucuacuaccccgacaagguguuccgcuccagcgugcugcacuccacccaggaccucuuccugcccuucuucagcaacgucacgugguuccacgccauccacguguccgggaccaacggcaccaagcgguucgacaacccggugcugcccuucaacgacggggucuacuucgcgagcaccgagaaguccaacaucauccgcggcuggaucuucgggacgacccucgacagcaagacccagucccugcugaucgugaacaacgccaccaacguggucaucaaggugugcgaguuccaguucugcaacgaccccuuccucggcguguacuaccacaagaacaacaagagcuggauggaguccgaguuccgggucuacagcuccgccaacaacugcacguucgaguacgugagccagcccuuccugauggaccuggagggcaagcaggggaacuucaagaaccuccgcgaguucguguucaagaacaucgacggcuacuucaagaucuacuccaagcacaccccgaucaaccugguccgggaccugccccagggguucagcgcccucgagccccugguggaccugcccaucggcaucaacaucacccgcuuccagacccuccuggcccugcaccgguccuaccucacgccgggggacagcagcuccggcuggaccgcgggcgccgccgccuacuacgugggguaccugcagccccgcaccuuccugcucaaguacaacgagaacggcaccaucacggacgcggucgacugcgcccuggacccccugagcgagaccaagugcacccucaaguccuucaccguggagaaggggaucuaccagacgagcaacuuccgggugcagcccaccgaguccaucguccgcuucccgaacaucaccaaccugugccccuucggcgagguguucaacgccacccgguucgccagcgucuacgccuggaaccgcaagcggaucuccaacugcguggcggacuacagcgugcuguacaacuccgccagcuucuccacguucaagugcuacggcgucagccccaccaagcucaacgaccugugcuucaccaacguguacgccgacuccuucgugauccgcggggacgagguccggcagaucgcccccggccagaccgggaagaucgccgacuacaacuacaagcugccggacgacuucacgggcugcgugaucgcguggaacagcaacaaccucgacuccaaggucgggggcaacuacaacuaccuguaccgccuguuccgcaagagcaaccucaagcccuucgagcgggacaucuccaccgagaucuaccaggccggcagcacccccugcaacgggguggagggcuucaacugcuacuucccccugcaguccuacggguuccagccgaccaacggcgugggguaccagcccuaccggguggucgugcugagcuucgagcuccugcacgcccccgccacggugugcggccccaagaaguccaccaaccuggucaagaacaagugcgugaacuucaacuucaacggccucaccgggaccggcgugcugaccgagagcaacaagaaguuccugccguuccagcaguucgggcgcgacaucgccgacacgaccgacgcgguccgcgacccccagacccuggagauccucgacaucacccccugcagcuucggcgggguguccgugaucacgccgggcaccaacaccagcaaccaggucgccgugcuguaccaggacgugaacugcaccgagguccccguggccauccacgccgaccagcugacgcccaccuggcggguguacuccaccggcagcaacgucuuccagacccgcgccgggugccucaucggcgcggagcacgugaacaacuccuacgagugcgacauccccaucggggccggcaucugcgccagcuaccagacgcagaccaacuccccgcggcgcgcccggagcguggcgucccagagcaucaucgccuacaccaugucccugggcgccgagaacagcgucgccuacuccaacaacagcaucgccauccccaccaacuucacgaucuccgugaccaccgagauccugcccgugagcaugaccaagacgagcgucgacugcaccauguacaucugcggggacuccaccgagugcagcaaccuccugcugcaguacggcuccuucugcacccagcucaaccgcgcgcugacggggaucgccguggagcaggacaagaacacccaggagguguucgcccaggucaagcagaucuacaagacgcccccgaucaaggacuucggcggguucaacuucagccagauccugcccgaccccuccaagcccagcaagcgguccuucaucgaggaccuccuguucaacaaggugacccuggccgacgccggcuucaucaagcaguacggcgacugccucggggacaucgcggcccgcgaccugaucugcgcccagaaguucaacggccugaccgugcucccgccccugcugaccgacgagaugaucgcccaguacaccagcgcccuccuggcggggaccaucacguccggcuggaccuucugcgccggcgccgcccugcagauccccuucgcgaugcagauggccuaccgguucaacggcaucggggucacccagaacgugcucuacgagaaccagaagcugaucgccaaccaguucaacagcgccaucggcaagauccaggacucccugagcuccaccgccagcgcgcucgggaagcugcaggacguggucaaccagaacgcccaggcccugaacacgcucgugaagcagcuguccagcaacuucggcgccaucuccagcgugcugaacgacauccucucccgccuggacaaggucgaggccgaggugcagaucgaccggcugaucaccgggcgccuccagagccugcagaccuacgugacccagcagcugauccgggcggccgagauccgcgccagcgccaaccucgccgcgaccaagauguccgagugcgucugcggccagagcaagcggguggacuucugcggcaagggguaccaccugauguccuucccccagagcgccccgcacggcguggucuuccuccacgugacguacguccccgcccaggagaagaacuucaccaccgcccccgcgaucugccacgacgggaaggcccacuucccccgcgagggcguguucguguccaacgggacccacugguucgucacgcagcggaacuucuacgagccgcagaucaucaccaccgacaacaccuucgugagcggcaacugcgacguggucaucggcaucgugaacaacacgguguacgacccccugcagcccgagcuggacuccuucaaggaggagcucgacaaguacuucaagaaccacaccagccccgacgucgaccugggggacaucuccggcaucaacgccagcguggugaacauccagaaggagaucgaccgccugaacgaggucgccaagaaccucaacgagucccugaucgaccugcaggagcucgggaaguacgagcaguacaucaag

SEQ ID NO: 11826 - RNA, 3633 nt, Artificial Sequence
  SARS-CoV-2/Wuhan/WIV05/2019__EPI_ISL_402128 spike protein CDS gc (1-1211)(I909C_Y1047C)
auguucguguuccugguccuccugccccuggugagcucccagugcgugaaccucaccacccgcacgcagcugccgcccgccuacaccaacagcuucacccggggcgucuacuaccccgacaagguguuccgcuccagcgugcugcacuccacccaggaccucuuccugcccuucuucagcaacgucacgugguuccacgccauccacguguccgggaccaacggcaccaagcgguucgacaacccggugcugcccuucaacgacggggucuacuucgcgagcaccgagaaguccaacaucauccgcggcuggaucuucgggacgacccucgacagcaagacccagucccugcugaucgugaacaacgccaccaacguggucaucaaggugugcgaguuccaguucugcaacgaccccuuccucggcguguacuaccacaagaacaacaagagcuggauggaguccgaguuccgggucuacagcuccgccaacaacugcacguucgaguacgugagccagcccuuccugauggaccuggagggcaagcaggggaacuucaagaaccuccgcgaguucguguucaagaacaucgacggcuacuucaagaucuacuccaagcacaccccgaucaaccugguccgggaccugccccagggguucagcgcccucgagccccugguggaccugcccaucggcaucaacaucacccgcuuccagacccuccuggcccugcaccgguccuaccucacgccgggggacagcagcuccggcuggaccgcgggcgccgccgccuacuacgugggguaccugcagccccgcaccuuccugcucaaguacaacgagaacggcaccaucacggacgcggucgacugcgcccuggacccccugagcgagaccaagugcacccucaaguccuucaccguggagaaggggaucuaccagacgagcaacuuccgggugcagcccaccgaguccaucguccgcuucccgaacaucaccaaccugugccccuucggcgagguguucaacgccacccgguucgccagcgucuacgccuggaaccgcaagcggaucuccaacugcguggcggacuacagcgugcuguacaacuccgccagcuucuccacguucaagugcuacggcgucagccccaccaagcucaacgaccugugcuucaccaacguguacgccgacuccuucgugauccgcggggacgagguccggcagaucgcccccggccagaccgggaagaucgccgacuacaacuacaagcugccggacgacuucacgggcugcgugaucgcguggaacagcaacaaccucgacuccaaggucgggggcaacuacaacuaccuguaccgccuguuccgcaagagcaaccucaagcccuucgagcgggacaucuccaccgagaucuaccaggccggcagcacccccugcaacgggguggagggcuucaacugcuacuucccccugcaguccuacggguuccagccgaccaacggcgugggguaccagcccuaccggguggucgugcugagcuucgagcuccugcacgcccccgccacggugugcggccccaagaaguccaccaaccuggucaagaacaagugcgugaacuucaacuucaacggccucaccgggaccggcgugcugaccgagagcaacaagaaguuccugccguuccagcaguucgggcgcgacaucgccgacacgaccgacgcgguccgcgacccccagacccuggagauccucgacaucacccccugcagcuucggcgggguguccgugaucacgccgggcaccaacaccagcaaccaggucgccgugcuguaccaggacgugaacugcaccgagguccccguggccauccacgccgaccagcugacgcccaccuggcggguguacuccaccggcagcaacgucuuccagacccgcgccgggugccucaucggcgcggagcacgugaacaacuccuacgagugcgacauccccaucggggccggcaucugcgccagcuaccagacgcagaccaacuccccgcggcgcgcccggagcguggcgucccagagcaucaucgccuacaccaugucccugggcgccgagaacagcgucgccuacuccaacaacagcaucgccauccccaccaacuucacgaucuccgugaccaccgagauccugcccgugagcaugaccaagacgagcgucgacugcaccauguacaucugcggggacuccaccgagugcagcaaccuccugcugcaguacggcuccuucugcacccagcucaaccgcgcgcugacggggaucgccguggagcaggacaagaacacccaggagguguucgcccaggucaagcagaucuacaagacgcccccgaucaaggacuucggcggguucaacuucagccagauccugcccgaccccuccaagcccagcaagcgguccuucaucgaggaccuccuguucaacaaggugacccuggccgacgccggcuucaucaagcaguacggcgacugccucggggacaucgcggcccgcgaccugaucugcgcccagaaguucaacggccugaccgugcucccgccccugcugaccgacgagaugaucgcccaguacaccagcgcccuccuggcggggaccaucacguccggcuggaccuucggggccggcgccgcccugcagauccccuucgcgaugcagauggccuaccgguucaacggcugcggggucacccagaacgugcucuacgagaaccagaagcugaucgccaaccaguucaacagcgccaucggcaagauccaggacucccugagcuccaccgccagcgcgcucgggaagcugcaggacguggucaaccagaacgcccaggcccugaacacgcucgugaagcagcuguccagcaacuucggcgccaucuccagcgugcugaacgacauccucucccgccuggacaaggucgaggccgaggugcagaucgaccggcugaucaccgggcgccuccagagccugcagaccuacgugacccagcagcugauccgggcggccgagauccgcgccagcgccaaccucgccgcgaccaagauguccgagugcguccugggccagagcaagcggguggacuucugcggcaaggggugccaccugauguccuucccccagagcgccccgcacggcguggucuuccuccacgugacguacguccccgcccaggagaagaacuucaccaccgcccccgcgaucugccacgacgggaaggcccacuucccccgcgagggcguguucguguccaacgggacccacugguucgucacgcagcggaacuucuacgagccgcagaucaucaccaccgacaacaccuucgugagcggcaacugcgacguggucaucggcaucgugaacaacacgguguacgacccccugcagcccgagcuggacuccuucaaggaggagcucgacaaguacuucaagaaccacaccagccccgacgucgaccugggggacaucuccggcaucaacgccagcguggugaacauccagaaggagaucgaccgccugaacgaggucgccaagaaccucaacgagucccugaucgaccugcaggagcucgggaaguacgagcaguacaucaag

SEQ ID NO: 11827 - RNA, 3633 nt, Artificial Sequence
  SARS-CoV-2/Wuhan/WIV05/2019__EPI_ISL_402128 spike protein CDS gc (1-1211)(Q965C_S1003C)
auguucguguuccugguccuccugccccuggugagcucccagugcgugaaccucaccacccgcacgcagcugccgcccgccuacaccaacagcuucacccggggcgucuacuaccccgacaagguguuccgcuccagcgugcugcacuccacccaggaccucuuccugcccuucuucagcaacgucacgugguuccacgccauccacguguccgggaccaacggcaccaagcgguucgacaacccggugcugcccuucaacgacggggucuacuucgcgagcaccgagaaguccaacaucauccgcggcuggaucuucgggacgacccucgacagcaagacccagucccugcugaucgugaacaacgccaccaacguggucaucaaggugugcgaguuccaguucugcaacgaccccuuccucggcguguacuaccacaagaacaacaagagcuggauggaguccgaguuccgggucuacagcuccgccaacaacugcacguucgaguacgugagccagcccuuccugauggaccuggagggcaagcaggggaacuucaagaaccuccgcgaguucguguucaagaacaucgacggcuacuucaagaucuacuccaagcacaccccgaucaaccugguccgggaccugccccagggguucagcgcccucgagccccugguggaccugcccaucggcaucaacaucacccgcuuccagacccuccuggcccugcaccgguccuaccucacgccgggggacagcagcuccggcuggaccgcgggcgccgccgccuacuacgugggguaccugcagccccgcaccuuccugcucaaguacaacgagaacggcaccaucacggacgcggucgacugcgcccuggacccccugagcgagaccaagugcacccucaaguccuucaccguggagaaggggaucuaccagacgagcaacuuccgggugcagcccaccgaguccaucguccgcuucccgaacaucaccaaccugugccccuucggcgagguguucaacgccacccgguucgccagcgucuacgccuggaaccgcaagcggaucuccaacugcguggcggacuacagcgugcuguacaacuccgccagcuucuccacguucaagugcuacggcgucagccccaccaagcucaacgaccugugcuucaccaacguguacgccgacuccuucgugauccgcggggacgagguccggcagaucgcccccggccagaccgggaagaucgccgacuacaacuacaagcugccggacgacuucacgggcugcgugaucgcguggaacagcaacaaccucgacuccaaggucgggggcaacuacaacuaccuguaccgccuguuccgcaagagcaaccucaagcccuucgagcgggacaucuccaccgagaucuaccaggccggcagcacccccugcaacgggguggagggcuucaacugcuacuucccccugcaguccuacggguuccagccgaccaacggcgugggguaccagcccuaccggguggucgugcugagcuucgagcuccugcacgcccccgccacggugugcggccccaagaaguccaccaaccuggucaagaacaagugcgugaacuucaacuucaacggccucaccgggaccggcgugcugaccgagagcaacaagaaguuccugccguuccagcaguucgggcgcgacaucgccgacacgaccgacgcgguccgcgacccccagacccuggagauccucgacaucacccccugcagcuucggcgggguguccgugaucacgccgggcaccaacaccagcaaccaggucgccgugcuguaccaggacgugaacugcaccgagguccccguggccauccacgccgaccagcugacgcccaccuggcggguguacuccaccggcagcaacgucuuccagacccgcgccgggugccucaucggcgcggagcacgugaacaacuccuacgagugcgacauccccaucggggccggcaucugcgccagcuaccagacgcagaccaacuccccgcggcgcgcccggagcguggcgucccagagcaucaucgccuacaccaugucccugggcgccgagaacagcgucgccuacuccaacaacagcaucgccauccccaccaacuucacgaucuccgugaccaccgagauccugcccgugagcaugaccaagacgagcgucgacugcaccauguacaucugcggggacuccaccgagugcagcaaccuccugcugcaguacggcuccuucugcacccagcucaaccgcgcgcugacggggaucgccguggagcaggacaagaacacccaggagguguucgcccaggucaagcagaucuacaagacgcccccgaucaaggacuucggcggguucaacuucagccagauccugcccgaccccuccaagcccagcaagcgguccuucaucgaggaccuccuguucaacaaggugacccuggccgacgccggcuucaucaagcaguacggcgacugccucggggacaucgcggcccgcgaccugaucugcgcccagaaguucaacggccugaccgugcucccgccccugcugaccgacgagaugaucgcccaguacaccagcgcccuccuggcggggaccaucacguccggcuggaccuucggggccggcgccgcccugcagauccccuucgcgaugcagauggccuaccgguucaacggcaucggggucacccagaacgugcucuacgagaaccagaagcugaucgccaaccaguucaacagcgccaucggcaagauccaggacucccugagcuccaccgccagcgcgcucgggaagcugcaggacguggucaaccagaacgcccaggcccugaacacgcucgugaagugccuguccagcaacuucggcgccaucuccagcgugcugaacgacauccucucccgccuggacaaggucgaggccgaggugcagaucgaccggcugaucaccgggcgccuccagugccugcagaccuacgugacccagcagcugauccgggcggccgagauccgcgccagcgccaaccucgccgcgaccaagauguccgagugcguccugggccagagcaagcggguggacuucugcggcaagggguaccaccugauguccuucccccagagcgccccgcacggcguggucuuccuccacgugacguacguccccgcccaggagaagaacuucaccaccgcccccgcgaucugccacgacgggaaggcccacuucccccgcgagggcguguucguguccaacgggacccacugguucgucacgcagcggaacuucuacgagccgcagaucaucaccaccgacaacaccuucgugagcggcaacugcgacguggucaucggcaucgugaacaacacgguguacgacccccugcagcccgagcuggacuccuucaaggaggagcucgacaaguacuucaagaaccacaccagccccgacgucgaccugggggacaucuccggcaucaacgccagcguggugaacauccagaaggagaucgaccgccugaacgaggucgccaagaaccucaacgagucccugaucgaccugcaggagcucgggaaguacgagcaguacaucaag

SEQ ID NO: 11828 - RNA, 3633 nt, Artificial Sequence
  SARS-CoV-2/Wuhan/WIV05/2019__EPI_ISL_402128 spike protein CDS gc (1-1211)(F970C_G999C)
auguucguguuccugguccuccugccccuggugagcucccagugcgugaaccucaccacccgcacgcagcugccgcccgccuacaccaacagcuucacccggggcgucuacuaccccgacaagguguuccgcuccagcgugcugcacuccacccaggaccucuuccugcccuucuucagcaacgucacgugguuccacgccauccacguguccgggaccaacggcaccaagcgguucgacaacccggugcugcccuucaacgacggggucuacuucgcgagcaccgagaaguccaacaucauccgcggcuggaucuucgggacgacccucgacagcaagacccagucccugcugaucgugaacaacgccaccaacguggucaucaaggugugcgaguuccaguucugcaacgaccccuuccucggcguguacuaccacaagaacaacaagagcuggauggaguccgaguuccgggucuacagcuccgccaacaacugcacguucgaguacgugagccagcccuuccugauggaccuggagggcaagcaggggaacuucaagaaccuccgcgaguucguguucaagaacaucgacggcuacuucaagaucuacuccaagcacaccccgaucaaccugguccgggaccugccccagggguucagcgcccucgagccccugguggaccugcccaucggcaucaacaucacccgcuuccagacccuccuggcccugcaccgguccuaccucacgccgggggacagcagcuccggcuggaccgcgggcgccgccgccuacuacgugggguaccugcagccccgcaccuuccugcucaaguacaacgagaacggcaccaucacggacgcggucgacugcgcccuggacccccugagcgagaccaagugcacccucaaguccuucaccguggagaaggggaucuaccagacgagcaacuuccgggugcagcccaccgaguccaucguccgcuucccgaacaucaccaaccugugccccuucggcgagguguucaacgccacccgguucgccagcgucuacgccuggaaccgcaagcggaucuccaacugcguggcggacuacagcgugcuguacaacuccgccagcuucuccacguucaagugcuacggcgucagccccaccaagcucaacgaccugugcuucaccaacguguacgccgacuccuucgugauccgcggggacgagguccggcagaucgcccccggccagaccgggaagaucgccgacuacaacuacaagcugccggacgacuucacgggcugcgugaucgcguggaacagcaacaaccucgacuccaaggucgggggcaacuacaacuaccuguaccgccuguuccgcaagagcaaccucaagcccuucgagcgggacaucuccaccgagaucuaccaggccggcagcacccccugcaacgggguggagggcuucaacugcuacuucccccugcaguccuacggguuccagccgaccaacggcgugggguaccagcccuaccggguggucgugcugagcuucgagcuccugcacgcccccgccacggugugcggccccaagaaguccaccaaccuggucaagaacaagugcgugaacuucaacuucaacggccucaccgggaccggcgugcugaccgagagcaacaagaaguuccugccguuccagcaguucgggcgcgacaucgccgacacgaccgacgcgguccgcgacccccagacccuggagauccucgacaucacccccugcagcuucggcgggguguccgugaucacgccgggcaccaacaccagcaaccaggucgccgugcuguaccaggacgugaacugcaccgagguccccguggccauccacgccgaccagcugacgcccaccuggcggguguacuccaccggcagcaacgucuuccagacccgcgccgggugccucaucggcgcggagcacgugaacaacuccuacgagugcgacauccccaucggggccggcaucugcgccagcuaccagacgcagaccaacuccccgcggcgcgcccggagcguggcgucccagagcaucaucgccuacaccaugucccugggcgccgagaacagcgucgccuacuccaacaacagcaucgccauccccaccaacuucacgaucuccgugaccaccgagauccugcccgugagcaugaccaagacgagcgucgacugcaccauguacaucugcggggacuccaccgagugcagcaaccuccugcugcaguacggcuccuucugcacccagcucaaccgcgcgcugacggggaucgccguggagcaggacaagaacacccaggagguguucgcccaggucaagcagaucuacaagacgcccccgaucaaggacuucggcggguucaacuucagccagauccugcccgaccccuccaagcccagcaagcgguccuucaucgaggaccuccuguucaacaaggugacccuggccgacgccggcuucaucaagcaguacggcgacugccucggggacaucgcggcccgcgaccugaucugcgcccagaaguucaacggccugaccgugcucccgccccugcugaccgacgagaugaucgcccaguacaccagcgcccuccuggcggggaccaucacguccggcuggaccuucggggccggcgccgcccugcagauccccuucgcgaugcagauggccuaccgguucaacggcaucggggucacccagaacgugcucuacgagaaccagaagcugaucgccaaccaguucaacagcgccaucggcaagauccaggacucccugagcuccaccgccagcgcgcucgggaagcugcaggacguggucaaccagaacgcccaggcccugaacacgcucgugaagcagcuguccagcaacugcggcgccaucuccagcgugcugaacgacauccucucccgccuggacaaggucgaggccgaggugcagaucgaccggcugaucaccugucgccuccagagccugcagaccuacgugacccagcagcugauccgggcggccgagauccgcgccagcgccaaccucgccgcgaccaagauguccgagugcguccugggccagagcaagcggguggacuucugcggcaagggguaccaccugauguccuucccccagagcgccccgcacggcguggucuuccuccacgugacguacguccccgcccaggagaagaacuucaccaccgcccccgcgaucugccacgacgggaaggcccacuucccccgcgagggcguguucguguccaacgggacccacugguucgucacgcagcggaacuucuacgagccgcagaucaucaccaccgacaacaccuucgugagcggcaacugcgacguggucaucggcaucgugaacaacacgguguacgacccccugcagcccgagcuggacuccuucaaggaggagcucgacaaguacuucaagaaccacaccagccccgacgucgaccugggggacaucuccggcaucaacgccagcguggugaacauccagaaggagaucgaccgccugaacgaggucgccaagaaccucaacgagucccugaucgaccugcaggagcucgggaaguacgagcaguacaucaag

SEQ ID NO: 11829 - RNA, 3633 nt, Artificial Sequence
  SARS-CoV-2/Wuhan/WIV05/2019__EPI_ISL_402128 spike protein CDS gc (1-1211)(A972C_R995C)
auguucguguuccugguccuccugccccuggugagcucccagugcgugaaccucaccacccgcacgcagcugccgcccgccuacaccaacagcuucacccggggcgucuacuaccccgacaagguguuccgcuccagcgugcugcacuccacccaggaccucuuccugcccuucuucagcaacgucacgugguuccacgccauccacguguccgggaccaacggcaccaagcgguucgacaacccggugcugcccuucaacgacggggucuacuucgcgagcaccgagaaguccaacaucauccgcggcuggaucuucgggacgacccucgacagcaagacccagucccugcugaucgugaacaacgccaccaacguggucaucaaggugugcgaguuccaguucugcaacgaccccuuccucggcguguacuaccacaagaacaacaagagcuggauggaguccgaguuccgggucuacagcuccgccaacaacugcacguucgaguacgugagccagcccuuccugauggaccuggagggcaagcaggggaacuucaagaaccuccgcgaguucguguucaagaacaucgacggcuacuucaagaucuacuccaagcacaccccgaucaaccugguccgggaccugccccagggguucagcgcccucgagccccugguggaccugcccaucggcaucaacaucacccgcuuccagacccuccuggcccugcaccgguccuaccucacgccgggggacagcagcuccggcuggaccgcgggcgccgccgccuacuacgugggguaccugcagccccgcaccuuccugcucaaguacaacgagaacggcaccaucacggacgcggucgacugcgcccuggacccccugagcgagaccaagugcacccucaaguccuucaccguggagaaggggaucuaccagacgagcaacuuccgggugcagcccaccgaguccaucguccgcuucccgaacaucaccaaccugugccccuucggcgagguguucaacgccacccgguucgccagcgucuacgccuggaaccgcaagcggaucuccaacugcguggcggacuacagcgugcuguacaacuccgccagcuucuccacguucaagugcuacggcgucagccccaccaagcucaacgaccugugcuucaccaacguguacgccgacuccuucgugauccgcggggacgagguccggcagaucgcccccggccagaccgggaagaucgccgacuacaacuacaagcugccggacgacuucacgggcugcgugaucgcguggaacagcaacaaccucgacuccaaggucgggggcaacuacaacuaccuguaccgccuguuccgcaagagcaaccucaagcccuucgagcgggacaucuccaccgagaucuaccaggccggcagcacccccugcaacgggguggagggcuucaacugcuacuucccccugcaguccuacggguuccagccgaccaacggcgugggguaccagcccuaccggguggucgugcugagcuucgagcuccugcacgcccccgccacggugugcggccccaagaaguccaccaaccuggucaagaacaagugcgugaacuucaacuucaacggccucaccgggaccggcgugcugaccgagagcaacaagaaguuccugccguuccagcaguucgggcgcgacaucgccgacacgaccgacgcgguccgcgacccccagacccuggagauccucgacaucacccccugcagcuucggcgggguguccgugaucacgccgggcaccaacaccagcaaccaggucgccgugcuguaccaggacgugaacugcaccgagguccccguggccauccacgccgaccagcugacgcccaccuggcggguguacuccaccggcagcaacgucuuccagacccgcgccgggugccucaucggcgcggagcacgugaacaacuccuacgagugcgacauccccaucggggccggcaucugcgccagcuaccagacgcagaccaacuccccgcggcgcgcccggagcguggcgucccagagcaucaucgccuacaccaugucccugggcgccgagaacagcgucgccuacuccaacaacagcaucgccauccccaccaacuucacgaucuccgugaccaccgagauccugcccgugagcaugaccaagacgagcgucgacugcaccauguacaucugcggggacuccaccgagugcagcaaccuccugcugcaguacggcuccuucugcacccagcucaaccgcgcgcugacggggaucgccguggagcaggacaagaacacccaggagguguucgcccaggucaagcagaucuacaagacgcccccgaucaaggacuucggcggguucaacuucagccagauccugcccgaccccuccaagcccagcaagcgguccuucaucgaggaccuccuguucaacaaggugacccuggccgacgccggcuucaucaagcaguacggcgacugccucggggacaucgcggcccgcgaccugaucugcgcccagaaguucaacggccugaccgugcucccgccccugcugaccgacgagaugaucgcccaguacaccagcgcccuccuggcggggaccaucacguccggcuggaccuucggggccggcgccgcccugcagauccccuucgcgaugcagauggccuaccgguucaacggcaucggggucacccagaacgugcucuacgagaaccagaagcugaucgccaaccaguucaacagcgccaucggcaagauccaggacucccugagcuccaccgccagcgcgcucgggaagcugcaggacguggucaaccagaacgcccaggcccugaacacgcucgugaagcagcuguccagcaacuucggcugcaucuccagcgugcugaacgacauccucucccgccuggacaaggucgaggccgaggugcagaucgacugccugaucaccgggcgccuccagagccugcagaccuacgugacccagcagcugauccgggcggccgagauccgcgccagcgccaaccucgccgcgaccaagauguccgagugcguccugggccagagcaagcggguggacuucugcggcaagggguaccaccugauguccuucccccagagcgccccgcacggcguggucuuccuccacgugacguacguccccgcccaggagaagaacuucaccaccgcccccgcgaucugccacgacgggaaggcccacuucccccgcgagggcguguucguguccaacgggacccacugguucgucacgcagcggaacuucuacgagccgcagaucaucaccaccgacaacaccuucgugagcggcaacugcgacguggucaucggcaucgugaacaacacgguguacgacccccugcagcccgagcuggacuccuucaaggaggagcucgacaaguacuucaagaaccacaccagccccgacgucgaccugggggacaucuccggcaucaacgccagcguggugaacauccagaaggagaucgaccgccugaacgaggucgccaagaaccucaacgagucccugaucgaccugcaggagcucgggaaguacgagcaguacaucaag

SEQ ID NO: 11830 - RNA, 3633 nt, Artificial Sequence
  SARS-CoV-2/Wuhan/WIV05/2019__EPI_ISL_402128 spike protein CDS gc (1-1211)(A890C_V1040C)
auguucguguuccugguccuccugccccuggugagcucccagugcgugaaccucaccacccgcacgcagcugccgcccgccuacaccaacagcuucacccggggcgucuacuaccccgacaagguguuccgcuccagcgugcugcacuccacccaggaccucuuccugcccuucuucagcaacgucacgugguuccacgccauccacguguccgggaccaacggcaccaagcgguucgacaacccggugcugcccuucaacgacggggucuacuucgcgagcaccgagaaguccaacaucauccgcggcuggaucuucgggacgacccucgacagcaagacccagucccugcugaucgugaacaacgccaccaacguggucaucaaggugugcgaguuccaguucugcaacgaccccuuccucggcguguacuaccacaagaacaacaagagcuggauggaguccgaguuccgggucuacagcuccgccaacaacugcacguucgaguacgugagccagcccuuccugauggaccuggagggcaagcaggggaacuucaagaaccuccgcgaguucguguucaagaacaucgacggcuacuucaagaucuacuccaagcacaccccgaucaaccugguccgggaccugccccagggguucagcgcccucgagccccugguggaccugcccaucggcaucaacaucacccgcuuccagacccuccuggcccugcaccgguccuaccucacgccgggggacagcagcuccggcuggaccgcgggcgccgccgccuacuacgugggguaccugcagccccgcaccuuccugcucaaguacaacgagaacggcaccaucacggacgcggucgacugcgcccuggacccccugagcgagaccaagugcacccucaaguccuucaccguggagaaggggaucuaccagacgagcaacuuccgggugcagcccaccgaguccaucguccgcuucccgaacaucaccaaccugugccccuucggcgagguguucaacgccacccgguucgccagcgucuacgccuggaaccgcaagcggaucuccaacugcguggcggacuacagcgugcuguacaacuccgccagcuucuccacguucaagugcuacggcgucagccccaccaagcucaacgaccugugcuucaccaacguguacgccgacuccuucgugauccgcggggacgagguccggcagaucgcccccggccagaccgggaagaucgccgacuacaacuacaagcugccggacgacuucacgggcugcgugaucgcguggaacagcaacaaccucgacuccaaggucgggggcaacuacaacuaccuguaccgccuguuccgcaagagcaaccucaagcccuucgagcgggacaucuccaccgagaucuaccaggccggcagcacccccugcaacgggguggagggcuucaacugcuacuucccccugcaguccuacggguuccagccgaccaacggcgugggguaccagcccuaccggguggucgugcugagcuucgagcuccugcacgcccccgccacggugugcggccccaagaaguccaccaaccuggucaagaacaagugcgugaacuucaacuucaacggccucaccgggaccggcgugcugaccgagagcaacaagaaguuccugccguuccagcaguucgggcgcgacaucgccgacacgaccgacgcgguccgcgacccccagacccuggagauccucgacaucacccccugcagcuucggcgggguguccgugaucacgccgggcaccaacaccagcaaccaggucgccgugcuguaccaggacgugaacugcaccgagguccccguggccauccacgccgaccagcugacgcccaccuggcggguguacuccaccggcagcaacgucuuccagacccgcgccgggugccucaucggcgcggagcacgugaacaacuccuacgagugcgacauccccaucggggccggcaucugcgccagcuaccagacgcagaccaacuccccgcggcgcgcccggagcguggcgucccagagcaucaucgccuacaccaugucccugggcgccgagaacagcgucgccuacuccaacaacagcaucgccauccccaccaacuucacgaucuccgugaccaccgagauccugcccgugagcaugaccaagacgagcgucgacugcaccauguacaucugcggggacuccaccgagugcagcaaccuccugcugcaguacggcuccuucugcacccagcucaaccgcgcgcugacggggaucgccguggagcaggacaagaacacccaggagguguucgcccaggucaagcagaucuacaagacgcccccgaucaaggacuucggcggguucaacuucagccagauccugcccgaccccuccaagcccagcaagcgguccuucaucgaggaccuccuguucaacaaggugacccuggccgacgccggcuucaucaagcaguacggcgacugccucggggacaucgcggcccgcgaccugaucugcgcccagaaguucaacggccugaccgugcucccgccccugcugaccgacgagaugaucgcccaguacaccagcgcccuccuggcggggaccaucacguccggcuggaccuucgggugcggcgccgcccugcagauccccuucgcgaugcagauggccuaccgguucaacggcaucggggucacccagaacgugcucuacgagaaccagaagcugaucgccaaccaguucaacagcgccaucggcaagauccaggacucccugagcuccaccgccagcgcgcucgggaagcugcaggacguggucaaccagaacgcccaggcccugaacacgcucgugaagcagcuguccagcaacuucggcgccaucuccagcgugcugaacgacauccucucccgccuggacaaggucgaggccgaggugcagaucgaccggcugaucaccgggcgccuccagagccugcagaccuacgugacccagcagcugauccgggcggccgagauccgcgccagcgccaaccucgccgcgaccaagauguccgagugcguccugggccagagcaagcggugcgacuucugcggcaagggguaccaccugauguccuucccccagagcgccccgcacggcguggucuuccuccacgugacguacguccccgcccaggagaagaacuucaccaccgcccccgcgaucugccacgacgggaaggcccacuucccccgcgagggcguguucguguccaacgggacccacugguucgucacgcagcggaacuucuacgagccgcagaucaucaccaccgacaacaccuucgugagcggcaacugcgacguggucaucggcaucgugaacaacacgguguacgacccccugcagcccgagcuggacuccuucaaggaggagcucgacaaguacuucaagaaccacaccagccccgacgucgaccugggggacaucuccggcaucaacgccagcguggugaacauccagaaggagaucgaccgccugaacgaggucgccaagaaccucaacgagucccugaucgaccugcaggagcucgggaaguacgagcaguacaucaag

SEQ ID NO: 11831 - RNA, 3633 nt, Artificial Sequence
  SARS-CoV-2/Wuhan/WIV05/2019__EPI_ISL_402128 spike protein CDS gc (1-1211)(T874C_S1055C)
auguucguguuccugguccuccugccccuggugagcucccagugcgugaaccucaccacccgcacgcagcugccgcccgccuacaccaacagcuucacccggggcgucuacuaccccgacaagguguuccgcuccagcgugcugcacuccacccaggaccucuuccugcccuucuucagcaacgucacgugguuccacgccauccacguguccgggaccaacggcaccaagcgguucgacaacccggugcugcccuucaacgacggggucuacuucgcgagcaccgagaaguccaacaucauccgcggcuggaucuucgggacgacccucgacagcaagacccagucccugcugaucgugaacaacgccaccaacguggucaucaaggugugcgaguuccaguucugcaacgaccccuuccucggcguguacuaccacaagaacaacaagagcuggauggaguccgaguuccgggucuacagcuccgccaacaacugcacguucgaguacgugagccagcccuuccugauggaccuggagggcaagcaggggaacuucaagaaccuccgcgaguucguguucaagaacaucgacggcuacuucaagaucuacuccaagcacaccccgaucaaccugguccgggaccugccccagggguucagcgcccucgagccccugguggaccugcccaucggcaucaacaucacccgcuuccagacccuccuggcccugcaccgguccuaccucacgccgggggacagcagcuccggcuggaccgcgggcgccgccgccuacuacgugggguaccugcagccccgcaccuuccugcucaaguacaacgagaacggcaccaucacggacgcggucgacugcgcccuggacccccugagcgagaccaagugcacccucaaguccuucaccguggagaaggggaucuaccagacgagcaacuuccgggugcagcccaccgaguccaucguccgcuucccgaacaucaccaaccugugccccuucggcgagguguucaacgccacccgguucgccagcgucuacgccuggaaccgcaagcggaucuccaacugcguggcggacuacagcgugcuguacaacuccgccagcuucuccacguucaagugcuacggcgucagccccaccaagcucaacgaccugugcuucaccaacguguacgccgacuccuucgugauccgcggggacgagguccggcagaucgcccccggccagaccgggaagaucgccgacuacaacuacaagcugccggacgacuucacgggcugcgugaucgcguggaacagcaacaaccucgacuccaaggucgggggcaacuacaacuaccuguaccgccuguuccgcaagagcaaccucaagcccuucgagcgggacaucuccaccgagaucuaccaggccggcagcacccccugcaacgggguggagggcuucaacugcuacuucccccugcaguccuacggguuccagccgaccaacggcgugggguaccagcccuaccggguggucgugcugagcuucgagcuccugcacgcccccgccacggugugcggccccaagaaguccaccaaccuggucaagaacaagugcgugaacuucaacuucaacggccucaccgggaccggcgugcugaccgagagcaacaagaaguuccugccguuccagcaguucgggcgcgacaucgccgacacgaccgacgcgguccgcgacccccagacccuggagauccucgacaucacccccugcagcuucggcgggguguccgugaucacgccgggcaccaacaccagcaaccaggucgccgugcuguaccaggacgugaacugcaccgagguccccguggccauccacgccgaccagcugacgcccaccuggcggguguacuccaccggcagcaacgucuuccagacccgcgccgggugccucaucggcgcggagcacgugaacaacuccuacgagugcgacauccccaucggggccggcaucugcgccagcuaccagacgcagaccaacuccccgcggcgcgcccggagcguggcgucccagagcaucaucgccuacaccaugucccugggcgccgagaacagcgucgccuacuccaacaacagcaucgccauccccaccaacuucacgaucuccgugaccaccgagauccugcccgugagcaugaccaagacgagcgucgacugcaccauguacaucugcggggacuccaccgagugcagcaaccuccugcugcaguacggcuccuucugcacccagcucaaccgcgcgcugacggggaucgccguggagcaggacaagaacacccaggagguguucgcccaggucaagcagaucuacaagacgcccccgaucaaggacuucggcggguucaacuucagccagauccugcccgaccccuccaagcccagcaagcgguccuucaucgaggaccuccuguucaacaaggugacccuggccgacgccggcuucaucaagcaguacggcgacugccucggggacaucgcggcccgcgaccugaucugcgcccagaaguucaacggccugaccgugcucccgccccugcugaccgacgagaugaucgcccaguacugcagcgcccuccuggcggggaccaucacguccggcuggaccuucggggccggcgccgcccugcagauccccuucgcgaugcagauggccuaccgguucaacggcaucggggucacccagaacgugcucuacgagaaccagaagcugaucgccaaccaguucaacagcgccaucggcaagauccaggacucccugagcuccaccgccagcgcgcucgggaagcugcaggacguggucaaccagaacgcccaggcccugaacacgcucgugaagcagcuguccagcaacuucggcgccaucuccagcgugcugaacgacauccucucccgccuggacaaggucgaggccgaggugcagaucgaccggcugaucaccgggcgccuccagagccugcagaccuacgugacccagcagcugauccgggcggccgagauccgcgccagcgccaaccucgccgcgaccaagauguccgagugcguccugggccagagcaagcggguggacuucugcggcaagggguaccaccugauguccuucccccagugcgccccgcacggcguggucuuccuccacgugacguacguccccgcccaggagaagaacuucaccaccgcccccgcgaucugccacgacgggaaggcccacuucccccgcgagggcguguucguguccaacgggacccacugguucgucacgcagcggaacuucuacgagccgcagaucaucaccaccgacaacaccuucgugagcggcaacugcgacguggucaucggcaucgugaacaacacgguguacgacccccugcagcccgagcuggacuccuucaaggaggagcucgacaaguacuucaagaaccacaccagccccgacgucgaccugggggacaucuccggcaucaacgccagcguggugaacauccagaaggagaucgaccgccugaacgaggucgccaagaaccucaacgagucccugaucgaccugcaggagcucgggaaguacgagcaguacaucaag

SEQ ID NO: 11832 - RNA, 3441 nt, Artificial Sequence
  SARS-CoV-2/Wuhan/WIV05/2019__EPI_ISL_402128 spike protein CDS gc (1-1147)
auguucguguuccugguccuccugccccuggugagcucccagugcgugaaccucaccacccgcacgcagcugccgcccgccuacaccaacagcuucacccggggcgucuacuaccccgacaagguguuccgcuccagcgugcugcacuccacccaggaccucuuccugcccuucuucagcaacgucacgugguuccacgccauccacguguccgggaccaacggcaccaagcgguucgacaacccggugcugcccuucaacgacggggucuacuucgcgagcaccgagaaguccaacaucauccgcggcuggaucuucgggacgacccucgacagcaagacccagucccugcugaucgugaacaacgccaccaacguggucaucaaggugugcgaguuccaguucugcaacgaccccuuccucggcguguacuaccacaagaacaacaagagcuggauggaguccgaguuccgggucuacagcuccgccaacaacugcacguucgaguacgugagccagcccuuccugauggaccuggagggcaagcaggggaacuucaagaaccuccgcgaguucguguucaagaacaucgacggcuacuucaagaucuacuccaagcacaccccgaucaaccugguccgggaccugccccagggguucagcgcccucgagccccugguggaccugcccaucggcaucaacaucacccgcuuccagacccuccuggcccugcaccgguccuaccucacgccgggggacagcagcuccggcuggaccgcgggcgccgccgccuacuacgugggguaccugcagccccgcaccuuccugcucaaguacaacgagaacggcaccaucacggacgcggucgacugcgcccuggacccccugagcgagaccaagugcacccucaaguccuucaccguggagaaggggaucuaccagacgagcaacuuccgggugcagcccaccgaguccaucguccgcuucccgaacaucaccaaccugugccccuucggcgagguguucaacgccacccgguucgccagcgucuacgccuggaaccgcaagcggaucuccaacugcguggcggacuacagcgugcuguacaacuccgccagcuucuccacguucaagugcuacggcgucagccccaccaagcucaacgaccugugcuucaccaacguguacgccgacuccuucgugauccgcggggacgagguccggcagaucgcccccggccagaccgggaagaucgccgacuacaacuacaagcugccggacgacuucacgggcugcgugaucgcguggaacagcaacaaccucgacuccaaggucgggggcaacuacaacuaccuguaccgccuguuccgcaagagcaaccucaagcccuucgagcgggacaucuccaccgagaucuaccaggccggcagcacccccugcaacgggguggagggcuucaacugcuacuucccccugcaguccuacggguuccagccgaccaacggcgugggguaccagcccuaccggguggucgugcugagcuucgagcuccugcacgcccccgccacggugugcggccccaagaaguccaccaaccuggucaagaacaagugcgugaacuucaacuucaacggccucaccgggaccggcgugcugaccgagagcaacaagaaguuccugccguuccagcaguucgggcgcgacaucgccgacacgaccgacgcgguccgcgacccccagacccuggagauccucgacaucacccccugcagcuucggcgggguguccgugaucacgccgggcaccaacaccagcaaccaggucgccgugcuguaccaggacgugaacugcaccgagguccccguggccauccacgccgaccagcugacgcccaccuggcggguguacuccaccggcagcaacgucuuccagacccgcgccgggugccucaucggcgcggagcacgugaacaacuccuacgagugcgacauccccaucggggccggcaucugcgccagcuaccagacgcagaccaacuccccgcggcgcgcccggagcguggcgucccagagcaucaucgccuacaccaugucccugggcgccgagaacagcgucgccuacuccaacaacagcaucgccauccccaccaacuucacgaucuccgugaccaccgagauccugcccgugagcaugaccaagacgagcgucgacugcaccauguacaucugcggggacuccaccgagugcagcaaccuccugcugcaguacggcuccuucugcacccagcucaaccgcgcgcugacggggaucgccguggagcaggacaagaacacccaggagguguucgcccaggucaagcagaucuacaagacgcccccgaucaaggacuucggcggguucaacuucagccagauccugcccgaccccuccaagcccagcaagcgguccuucaucgaggaccuccuguucaacaaggugacccuggccgacgccggcuucaucaagcaguacggcgacugccucggggacaucgcggcccgcgaccugaucugcgcccagaaguucaacggccugaccgugcucccgccccugcugaccgacgagaugaucgcccaguacaccagcgcccuccuggcggggaccaucacguccggcuggaccuucggggccggcgccgcccugcagauccccuucgcgaugcagauggccuaccgguucaacggcaucggggucacccagaacgugcucuacgagaaccagaagcugaucgccaaccaguucaacagcgccaucggcaagauccaggacucccugagcuccaccgccagcgcgcucgggaagcugcaggacguggucaaccagaacgcccaggcccugaacacgcucgugaagcagcuguccagcaacuucggcgccaucuccagcgugcugaacgacauccucucccgccuggacaaggucgaggccgaggugcagaucgaccggcugaucaccgggcgccuccagagccugcagaccuacgugacccagcagcugauccgggcggccgagauccgcgccagcgccaaccucgccgcgaccaagauguccgagugcguccugggccagagcaagcggguggacuucugcggcaagggguaccaccugauguccuucccccagagcgccccgcacggcguggucuuccuccacgugacguacguccccgcccaggagaagaacuucaccaccgcccccgcgaucugccacgacgggaaggcccacuucccccgcgagggcguguucguguccaacgggacccacugguucgucacgcagcggaacuucuacgagccgcagaucaucaccaccgacaacaccuucgugagcggcaacugcgacguggucaucggcaucgugaacaacacgguguacgacccccugcagcccgagcuggacucc

SEQ ID NO: 11833 - RNA, 3441 nt, Artificial Sequence
  SARS-CoV-2/Wuhan/WIV05/2019__EPI_ISL_402128 spike protein CDS gc (1-1147)(K986P_V987P)
auguucguguuccugguccuccugccccuggugagcucccagugcgugaaccucaccacccgcacgcagcugccgcccgccuacaccaacagcuucacccggggcgucuacuaccccgacaagguguuccgcuccagcgugcugcacuccacccaggaccucuuccugcccuucuucagcaacgucacgugguuccacgccauccacguguccgggaccaacggcaccaagcgguucgacaacccggugcugcccuucaacgacggggucuacuucgcgagcaccgagaaguccaacaucauccgcggcuggaucuucgggacgacccucgacagcaagacccagucccugcugaucgugaacaacgccaccaacguggucaucaaggugugcgaguuccaguucugcaacgaccccuuccucggcguguacuaccacaagaacaacaagagcuggauggaguccgaguuccgggucuacagcuccgccaacaacugcacguucgaguacgugagccagcccuuccugauggaccuggagggcaagcaggggaacuucaagaaccuccgcgaguucguguucaagaacaucgacggcuacuucaagaucuacuccaagcacaccccgaucaaccugguccgggaccugccccagggguucagcgcccucgagccccugguggaccugcccaucggcaucaacaucacccgcuuccagacccuccuggcccugcaccgguccuaccucacgccgggggacagcagcuccggcuggaccgcgggcgccgccgccuacuacgugggguaccugcagccccgcaccuuccugcucaaguacaacgagaacggcaccaucacggacgcggucgacugcgcccuggacccccugagcgagaccaagugcacccucaaguccuucaccguggagaaggggaucuaccagacgagcaacuuccgggugcagcccaccgaguccaucguccgcuucccgaacaucaccaaccugugccccuucggcgagguguucaacgccacccgguucgccagcgucuacgccuggaaccgcaagcggaucuccaacugcguggcggacuacagcgugcuguacaacuccgccagcuucuccacguucaagugcuacggcgucagccccaccaagcucaacgaccugugcuucaccaacguguacgccgacuccuucgugauccgcggggacgagguccggcagaucgcccccggccagaccgggaagaucgccgacuacaacuacaagcugccggacgacuucacgggcugcgugaucgcguggaacagcaacaaccucgacuccaaggucgggggcaacuacaacuaccuguaccgccuguuccgcaagagcaaccucaagcccuucgagcgggacaucuccaccgagaucuaccaggccggcagcacccccugcaacgggguggagggcuucaacugcuacuucccccugcaguccuacggguuccagccgaccaacggcgugggguaccagcccuaccggguggucgugcugagcuucgagcuccugcacgcccccgccacggugugcggccccaagaaguccaccaaccuggucaagaacaagugcgugaacuucaacuucaacggccucaccgggaccggcgugcugaccgagagcaacaagaaguuccugccguuccagcaguucgggcgcgacaucgccgacacgaccgacgcgguccgcgacccccagacccuggagauccucgacaucacccccugcagcuucggcgggguguccgugaucacgccgggcaccaacaccagcaaccaggucgccgugcuguaccaggacgugaacugcaccgagguccccguggccauccacgccgaccagcugacgcccaccuggcggguguacuccaccggcagcaacgucuuccagacccgcgccgggugccucaucggcgcggagcacgugaacaacuccuacgagugcgacauccccaucggggccggcaucugcgccagcuaccagacgcagaccaacuccccgcggcgcgcccggagcguggcgucccagagcaucaucgccuacaccaugucccugggcgccgagaacagcgucgccuacuccaacaacagcaucgccauccccaccaacuucacgaucuccgugaccaccgagauccugcccgugagcaugaccaagacgagcgucgacugcaccauguacaucugcggggacuccaccgagugcagcaaccuccugcugcaguacggcuccuucugcacccagcucaaccgcgcgcugacggggaucgccguggagcaggacaagaacacccaggagguguucgcccaggucaagcagaucuacaagacgcccccgaucaaggacuucggcggguucaacuucagccagauccugcccgaccccuccaagcccagcaagcgguccuucaucgaggaccuccuguucaacaaggugacccuggccgacgccggcuucaucaagcaguacggcgacugccucggggacaucgcggcccgcgaccugaucugcgcccagaaguucaacggccugaccgugcucccgccccugcugaccgacgagaugaucgcccaguacaccagcgcccuccuggcggggaccaucacguccggcuggaccuucggggccggcgccgcccugcagauccccuucgcgaugcagauggccuaccgguucaacggcaucggggucacccagaacgugcucuacgagaaccagaagcugaucgccaaccaguucaacagcgccaucggcaagauccaggacucccugagcuccaccgccagcgcgcucgggaagcugcaggacguggucaaccagaacgcccaggcccugaacacgcucgugaagcagcuguccagcaacuucggcgccaucuccagcgugcugaacgacauccucucccgccuggacccgcccgaggccgaggugcagaucgaccggcugaucaccgggcgccuccagagccugcagaccuacgugacccagcagcugauccgggcggccgagauccgcgccagcgccaaccucgccgcgaccaagauguccgagugcguccugggccagagcaagcggguggacuucugcggcaagggguaccaccugauguccuucccccagagcgccccgcacggcguggucuuccuccacgugacguacguccccgcccaggagaagaacuucaccaccgcccccgcgaucugccacgacgggaaggcccacuucccccgcgagggcguguucguguccaacgggacccacugguucgucacgcagcggaacuucuacgagccgcagaucaucaccaccgacaacaccuucgugagcggcaacugcgacguggucaucggcaucgugaacaacacgguguacgacccccugcagcccgagcuggacucc

SEQ ID NO: 11834 - RNA, 3441 nt, Artificial Sequence
  SARS-CoV-2/Wuhan/WIV05/2019__EPI_ISL_402128 spike protein CDS gc (1-1147)(K986P_V987P_T887WN_A1020W)
auguucguguuccugguccuccugccccuggugagcucccagugcgugaaccucaccacccgcacgcagcugccgcccgccuacaccaacagcuucacccggggcgucuacuaccccgacaagguguuccgcuccagcgugcugcacuccacccaggaccucuuccugcccuucuucagcaacgucacgugguuccacgccauccacguguccgggaccaacggcaccaagcgguucgacaacccggugcugcccuucaacgacggggucuacuucgcgagcaccgagaaguccaacaucauccgcggcuggaucuucgggacgacccucgacagcaagacccagucccugcugaucgugaacaacgccaccaacguggucaucaaggugugcgaguuccaguucugcaacgaccccuuccucggcguguacuaccacaagaacaacaagagcuggauggaguccgaguuccgggucuacagcuccgccaacaacugcacguucgaguacgugagccagcccuuccugauggaccuggagggcaagcaggggaacuucaagaaccuccgcgaguucguguucaagaacaucgacggcuacuucaagaucuacuccaagcacaccccgaucaaccugguccgggaccugccccagggguucagcgcccucgagccccugguggaccugcccaucggcaucaacaucacccgcuuccagacccuccuggcccugcaccgguccuaccucacgccgggggacagcagcuccggcuggaccgcgggcgccgccgccuacuacgugggguaccugcagccccgcaccuuccugcucaaguacaacgagaacggcaccaucacggacgcggucgacugcgcccuggacccccugagcgagaccaagugcacccucaaguccuucaccguggagaaggggaucuaccagacgagcaacuuccgggugcagcccaccgaguccaucguccgcuucccgaacaucaccaaccugugccccuucggcgagguguucaacgccacccgguucgccagcgucuacgccuggaaccgcaagcggaucuccaacugcguggcggacuacagcgugcuguacaacuccgccagcuucuccacguucaagugcuacggcgucagccccaccaagcucaacgaccugugcuucaccaacguguacgccgacuccuucgugauccgcggggacgagguccggcagaucgcccccggccagaccgggaagaucgccgacuacaacuacaagcugccggacgacuucacgggcugcgugaucgcguggaacagcaacaaccucgacuccaaggucgggggcaacuacaacuaccuguaccgccuguuccgcaagagcaaccucaagcccuucgagcgggacaucuccaccgagaucuaccaggccggcagcacccccugcaacgggguggagggcuucaacugcuacuucccccugcaguccuacggguuccagccgaccaacggcgugggguaccagcccuaccggguggucgugcugagcuucgagcuccugcacgcccccgccacggugugcggccccaagaaguccaccaaccuggucaagaacaagugcgugaacuucaacuucaacggccucaccgggaccggcgugcugaccgagagcaacaagaaguuccugccguuccagcaguucgggcgcgacaucgccgacacgaccgacgcgguccgcgacccccagacccuggagauccucgacaucacccccugcagcuucggcgggguguccgugaucacgccgggcaccaacaccagcaaccaggucgccgugcuguaccaggacgugaacugcaccgagguccccguggccauccacgccgaccagcugacgcccaccuggcggguguacuccaccggcagcaacgucuuccagacccgcgccgggugccucaucggcgcggagcacgugaacaacuccuacgagugcgacauccccaucggggccggcaucugcgccagcuaccagacgcagaccaacuccccgcggcgcgcccggagcguggcgucccagagcaucaucgccuacaccaugucccugggcgccgagaacagcgucgccuacuccaacaacagcaucgccauccccaccaacuucacgaucuccgugaccaccgagauccugcccgugagcaugaccaagacgagcgucgacugcaccauguacaucugcggggacuccaccgagugcagcaaccuccugcugcaguacggcuccuucugcacccagcucaaccgcgcgcugacggggaucgccguggagcaggacaagaacacccaggagguguucgcccaggucaagcagaucuacaagacgcccccgaucaaggacuucggcggguucaacuucagccagauccugcccgaccccuccaagcccagcaagcgguccuucaucgaggaccuccuguucaacaaggugacccuggccgacgccggcuucaucaagcaguacggcgacugccucggggacaucgcggcccgcgaccugaucugcgcccagaaguucaacggccugaccgugcucccgccccugcugaccgacgagaugaucgcccaguacaccagcgcccuccuggcggggaccaucacguccggcuggugguucggggccggcgccgcccugcagauccccuucgcgaugcagauggccuaccgguucaacggcaucggggucacccagaacgugcucuacgagaaccagaagcugaucgccaaccaguucaacagcgccaucggcaagauccaggacucccugagcuccaccgccagcgcgcucgggaagcugcaggacguggucaaccagaacgcccaggcccugaacacgcucgugaagcagcuguccagcaacuucggcgccaucuccagcgugcugaacgacauccucucccgccuggacccgcccgaggccgaggugcagaucgaccggcugaucaccgggcgccuccagagccugcagaccuacgugacccagcagcugauccgggcggccgagauccgcuggagcgccaaccucgccgcgaccaagauguccgagugcguccugggccagagcaagcggguggacuucugcggcaagggguaccaccugauguccuucccccagagcgccccgcacggcguggucuuccuccacgugacguacguccccgcccaggagaagaacuucaccaccgcccccgcgaucugccacgacgggaaggcccacuucccccgcgagggcguguucguguccaacgggacccacugguucgucacgcagcggaacuucuacgagccgcagaucaucaccaccgacaacaccuucgugagcggcaacugcgacguggucaucggcaucgugaacaacacgguguacgacccccugcagcccgagcuggacucc

SEQ ID NO: 11835 - RNA, 3441 nt, Artificial Sequence
  SARS-CoV-2/Wuhan/WIV05/2019__EPI_ISL_402128 spike protein CDS gc (1-1147)(K986P_V987P_P1069F)
auguucguguuccugguccuccugccccuggugagcucccagugcgugaaccucaccacccgcacgcagcugccgcccgccuacaccaacagcuucacccggggcgucuacuaccccgacaagguguuccgcuccagcgugcugcacuccacccaggaccucuuccugcccuucuucagcaacgucacgugguuccacgccauccacguguccgggaccaacggcaccaagcgguucgacaacccggugcugcccuucaacgacggggucuacuucgcgagcaccgagaaguccaacaucauccgcggcuggaucuucgggacgacccucgacagcaagacccagucccugcugaucgugaacaacgccaccaacguggucaucaaggugugcgaguuccaguucugcaacgaccccuuccucggcguguacuaccacaagaacaacaagagcuggauggaguccgaguuccgggucuacagcuccgccaacaacugcacguucgaguacgugagccagcccuuccugauggaccuggagggcaagcaggggaacuucaagaaccuccgcgaguucguguucaagaacaucgacggcuacuucaagaucuacuccaagcacaccccgaucaaccugguccgggaccugccccagggguucagcgcccucgagccccugguggaccugcccaucggcaucaacaucacccgcuuccagacccuccuggcccugcaccgguccuaccucacgccgggggacagcagcuccggcuggaccgcgggcgccgccgccuacuacgugggguaccugcagccccgcaccuuccugcucaaguacaacgagaacggcaccaucacggacgcggucgacugcgcccuggacccccugagcgagaccaagugcacccucaaguccuucaccguggagaaggggaucuaccagacgagcaacuuccgggugcagcccaccgaguccaucguccgcuucccgaacaucaccaaccugugccccuucggcgagguguucaacgccacccgguucgccagcgucuacgccuggaaccgcaagcggaucuccaacugcguggcggacuacagcgugcuguacaacuccgccagcuucuccacguucaagugcuacggcgucagccccaccaagcucaacgaccugugcuucaccaacguguacgccgacuccuucgugauccgcggggacgagguccggcagaucgcccccggccagaccgggaagaucgccgacuacaacuacaagcugccggacgacuucacgggcugcgugaucgcguggaacagcaacaaccucgacuccaaggucgggggcaacuacaacuaccuguaccgccuguuccgcaagagcaaccucaagcccuucgagcgggacaucuccaccgagaucuaccaggccggcagcacccccugcaacgggguggagggcuucaacugcuacuucccccugcaguccuacggguuccagccgaccaacggcgugggguaccagcccuaccggguggucgugcugagcuucgagcuccugcacgcccccgccacggugugcggccccaagaaguccaccaaccuggucaagaacaagugcgugaacuucaacuucaacggccucaccgggaccggcgugcugaccgagagcaacaagaaguuccugccguuccagcaguucgggcgcgacaucgccgacacgaccgacgcgguccgcgacccccagacccuggagauccucgacaucacccccugcagcuucggcgggguguccgugaucacgccgggcaccaacaccagcaaccaggucgccgugcuguaccaggacgugaacugcaccgagguccccguggccauccacgccgaccagcugacgcccaccuggcggguguacuccaccggcagcaacgucuuccagacccgcgccgggugccucaucggcgcggagcacgugaacaacuccuacgagugcgacauccccaucggggccggcaucugcgccagcuaccagacgcagaccaacuccccgcggcgcgcccggagcguggcgucccagagcaucaucgccuacaccaugucccugggcgccgagaacagcgucgccuacuccaacaacagcaucgccauccccaccaacuucacgaucuccgugaccaccgagauccugcccgugagcaugaccaagacgagcgucgacugcaccauguacaucugcggggacuccaccgagugcagcaaccuccugcugcaguacggcuccuucugcacccagcucaaccgcgcgcugacggggaucgccguggagcaggacaagaacacccaggagguguucgcccaggucaagcagaucuacaagacgcccccgaucaaggacuucggcggguucaacuucagccagauccugcccgaccccuccaagcccagcaagcgguccuucaucgaggaccuccuguucaacaaggugacccuggccgacgccggcuucaucaagcaguacggcgacugccucggggacaucgcggcccgcgaccugaucugcgcccagaaguucaacggccugaccgugcucccgccccugcugaccgacgagaugaucgcccaguacaccagcgcccuccuggcggggaccaucacguccggcuggaccuucggggccggcgccgcccugcagauccccuucgcgaugcagauggccuaccgguucaacggcaucggggucacccagaacgugcucuacgagaaccagaagcugaucgccaaccaguucaacagcgccaucggcaagauccaggacucccugagcuccaccgccagcgcgcucgggaagcugcaggacguggucaaccagaacgcccaggcccugaacacgcucgugaagcagcuguccagcaacuucggcgccaucuccagcgugcugaacgacauccucucccgccuggacccgcccgaggccgaggugcagaucgaccggcugaucaccgggcgccuccagagccugcagaccuacgugacccagcagcugauccgggcggccgagauccgcgccagcgccaaccucgccgcgaccaagauguccgagugcguccugggccagagcaagcggguggacuucugcggcaagggguaccaccugauguccuucccccagagcgccccgcacggcguggucuuccuccacgugacguacgucuucgcccaggagaagaacuucaccaccgcccccgcgaucugccacgacgggaaggcccacuucccccgcgagggcguguucguguccaacgggacccacugguucgucacgcagcggaacuucuacgagccgcagaucaucaccaccgacaacaccuucgugagcggcaacugcgacguggucaucggcaucgugaacaacacgguguacgacccccugcagcccgagcuggacucc

SEQ ID NO: 11836 - RNA, 3441 nt, Artificial Sequence
  SARS-CoV-2/Wuhan/WIV05/2019__EPI_ISL_402128 spike protein CDS gc (1-1147)(K986P_V987P_ H1048Q_H1064N_ H1083N_H1101N)
auguucguguuccugguccuccugccccuggugagcucccagugcgugaaccucaccacccgcacgcagcugccgcccgccuacaccaacagcuucacccggggcgucuacuaccccgacaagguguuccgcuccagcgugcugcacuccacccaggaccucuuccugcccuucuucagcaacgucacgugguuccacgccauccacguguccgggaccaacggcaccaagcgguucgacaacccggugcugcccuucaacgacggggucuacuucgcgagcaccgagaaguccaacaucauccgcggcuggaucuucgggacgacccucgacagcaagacccagucccugcugaucgugaacaacgccaccaacguggucaucaaggugugcgaguuccaguucugcaacgaccccuuccucggcguguacuaccacaagaacaacaagagcuggauggaguccgaguuccgggucuacagcuccgccaacaacugcacguucgaguacgugagccagcccuuccugauggaccuggagggcaagcaggggaacuucaagaaccuccgcgaguucguguucaagaacaucgacggcuacuucaagaucuacuccaagcacaccccgaucaaccugguccgggaccugccccagggguucagcgcccucgagccccugguggaccugcccaucggcaucaacaucacccgcuuccagacccuccuggcccugcaccgguccuaccucacgccgggggacagcagcuccggcuggaccgcgggcgccgccgccuacuacgugggguaccugcagccccgcaccuuccugcucaaguacaacgagaacggcaccaucacggacgcggucgacugcgcccuggacccccugagcgagaccaagugcacccucaaguccuucaccguggagaaggggaucuaccagacgagcaacuuccgggugcagcccaccgaguccaucguccgcuucccgaacaucaccaaccugugccccuucggcgagguguucaacgccacccgguucgccagcgucuacgccuggaaccgcaagcggaucuccaacugcguggcggacuacagcgugcuguacaacuccgccagcuucuccacguucaagugcuacggcgucagccccaccaagcucaacgaccugugcuucaccaacguguacgccgacuccuucgugauccgcggggacgagguccggcagaucgcccccggccagaccgggaagaucgccgacuacaacuacaagcugccggacgacuucacgggcugcgugaucgcguggaacagcaacaaccucgacuccaaggucgggggcaacuacaacuaccuguaccgccuguuccgcaagagcaaccucaagcccuucgagcgggacaucuccaccgagaucuaccaggccggcagcacccccugcaacgggguggagggcuucaacugcuacuucccccugcaguccuacggguuccagccgaccaacggcgugggguaccagcccuaccggguggucgugcugagcuucgagcuccugcacgcccccgccacggugugcggccccaagaaguccaccaaccuggucaagaacaagugcgugaacuucaacuucaacggccucaccgggaccggcgugcugaccgagagcaacaagaaguuccugccguuccagcaguucgggcgcgacaucgccgacacgaccgacgcgguccgcgacccccagacccuggagauccucgacaucacccccugcagcuucggcgggguguccgugaucacgccgggcaccaacaccagcaaccaggucgccgugcuguaccaggacgugaacugcaccgagguccccguggccauccacgccgaccagcugacgcccaccuggcggguguacuccaccggcagcaacgucuuccagacccgcgccgggugccucaucggcgcggagcacgugaacaacuccuacgagugcgacauccccaucggggccggcaucugcgccagcuaccagacgcagaccaacuccccgcggcgcgcccggagcguggcgucccagagcaucaucgccuacaccaugucccugggcgccgagaacagcgucgccuacuccaacaacagcaucgccauccccaccaacuucacgaucuccgugaccaccgagauccugcccgugagcaugaccaagacgagcgucgacugcaccauguacaucugcggggacuccaccgagugcagcaaccuccugcugcaguacggcuccuucugcacccagcucaaccgcgcgcugacggggaucgccguggagcaggacaagaacacccaggagguguucgcccaggucaagcagaucuacaagacgcccccgaucaaggacuucggcggguucaacuucagccagauccugcccgaccccuccaagcccagcaagcgguccuucaucgaggaccuccuguucaacaaggugacccuggccgacgccggcuucaucaagcaguacggcgacugccucggggacaucgcggcccgcgaccugaucugcgcccagaaguucaacggccugaccgugcucccgccccugcugaccgacgagaugaucgcccaguacaccagcgcccuccuggcggggaccaucacguccggcuggaccuucggggccggcgccgcccugcagauccccuucgcgaugcagauggccuaccgguucaacggcaucggggucacccagaacgugcucuacgagaaccagaagcugaucgccaaccaguucaacagcgccaucggcaagauccaggacucccugagcuccaccgccagcgcgcucgggaagcugcaggacguggucaaccagaacgcccaggcccugaacacgcucgugaagcagcuguccagcaacuucggcgccaucuccagcgugcugaacgacauccucucccgccuggacccgcccgaggccgaggugcagaucgaccggcugaucaccgggcgccuccagagccugcagaccuacgugacccagcagcugauccgggcggccgagauccgcgccagcgccaaccucgccgcgaccaagauguccgagugcguccugggccagagcaagcggguggacuucugcggcaagggguaccagcugauguccuucccccagagcgccccgcacggcguggucuuccucaacgugacguacguccccgcccaggagaagaacuucaccaccgcccccgcgaucugcaacgacgggaaggcccacuucccccgcgagggcguguucguguccaacgggaccaacugguucgucacgcagcggaacuucuacgagccgcagaucaucaccaccgacaacaccuucgugagcggcaacugcgacguggucaucggcaucgugaacaacacgguguacgacccccugcagcccgagcuggacucc

SEQ ID NO: 11837 - RNA, 3441 nt, Artificial Sequence
  SARS-CoV-2/Wuhan/WIV05/2019__EPI_ISL_402128 spike protein CDS gc (1-1147)(I712C_T1077C)
auguucguguuccugguccuccugccccuggugagcucccagugcgugaaccucaccacccgcacgcagcugccgcccgccuacaccaacagcuucacccggggcgucuacuaccccgacaagguguuccgcuccagcgugcugcacuccacccaggaccucuuccugcccuucuucagcaacgucacgugguuccacgccauccacguguccgggaccaacggcaccaagcgguucgacaacccggugcugcccuucaacgacggggucuacuucgcgagcaccgagaaguccaacaucauccgcggcuggaucuucgggacgacccucgacagcaagacccagucccugcugaucgugaacaacgccaccaacguggucaucaaggugugcgaguuccaguucugcaacgaccccuuccucggcguguacuaccacaagaacaacaagagcuggauggaguccgaguuccgggucuacagcuccgccaacaacugcacguucgaguacgugagccagcccuuccugauggaccuggagggcaagcaggggaacuucaagaaccuccgcgaguucguguucaagaacaucgacggcuacuucaagaucuacuccaagcacaccccgaucaaccugguccgggaccugccccagggguucagcgcccucgagccccugguggaccugcccaucggcaucaacaucacccgcuuccagacccuccuggcccugcaccgguccuaccucacgccgggggacagcagcuccggcuggaccgcgggcgccgccgccuacuacgugggguaccugcagccccgcaccuuccugcucaaguacaacgagaacggcaccaucacggacgcggucgacugcgcccuggacccccugagcgagaccaagugcacccucaaguccuucaccguggagaaggggaucuaccagacgagcaacuuccgggugcagcccaccgaguccaucguccgcuucccgaacaucaccaaccugugccccuucggcgagguguucaacgccacccgguucgccagcgucuacgccuggaaccgcaagcggaucuccaacugcguggcggacuacagcgugcuguacaacuccgccagcuucuccacguucaagugcuacggcgucagccccaccaagcucaacgaccugugcuucaccaacguguacgccgacuccuucgugauccgcggggacgagguccggcagaucgcccccggccagaccgggaagaucgccgacuacaacuacaagcugccggacgacuucacgggcugcgugaucgcguggaacagcaacaaccucgacuccaaggucgggggcaacuacaacuaccuguaccgccuguuccgcaagagcaaccucaagcccuucgagcgggacaucuccaccgagaucuaccaggccggcagcacccccugcaacgggguggagggcuucaacugcuacuucccccugcaguccuacggguuccagccgaccaacggcgugggguaccagcccuaccggguggucgugcugagcuucgagcuccugcacgcccccgccacggugugcggccccaagaaguccaccaaccuggucaagaacaagugcgugaacuucaacuucaacggccucaccgggaccggcgugcugaccgagagcaacaagaaguuccugccguuccagcaguucgggcgcgacaucgccgacacgaccgacgcgguccgcgacccccagacccuggagauccucgacaucacccccugcagcuucggcgggguguccgugaucacgccgggcaccaacaccagcaaccaggucgccgugcuguaccaggacgugaacugcaccgagguccccguggccauccacgccgaccagcugacgcccaccuggcggguguacuccaccggcagcaacgucuuccagacccgcgccgggugccucaucggcgcggagcacgugaacaacuccuacgagugcgacauccccaucggggccggcaucugcgccagcuaccagacgcagaccaacuccccgcggcgcgcccggagcguggcgucccagagcaucaucgccuacaccaugucccugggcgccgagaacagcgucgccuacuccaacaacagcugcgccauccccaccaacuucacgaucuccgugaccaccgagauccugcccgugagcaugaccaagacgagcgucgacugcaccauguacaucugcggggacuccaccgagugcagcaaccuccugcugcaguacggcuccuucugcacccagcucaaccgcgcgcugacggggaucgccguggagcaggacaagaacacccaggagguguucgcccaggucaagcagaucuacaagacgcccccgaucaaggacuucggcggguucaacuucagccagauccugcccgaccccuccaagcccagcaagcgguccuucaucgaggaccuccuguucaacaaggugacccuggccgacgccggcuucaucaagcaguacggcgacugccucggggacaucgcggcccgcgaccugaucugcgcccagaaguucaacggccugaccgugcucccgccccugcugaccgacgagaugaucgcccaguacaccagcgcccuccuggcggggaccaucacguccggcuggaccuucggggccggcgccgcccugcagauccccuucgcgaugcagauggccuaccgguucaacggcaucggggucacccagaacgugcucuacgagaaccagaagcugaucgccaaccaguucaacagcgccaucggcaagauccaggacucccugagcuccaccgccagcgcgcucgggaagcugcaggacguggucaaccagaacgcccaggcccugaacacgcucgugaagcagcuguccagcaacuucggcgccaucuccagcgugcugaacgacauccucucccgccuggacaaggucgaggccgaggugcagaucgaccggcugaucaccgggcgccuccagagccugcagaccuacgugacccagcagcugauccgggcggccgagauccgcgccagcgccaaccucgccgcgaccaagauguccgagugcguccugggccagagcaagcggguggacuucugcggcaagggguaccaccugauguccuucccccagagcgccccgcacggcguggucuuccuccacgugacguacguccccgcccaggagaagaacuucaccugcgcccccgcgaucugccacgacgggaaggcccacuucccccgcgagggcguguucguguccaacgggacccacugguucgucacgcagcggaacuucuacgagccgcagaucaucaccaccgacaacaccuucgugagcggcaacugcgacguggucaucggcaucgugaacaacacgguguacgacccccugcagcccgagcuggacucc

SEQ ID NO: 11838 - RNA, 3441 nt, Artificial Sequence
  SARS-CoV-2/Wuhan/WIV05/2019__EPI_ISL_402128 spike protein CDS gc (1-1147)(I714C_Y1110C)
auguucguguuccugguccuccugccccuggugagcucccagugcgugaaccucaccacccgcacgcagcugccgcccgccuacaccaacagcuucacccggggcgucuacuaccccgacaagguguuccgcuccagcgugcugcacuccacccaggaccucuuccugcccuucuucagcaacgucacgugguuccacgccauccacguguccgggaccaacggcaccaagcgguucgacaacccggugcugcccuucaacgacggggucuacuucgcgagcaccgagaaguccaacaucauccgcggcuggaucuucgggacgacccucgacagcaagacccagucccugcugaucgugaacaacgccaccaacguggucaucaaggugugcgaguuccaguucugcaacgaccccuuccucggcguguacuaccacaagaacaacaagagcuggauggaguccgaguuccgggucuacagcuccgccaacaacugcacguucgaguacgugagccagcccuuccugauggaccuggagggcaagcaggggaacuucaagaaccuccgcgaguucguguucaagaacaucgacggcuacuucaagaucuacuccaagcacaccccgaucaaccugguccgggaccugccccagggguucagcgcccucgagccccugguggaccugcccaucggcaucaacaucacccgcuuccagacccuccuggcccugcaccgguccuaccucacgccgggggacagcagcuccggcuggaccgcgggcgccgccgccuacuacgugggguaccugcagccccgcaccuuccugcucaaguacaacgagaacggcaccaucacggacgcggucgacugcgcccuggacccccugagcgagaccaagugcacccucaaguccuucaccguggagaaggggaucuaccagacgagcaacuuccgggugcagcccaccgaguccaucguccgcuucccgaacaucaccaaccugugccccuucggcgagguguucaacgccacccgguucgccagcgucuacgccuggaaccgcaagcggaucuccaacugcguggcggacuacagcgugcuguacaacuccgccagcuucuccacguucaagugcuacggcgucagccccaccaagcucaacgaccugugcuucaccaacguguacgccgacuccuucgugauccgcggggacgagguccggcagaucgcccccggccagaccgggaagaucgccgacuacaacuacaagcugccggacgacuucacgggcugcgugaucgcguggaacagcaacaaccucgacuccaaggucgggggcaacuacaacuaccuguaccgccuguuccgcaagagcaaccucaagcccuucgagcgggacaucuccaccgagaucuaccaggccggcagcacccccugcaacgggguggagggcuucaacugcuacuucccccugcaguccuacggguuccagccgaccaacggcgugggguaccagcccuaccggguggucgugcugagcuucgagcuccugcacgcccccgccacggugugcggccccaagaaguccaccaaccuggucaagaacaagugcgugaacuucaacuucaacggccucaccgggaccggcgugcugaccgagagcaacaagaaguuccugccguuccagcaguucgggcgcgacaucgccgacacgaccgacgcgguccgcgacccccagacccuggagauccucgacaucacccccugcagcuucggcgggguguccgugaucacgccgggcaccaacaccagcaaccaggucgccgugcuguaccaggacgugaacugcaccgagguccccguggccauccacgccgaccagcugacgcccaccuggcggguguacuccaccggcagcaacgucuuccagacccgcgccgggugccucaucggcgcggagcacgugaacaacuccuacgagugcgacauccccaucggggccggcaucugcgccagcuaccagacgcagaccaacuccccgcggcgcgcccggagcguggcgucccagagcaucaucgccuacaccaugucccugggcgccgagaacagcgucgccuacuccaacaacagcaucgccugccccaccaacuucacgaucuccgugaccaccgagauccugcccgugagcaugaccaagacgagcgucgacugcaccauguacaucugcggggacuccaccgagugcagcaaccuccugcugcaguacggcuccuucugcacccagcucaaccgcgcgcugacggggaucgccguggagcaggacaagaacacccaggagguguucgcccaggucaagcagaucuacaagacgcccccgaucaaggacuucggcggguucaacuucagccagauccugcccgaccccuccaagcccagcaagcgguccuucaucgaggaccuccuguucaacaaggugacccuggccgacgccggcuucaucaagcaguacggcgacugccucggggacaucgcggcccgcgaccugaucugcgcccagaaguucaacggccugaccgugcucccgccccugcugaccgacgagaugaucgcccaguacaccagcgcccuccuggcggggaccaucacguccggcuggaccuucggggccggcgccgcccugcagauccccuucgcgaugcagauggccuaccgguucaacggcaucggggucacccagaacgugcucuacgagaaccagaagcugaucgccaaccaguucaacagcgccaucggcaagauccaggacucccugagcuccaccgccagcgcgcucgggaagcugcaggacguggucaaccagaacgcccaggcccugaacacgcucgugaagcagcuguccagcaacuucggcgccaucuccagcgugcugaacgacauccucucccgccuggacaaggucgaggccgaggugcagaucgaccggcugaucaccgggcgccuccagagccugcagaccuacgugacccagcagcugauccgggcggccgagauccgcgccagcgccaaccucgccgcgaccaagauguccgagugcguccugggccagagcaagcggguggacuucugcggcaagggguaccaccugauguccuucccccagagcgccccgcacggcguggucuuccuccacgugacguacguccccgcccaggagaagaacuucaccaccgcccccgcgaucugccacgacgggaaggcccacuucccccgcgagggcguguucguguccaacgggacccacugguucgucacgcagcggaacuucugcgagccgcagaucaucaccaccgacaacaccuucgugagcggcaacugcgacguggucaucggcaucgugaacaacacgguguacgacccccugcagcccgagcuggacucc

SEQ ID NO: 11839 - RNA, 3441 nt, Artificial Sequence
  SARS-CoV-2/Wuhan/WIV05/2019__EPI_ISL_402128 spike protein CDS gc (1-1147)(P715C_P1069C)
auguucguguuccugguccuccugccccuggugagcucccagugcgugaaccucaccacccgcacgcagcugccgcccgccuacaccaacagcuucacccggggcgucuacuaccccgacaagguguuccgcuccagcgugcugcacuccacccaggaccucuuccugcccuucuucagcaacgucacgugguuccacgccauccacguguccgggaccaacggcaccaagcgguucgacaacccggugcugcccuucaacgacggggucuacuucgcgagcaccgagaaguccaacaucauccgcggcuggaucuucgggacgacccucgacagcaagacccagucccugcugaucgugaacaacgccaccaacguggucaucaaggugugcgaguuccaguucugcaacgaccccuuccucggcguguacuaccacaagaacaacaagagcuggauggaguccgaguuccgggucuacagcuccgccaacaacugcacguucgaguacgugagccagcccuuccugauggaccuggagggcaagcaggggaacuucaagaaccuccgcgaguucguguucaagaacaucgacggcuacuucaagaucuacuccaagcacaccccgaucaaccugguccgggaccugccccagggguucagcgcccucgagccccugguggaccugcccaucggcaucaacaucacccgcuuccagacccuccuggcccugcaccgguccuaccucacgccgggggacagcagcuccggcuggaccgcgggcgccgccgccuacuacgugggguaccugcagccccgcaccuuccugcucaaguacaacgagaacggcaccaucacggacgcggucgacugcgcccuggacccccugagcgagaccaagugcacccucaaguccuucaccguggagaaggggaucuaccagacgagcaacuuccgggugcagcccaccgaguccaucguccgcuucccgaacaucaccaaccugugccccuucggcgagguguucaacgccacccgguucgccagcgucuacgccuggaaccgcaagcggaucuccaacugcguggcggacuacagcgugcuguacaacuccgccagcuucuccacguucaagugcuacggcgucagccccaccaagcucaacgaccugugcuucaccaacguguacgccgacuccuucgugauccgcggggacgagguccggcagaucgcccccggccagaccgggaagaucgccgacuacaacuacaagcugccggacgacuucacgggcugcgugaucgcguggaacagcaacaaccucgacuccaaggucgggggcaacuacaacuaccuguaccgccuguuccgcaagagcaaccucaagcccuucgagcgggacaucuccaccgagaucuaccaggccggcagcacccccugcaacgggguggagggcuucaacugcuacuucccccugcaguccuacggguuccagccgaccaacggcgugggguaccagcccuaccggguggucgugcugagcuucgagcuccugcacgcccccgccacggugugcggccccaagaaguccaccaaccuggucaagaacaagugcgugaacuucaacuucaacggccucaccgggaccggcgugcugaccgagagcaacaagaaguuccugccguuccagcaguucgggcgcgacaucgccgacacgaccgacgcgguccgcgacccccagacccuggagauccucgacaucacccccugcagcuucggcgggguguccgugaucacgccgggcaccaacaccagcaaccaggucgccgugcuguaccaggacgugaacugcaccgagguccccguggccauccacgccgaccagcugacgcccaccuggcggguguacuccaccggcagcaacgucuuccagacccgcgccgggugccucaucggcgcggagcacgugaacaacuccuacgagugcgacauccccaucggggccggcaucugcgccagcuaccagacgcagaccaacuccccgcggcgcgcccggagcguggcgucccagagcaucaucgccuacaccaugucccugggcgccgagaacagcgucgccuacuccaacaacagcaucgccaucugcaccaacuucacgaucuccgugaccaccgagauccugcccgugagcaugaccaagacgagcgucgacugcaccauguacaucugcggggacuccaccgagugcagcaaccuccugcugcaguacggcuccuucugcacccagcucaaccgcgcgcugacggggaucgccguggagcaggacaagaacacccaggagguguucgcccaggucaagcagaucuacaagacgcccccgaucaaggacuucggcggguucaacuucagccagauccugcccgaccccuccaagcccagcaagcgguccuucaucgaggaccuccuguucaacaaggugacccuggccgacgccggcuucaucaagcaguacggcgacugccucggggacaucgcggcccgcgaccugaucugcgcccagaaguucaacggccugaccgugcucccgccccugcugaccgacgagaugaucgcccaguacaccagcgcccuccuggcggggaccaucacguccggcuggaccuucggggccggcgccgcccugcagauccccuucgcgaugcagauggccuaccgguucaacggcaucggggucacccagaacgugcucuacgagaaccagaagcugaucgccaaccaguucaacagcgccaucggcaagauccaggacucccugagcuccaccgccagcgcgcucgggaagcugcaggacguggucaaccagaacgcccaggcccugaacacgcucgugaagcagcuguccagcaacuucggcgccaucuccagcgugcugaacgacauccucucccgccuggacaaggucgaggccgaggugcagaucgaccggcugaucaccgggcgccuccagagccugcagaccuacgugacccagcagcugauccgggcggccgagauccgcgccagcgccaaccucgccgcgaccaagauguccgagugcguccugggccagagcaagcggguggacuucugcggcaagggguaccaccugauguccuucccccagagcgccccgcacggcguggucuuccuccacgugacguacgucugcgcccaggagaagaacuucaccaccgcccccgcgaucugccacgacgggaaggcccacuucccccgcgagggcguguucguguccaacgggacccacugguucgucacgcagcggaacuucuacgagccgcagaucaucaccaccgacaacaccuucgugagcggcaacugcgacguggucaucggcaucgugaacaacacgguguacgacccccugcagcccgagcuggacucc

SEQ ID NO: 11840 - RNA, 3441 nt, Artificial Sequence
  SARS-CoV-2/Wuhan/WIV05/2019__EPI_ISL_402128 spike protein CDS gc (1-1147)(G889C_L1034C)
auguucguguuccugguccuccugccccuggugagcucccagugcgugaaccucaccacccgcacgcagcugccgcccgccuacaccaacagcuucacccggggcgucuacuaccccgacaagguguuccgcuccagcgugcugcacuccacccaggaccucuuccugcccuucuucagcaacgucacgugguuccacgccauccacguguccgggaccaacggcaccaagcgguucgacaacccggugcugcccuucaacgacggggucuacuucgcgagcaccgagaaguccaacaucauccgcggcuggaucuucgggacgacccucgacagcaagacccagucccugcugaucgugaacaacgccaccaacguggucaucaaggugugcgaguuccaguucugcaacgaccccuuccucggcguguacuaccacaagaacaacaagagcuggauggaguccgaguuccgggucuacagcuccgccaacaacugcacguucgaguacgugagccagcccuuccugauggaccuggagggcaagcaggggaacuucaagaaccuccgcgaguucguguucaagaacaucgacggcuacuucaagaucuacuccaagcacaccccgaucaaccugguccgggaccugccccagggguucagcgcccucgagccccugguggaccugcccaucggcaucaacaucacccgcuuccagacccuccuggcccugcaccgguccuaccucacgccgggggacagcagcuccggcuggaccgcgggcgccgccgccuacuacgugggguaccugcagccccgcaccuuccugcucaaguacaacgagaacggcaccaucacggacgcggucgacugcgcccuggacccccugagcgagaccaagugcacccucaaguccuucaccguggagaaggggaucuaccagacgagcaacuuccgggugcagcccaccgaguccaucguccgcuucccgaacaucaccaaccugugccccuucggcgagguguucaacgccacccgguucgccagcgucuacgccuggaaccgcaagcggaucuccaacugcguggcggacuacagcgugcuguacaacuccgccagcuucuccacguucaagugcuacggcgucagccccaccaagcucaacgaccugugcuucaccaacguguacgccgacuccuucgugauccgcggggacgagguccggcagaucgcccccggccagaccgggaagaucgccgacuacaacuacaagcugccggacgacuucacgggcugcgugaucgcguggaacagcaacaaccucgacuccaaggucgggggcaacuacaacuaccuguaccgccuguuccgcaagagcaaccucaagcccuucgagcgggacaucuccaccgagaucuaccaggccggcagcacccccugcaacgggguggagggcuucaacugcuacuucccccugcaguccuacggguuccagccgaccaacggcgugggguaccagcccuaccggguggucgugcugagcuucgagcuccugcacgcccccgccacggugugcggccccaagaaguccaccaaccuggucaagaacaagugcgugaacuucaacuucaacggccucaccgggaccggcgugcugaccgagagcaacaagaaguuccugccguuccagcaguucgggcgcgacaucgccgacacgaccgacgcgguccgcgacccccagacccuggagauccucgacaucacccccugcagcuucggcgggguguccgugaucacgccgggcaccaacaccagcaaccaggucgccgugcuguaccaggacgugaacugcaccgagguccccguggccauccacgccgaccagcugacgcccaccuggcggguguacuccaccggcagcaacgucuuccagacccgcgccgggugccucaucggcgcggagcacgugaacaacuccuacgagugcgacauccccaucggggccggcaucugcgccagcuaccagacgcagaccaacuccccgcggcgcgcccggagcguggcgucccagagcaucaucgccuacaccaugucccugggcgccgagaacagcgucgccuacuccaacaacagcaucgccauccccaccaacuucacgaucuccgugaccaccgagauccugcccgugagcaugaccaagacgagcgucgacugcaccauguacaucugcggggacuccaccgagugcagcaaccuccugcugcaguacggcuccuucugcacccagcucaaccgcgcgcugacggggaucgccguggagcaggacaagaacacccaggagguguucgcccaggucaagcagaucuacaagacgcccccgaucaaggacuucggcggguucaacuucagccagauccugcccgaccccuccaagcccagcaagcgguccuucaucgaggaccuccuguucaacaaggugacccuggccgacgccggcuucaucaagcaguacggcgacugccucggggacaucgcggcccgcgaccugaucugcgcccagaaguucaacggccugaccgugcucccgccccugcugaccgacgagaugaucgcccaguacaccagcgcccuccuggcggggaccaucacguccggcuggaccuucugcgccggcgccgcccugcagauccccuucgcgaugcagauggccuaccgguucaacggcaucggggucacccagaacgugcucuacgagaaccagaagcugaucgccaaccaguucaacagcgccaucggcaagauccaggacucccugagcuccaccgccagcgcgcucgggaagcugcaggacguggucaaccagaacgcccaggcccugaacacgcucgugaagcagcuguccagcaacuucggcgccaucuccagcgugcugaacgacauccucucccgccuggacaaggucgaggccgaggugcagaucgaccggcugaucaccgggcgccuccagagccugcagaccuacgugacccagcagcugauccgggcggccgagauccgcgccagcgccaaccucgccgcgaccaagauguccgagugcgucugcggccagagcaagcggguggacuucugcggcaagggguaccaccugauguccuucccccagagcgccccgcacggcguggucuuccuccacgugacguacguccccgcccaggagaagaacuucaccaccgcccccgcgaucugccacgacgggaaggcccacuucccccgcgagggcguguucguguccaacgggacccacugguucgucacgcagcggaacuucuacgagccgcagaucaucaccaccgacaacaccuucgugagcggcaacugcgacguggucaucggcaucgugaacaacacgguguacgacccccugcagcccgagcuggacucc

SEQ ID NO: 11841 - RNA, 3441 nt, Artificial Sequence
  SARS-CoV-2/Wuhan/WIV05/2019__EPI_ISL_402128 spike protein CDS gc (1-1147)(I909C_Y1047C)
auguucguguuccugguccuccugccccuggugagcucccagugcgugaaccucaccacccgcacgcagcugccgcccgccuacaccaacagcuucacccggggcgucuacuaccccgacaagguguuccgcuccagcgugcugcacuccacccaggaccucuuccugcccuucuucagcaacgucacgugguuccacgccauccacguguccgggaccaacggcaccaagcgguucgacaacccggugcugcccuucaacgacggggucuacuucgcgagcaccgagaaguccaacaucauccgcggcuggaucuucgggacgacccucgacagcaagacccagucccugcugaucgugaacaacgccaccaacguggucaucaaggugugcgaguuccaguucugcaacgaccccuuccucggcguguacuaccacaagaacaacaagagcuggauggaguccgaguuccgggucuacagcuccgccaacaacugcacguucgaguacgugagccagcccuuccugauggaccuggagggcaagcaggggaacuucaagaaccuccgcgaguucguguucaagaacaucgacggcuacuucaagaucuacuccaagcacaccccgaucaaccugguccgggaccugccccagggguucagcgcccucgagccccugguggaccugcccaucggcaucaacaucacccgcuuccagacccuccuggcccugcaccgguccuaccucacgccgggggacagcagcuccggcuggaccgcgggcgccgccgccuacuacgugggguaccugcagccccgcaccuuccugcucaaguacaacgagaacggcaccaucacggacgcggucgacugcgcccuggacccccugagcgagaccaagugcacccucaaguccuucaccguggagaaggggaucuaccagacgagcaacuuccgggugcagcccaccgaguccaucguccgcuucccgaacaucaccaaccugugccccuucggcgagguguucaacgccacccgguucgccagcgucuacgccuggaaccgcaagcggaucuccaacugcguggcggacuacagcgugcuguacaacuccgccagcuucuccacguucaagugcuacggcgucagccccaccaagcucaacgaccugugcuucaccaacguguacgccgacuccuucgugauccgcggggacgagguccggcagaucgcccccggccagaccgggaagaucgccgacuacaacuacaagcugccggacgacuucacgggcugcgugaucgcguggaacagcaacaaccucgacuccaaggucgggggcaacuacaacuaccuguaccgccuguuccgcaagagcaaccucaagcccuucgagcgggacaucuccaccgagaucuaccaggccggcagcacccccugcaacgggguggagggcuucaacugcuacuucccccugcaguccuacggguuccagccgaccaacggcgugggguaccagcccuaccggguggucgugcugagcuucgagcuccugcacgcccccgccacggugugcggccccaagaaguccaccaaccuggucaagaacaagugcgugaacuucaacuucaacggccucaccgggaccggcgugcugaccgagagcaacaagaaguuccugccguuccagcaguucgggcgcgacaucgccgacacgaccgacgcgguccgcgacccccagacccuggagauccucgacaucacccccugcagcuucggcgggguguccgugaucacgccgggcaccaacaccagcaaccaggucgccgugcuguaccaggacgugaacugcaccgagguccccguggccauccacgccgaccagcugacgcccaccuggcggguguacuccaccggcagcaacgucuuccagacccgcgccgggugccucaucggcgcggagcacgugaacaacuccuacgagugcgacauccccaucggggccggcaucugcgccagcuaccagacgcagaccaacuccccgcggcgcgcccggagcguggcgucccagagcaucaucgccuacaccaugucccugggcgccgagaacagcgucgccuacuccaacaacagcaucgccauccccaccaacuucacgaucuccgugaccaccgagauccugcccgugagcaugaccaagacgagcgucgacugcaccauguacaucugcggggacuccaccgagugcagcaaccuccugcugcaguacggcuccuucugcacccagcucaaccgcgcgcugacggggaucgccguggagcaggacaagaacacccaggagguguucgcccaggucaagcagaucuacaagacgcccccgaucaaggacuucggcggguucaacuucagccagauccugcccgaccccuccaagcccagcaagcgguccuucaucgaggaccuccuguucaacaaggugacccuggccgacgccggcuucaucaagcaguacggcgacugccucggggacaucgcggcccgcgaccugaucugcgcccagaaguucaacggccugaccgugcucccgccccugcugaccgacgagaugaucgcccaguacaccagcgcccuccuggcggggaccaucacguccggcuggaccuucggggccggcgccgcccugcagauccccuucgcgaugcagauggccuaccgguucaacggcugcggggucacccagaacgugcucuacgagaaccagaagcugaucgccaaccaguucaacagcgccaucggcaagauccaggacucccugagcuccaccgccagcgcgcucgggaagcugcaggacguggucaaccagaacgcccaggcccugaacacgcucgugaagcagcuguccagcaacuucggcgccaucuccagcgugcugaacgacauccucucccgccuggacaaggucgaggccgaggugcagaucgaccggcugaucaccgggcgccuccagagccugcagaccuacgugacccagcagcugauccgggcggccgagauccgcgccagcgccaaccucgccgcgaccaagauguccgagugcguccugggccagagcaagcggguggacuucugcggcaaggggugccaccugauguccuucccccagagcgccccgcacggcguggucuuccuccacgugacguacguccccgcccaggagaagaacuucaccaccgcccccgcgaucugccacgacgggaaggcccacuucccccgcgagggcguguucguguccaacgggacccacugguucgucacgcagcggaacuucuacgagccgcagaucaucaccaccgacaacaccuucgugagcggcaacugcgacguggucaucggcaucgugaacaacacgguguacgacccccugcagcccgagcuggacucc

SEQ ID NO: 11842 - RNA, 3441 nt, Artificial Sequence
  SARS-CoV-2/Wuhan/WIV05/2019__EPI_ISL_402128 spike protein CDS gc (1-1147)(Q965C_S1003C)
auguucguguuccugguccuccugccccuggugagcucccagugcgugaaccucaccacccgcacgcagcugccgcccgccuacaccaacagcuucacccggggcgucuacuaccccgacaagguguuccgcuccagcgugcugcacuccacccaggaccucuuccugcccuucuucagcaacgucacgugguuccacgccauccacguguccgggaccaacggcaccaagcgguucgacaacccggugcugcccuucaacgacggggucuacuucgcgagcaccgagaaguccaacaucauccgcggcuggaucuucgggacgacccucgacagcaagacccagucccugcugaucgugaacaacgccaccaacguggucaucaaggugugcgaguuccaguucugcaacgaccccuuccucggcguguacuaccacaagaacaacaagagcuggauggaguccgaguuccgggucuacagcuccgccaacaacugcacguucgaguacgugagccagcccuuccugauggaccuggagggcaagcaggggaacuucaagaaccuccgcgaguucguguucaagaacaucgacggcuacuucaagaucuacuccaagcacaccccgaucaaccugguccgggaccugccccagggguucagcgcccucgagccccugguggaccugcccaucggcaucaacaucacccgcuuccagacccuccuggcccugcaccgguccuaccucacgccgggggacagcagcuccggcuggaccgcgggcgccgccgccuacuacgugggguaccugcagccccgcaccuuccugcucaaguacaacgagaacggcaccaucacggacgcggucgacugcgcccuggacccccugagcgagaccaagugcacccucaaguccuucaccguggagaaggggaucuaccagacgagcaacuuccgggugcagcccaccgaguccaucguccgcuucccgaacaucaccaaccugugccccuucggcgagguguucaacgccacccgguucgccagcgucuacgccuggaaccgcaagcggaucuccaacugcguggcggacuacagcgugcuguacaacuccgccagcuucuccacguucaagugcuacggcgucagccccaccaagcucaacgaccugugcuucaccaacguguacgccgacuccuucgugauccgcggggacgagguccggcagaucgcccccggccagaccgggaagaucgccgacuacaacuacaagcugccggacgacuucacgggcugcgugaucgcguggaacagcaacaaccucgacuccaaggucgggggcaacuacaacuaccuguaccgccuguuccgcaagagcaaccucaagcccuucgagcgggacaucuccaccgagaucuaccaggccggcagcacccccugcaacgggguggagggcuucaacugcuacuucccccugcaguccuacggguuccagccgaccaacggcgugggguaccagcccuaccggguggucgugcugagcuucgagcuccugcacgcccccgccacggugugcggccccaagaaguccaccaaccuggucaagaacaagugcgugaacuucaacuucaacggccucaccgggaccggcgugcugaccgagagcaacaagaaguuccugccguuccagcaguucgggcgcgacaucgccgacacgaccgacgcgguccgcgacccccagacccuggagauccucgacaucacccccugcagcuucggcgggguguccgugaucacgccgggcaccaacaccagcaaccaggucgccgugcuguaccaggacgugaacugcaccgagguccccguggccauccacgccgaccagcugacgcccaccuggcggguguacuccaccggcagcaacgucuuccagacccgcgccgggugccucaucggcgcggagcacgugaacaacuccuacgagugcgacauccccaucggggccggcaucugcgccagcuaccagacgcagaccaacuccccgcggcgcgcccggagcguggcgucccagagcaucaucgccuacaccaugucccugggcgccgagaacagcgucgccuacuccaacaacagcaucgccauccccaccaacuucacgaucuccgugaccaccgagauccugcccgugagcaugaccaagacgagcgucgacugcaccauguacaucugcggggacuccaccgagugcagcaaccuccugcugcaguacggcuccuucugcacccagcucaaccgcgcgcugacggggaucgccguggagcaggacaagaacacccaggagguguucgcccaggucaagcagaucuacaagacgcccccgaucaaggacuucggcggguucaacuucagccagauccugcccgaccccuccaagcccagcaagcgguccuucaucgaggaccuccuguucaacaaggugacccuggccgacgccggcuucaucaagcaguacggcgacugccucggggacaucgcggcccgcgaccugaucugcgcccagaaguucaacggccugaccgugcucccgccccugcugaccgacgagaugaucgcccaguacaccagcgcccuccuggcggggaccaucacguccggcuggaccuucggggccggcgccgcccugcagauccccuucgcgaugcagauggccuaccgguucaacggcaucggggucacccagaacgugcucuacgagaaccagaagcugaucgccaaccaguucaacagcgccaucggcaagauccaggacucccugagcuccaccgccagcgcgcucgggaagcugcaggacguggucaaccagaacgcccaggcccugaacacgcucgugaagugccuguccagcaacuucggcgccaucuccagcgugcugaacgacauccucucccgccuggacaaggucgaggccgaggugcagaucgaccggcugaucaccgggcgccuccagugccugcagaccuacgugacccagcagcugauccgggcggccgagauccgcgccagcgccaaccucgccgcgaccaagauguccgagugcguccugggccagagcaagcggguggacuucugcggcaagggguaccaccugauguccuucccccagagcgccccgcacggcguggucuuccuccacgugacguacguccccgcccaggagaagaacuucaccaccgcccccgcgaucugccacgacgggaaggcccacuucccccgcgagggcguguucguguccaacgggacccacugguucgucacgcagcggaacuucuacgagccgcagaucaucaccaccgacaacaccuucgugagcggcaacugcgacguggucaucggcaucgugaacaacacgguguacgacccccugcagcccgagcuggacucc

SEQ ID NO: 11843 - RNA, 3441 nt, Artificial Sequence
  SARS-CoV-2/Wuhan/WIV05/2019__EPI_ISL_402128 spike protein CDS gc (1-1147)(F970C_G999C)
auguucguguuccugguccuccugccccuggugagcucccagugcgugaaccucaccacccgcacgcagcugccgcccgccuacaccaacagcuucacccggggcgucuacuaccccgacaagguguuccgcuccagcgugcugcacuccacccaggaccucuuccugcccuucuucagcaacgucacgugguuccacgccauccacguguccgggaccaacggcaccaagcgguucgacaacccggugcugcccuucaacgacggggucuacuucgcgagcaccgagaaguccaacaucauccgcggcuggaucuucgggacgacccucgacagcaagacccagucccugcugaucgugaacaacgccaccaacguggucaucaaggugugcgaguuccaguucugcaacgaccccuuccucggcguguacuaccacaagaacaacaagagcuggauggaguccgaguuccgggucuacagcuccgccaacaacugcacguucgaguacgugagccagcccuuccugauggaccuggagggcaagcaggggaacuucaagaaccuccgcgaguucguguucaagaacaucgacggcuacuucaagaucuacuccaagcacaccccgaucaaccugguccgggaccugccccagggguucagcgcccucgagccccugguggaccugcccaucggcaucaacaucacccgcuuccagacccuccuggcccugcaccgguccuaccucacgccgggggacagcagcuccggcuggaccgcgggcgccgccgccuacuacgugggguaccugcagccccgcaccuuccugcucaaguacaacgagaacggcaccaucacggacgcggucgacugcgcccuggacccccugagcgagaccaagugcacccucaaguccuucaccguggagaaggggaucuaccagacgagcaacuuccgggugcagcccaccgaguccaucguccgcuucccgaacaucaccaaccugugccccuucggcgagguguucaacgccacccgguucgccagcgucuacgccuggaaccgcaagcggaucuccaacugcguggcggacuacagcgugcuguacaacuccgccagcuucuccacguucaagugcuacggcgucagccccaccaagcucaacgaccugugcuucaccaacguguacgccgacuccuucgugauccgcggggacgagguccggcagaucgcccccggccagaccgggaagaucgccgacuacaacuacaagcugccggacgacuucacgggcugcgugaucgcguggaacagcaacaaccucgacuccaaggucgggggcaacuacaacuaccuguaccgccuguuccgcaagagcaaccucaagcccuucgagcgggacaucuccaccgagaucuaccaggccggcagcacccccugcaacgggguggagggcuucaacugcuacuucccccugcaguccuacggguuccagccgaccaacggcgugggguaccagcccuaccggguggucgugcugagcuucgagcuccugcacgcccccgccacggugugcggccccaagaaguccaccaaccuggucaagaacaagugcgugaacuucaacuucaacggccucaccgggaccggcgugcugaccgagagcaacaagaaguuccugccguuccagcaguucgggcgcgacaucgccgacacgaccgacgcgguccgcgacccccagacccuggagauccucgacaucacccccugcagcuucggcgggguguccgugaucacgccgggcaccaacaccagcaaccaggucgccgugcuguaccaggacgugaacugcaccgagguccccguggccauccacgccgaccagcugacgcccaccuggcggguguacuccaccggcagcaacgucuuccagacccgcgccgggugccucaucggcgcggagcacgugaacaacuccuacgagugcgacauccccaucggggccggcaucugcgccagcuaccagacgcagaccaacuccccgcggcgcgcccggagcguggcgucccagagcaucaucgccuacaccaugucccugggcgccgagaacagcgucgccuacuccaacaacagcaucgccauccccaccaacuucacgaucuccgugaccaccgagauccugcccgugagcaugaccaagacgagcgucgacugcaccauguacaucugcggggacuccaccgagugcagcaaccuccugcugcaguacggcuccuucugcacccagcucaaccgcgcgcugacggggaucgccguggagcaggacaagaacacccaggagguguucgcccaggucaagcagaucuacaagacgcccccgaucaaggacuucggcggguucaacuucagccagauccugcccgaccccuccaagcccagcaagcgguccuucaucgaggaccuccuguucaacaaggugacccuggccgacgccggcuucaucaagcaguacggcgacugccucggggacaucgcggcccgcgaccugaucugcgcccagaaguucaacggccugaccgugcucccgccccugcugaccgacgagaugaucgcccaguacaccagcgcccuccuggcggggaccaucacguccggcuggaccuucggggccggcgccgcccugcagauccccuucgcgaugcagauggccuaccgguucaacggcaucggggucacccagaacgugcucuacgagaaccagaagcugaucgccaaccaguucaacagcgccaucggcaagauccaggacucccugagcuccaccgccagcgcgcucgggaagcugcaggacguggucaaccagaacgcccaggcccugaacacgcucgugaagcagcuguccagcaacugcggcgccaucuccagcgugcugaacgacauccucucccgccuggacaaggucgaggccgaggugcagaucgaccggcugaucaccugucgccuccagagccugcagaccuacgugacccagcagcugauccgggcggccgagauccgcgccagcgccaaccucgccgcgaccaagauguccgagugcguccugggccagagcaagcggguggacuucugcggcaagggguaccaccugauguccuucccccagagcgccccgcacggcguggucuuccuccacgugacguacguccccgcccaggagaagaacuucaccaccgcccccgcgaucugccacgacgggaaggcccacuucccccgcgagggcguguucguguccaacgggacccacugguucgucacgcagcggaacuucuacgagccgcagaucaucaccaccgacaacaccuucgugagcggcaacugcgacguggucaucggcaucgugaacaacacgguguacgacccccugcagcccgagcuggacucc

SEQ ID NO: 11844 - RNA, 3441 nt, Artificial Sequence
  SARS-CoV-2/Wuhan/WIV05/2019__EPI_ISL_402128 spike protein CDS gc (1-1147)(A972C_R995C)
auguucguguuccugguccuccugccccuggugagcucccagugcgugaaccucaccacccgcacgcagcugccgcccgccuacaccaacagcuucacccggggcgucuacuaccccgacaagguguuccgcuccagcgugcugcacuccacccaggaccucuuccugcccuucuucagcaacgucacgugguuccacgccauccacguguccgggaccaacggcaccaagcgguucgacaacccggugcugcccuucaacgacggggucuacuucgcgagcaccgagaaguccaacaucauccgcggcuggaucuucgggacgacccucgacagcaagacccagucccugcugaucgugaacaacgccaccaacguggucaucaaggugugcgaguuccaguucugcaacgaccccuuccucggcguguacuaccacaagaacaacaagagcuggauggaguccgaguuccgggucuacagcuccgccaacaacugcacguucgaguacgugagccagcccuuccugauggaccuggagggcaagcaggggaacuucaagaaccuccgcgaguucguguucaagaacaucgacggcuacuucaagaucuacuccaagcacaccccgaucaaccugguccgggaccugccccagggguucagcgcccucgagccccugguggaccugcccaucggcaucaacaucacccgcuuccagacccuccuggcccugcaccgguccuaccucacgccgggggacagcagcuccggcuggaccgcgggcgccgccgccuacuacgugggguaccugcagccccgcaccuuccugcucaaguacaacgagaacggcaccaucacggacgcggucgacugcgcccuggacccccugagcgagaccaagugcacccucaaguccuucaccguggagaaggggaucuaccagacgagcaacuuccgggugcagcccaccgaguccaucguccgcuucccgaacaucaccaaccugugccccuucggcgagguguucaacgccacccgguucgccagcgucuacgccuggaaccgcaagcggaucuccaacugcguggcggacuacagcgugcuguacaacuccgccagcuucuccacguucaagugcuacggcgucagccccaccaagcucaacgaccugugcuucaccaacguguacgccgacuccuucgugauccgcggggacgagguccggcagaucgcccccggccagaccgggaagaucgccgacuacaacuacaagcugccggacgacuucacgggcugcgugaucgcguggaacagcaacaaccucgacuccaaggucgggggcaacuacaacuaccuguaccgccuguuccgcaagagcaaccucaagcccuucgagcgggacaucuccaccgagaucuaccaggccggcagcacccccugcaacgggguggagggcuucaacugcuacuucccccugcaguccuacggguuccagccgaccaacggcgugggguaccagcccuaccggguggucgugcugagcuucgagcuccugcacgcccccgccacggugugcggccccaagaaguccaccaaccuggucaagaacaagugcgugaacuucaacuucaacggccucaccgggaccggcgugcugaccgagagcaacaagaaguuccugccguuccagcaguucgggcgcgacaucgccgacacgaccgacgcgguccgcgacccccagacccuggagauccucgacaucacccccugcagcuucggcgggguguccgugaucacgccgggcaccaacaccagcaaccaggucgccgugcuguaccaggacgugaacugcaccgagguccccguggccauccacgccgaccagcugacgcccaccuggcggguguacuccaccggcagcaacgucuuccagacccgcgccgggugccucaucggcgcggagcacgugaacaacuccuacgagugcgacauccccaucggggccggcaucugcgccagcuaccagacgcagaccaacuccccgcggcgcgcccggagcguggcgucccagagcaucaucgccuacaccaugucccugggcgccgagaacagcgucgccuacuccaacaacagcaucgccauccccaccaacuucacgaucuccgugaccaccgagauccugcccgugagcaugaccaagacgagcgucgacugcaccauguacaucugcggggacuccaccgagugcagcaaccuccugcugcaguacggcuccuucugcacccagcucaaccgcgcgcugacggggaucgccguggagcaggacaagaacacccaggagguguucgcccaggucaagcagaucuacaagacgcccccgaucaaggacuucggcggguucaacuucagccagauccugcccgaccccuccaagcccagcaagcgguccuucaucgaggaccuccuguucaacaaggugacccuggccgacgccggcuucaucaagcaguacggcgacugccucggggacaucgcggcccgcgaccugaucugcgcccagaaguucaacggccugaccgugcucccgccccugcugaccgacgagaugaucgcccaguacaccagcgcccuccuggcggggaccaucacguccggcuggaccuucggggccggcgccgcccugcagauccccuucgcgaugcagauggccuaccgguucaacggcaucggggucacccagaacgugcucuacgagaaccagaagcugaucgccaaccaguucaacagcgccaucggcaagauccaggacucccugagcuccaccgccagcgcgcucgggaagcugcaggacguggucaaccagaacgcccaggcccugaacacgcucgugaagcagcuguccagcaacuucggcugcaucuccagcgugcugaacgacauccucucccgccuggacaaggucgaggccgaggugcagaucgacugccugaucaccgggcgccuccagagccugcagaccuacgugacccagcagcugauccgggcggccgagauccgcgccagcgccaaccucgccgcgaccaagauguccgagugcguccugggccagagcaagcggguggacuucugcggcaagggguaccaccugauguccuucccccagagcgccccgcacggcguggucuuccuccacgugacguacguccccgcccaggagaagaacuucaccaccgcccccgcgaucugccacgacgggaaggcccacuucccccgcgagggcguguucguguccaacgggacccacugguucgucacgcagcggaacuucuacgagccgcagaucaucaccaccgacaacaccuucgugagcggcaacugcgacguggucaucggcaucgugaacaacacgguguacgacccccugcagcccgagcuggacucc

SEQ ID NO: 11845 - RNA, 3441 nt, Artificial Sequence
  SARS-CoV-2/Wuhan/WIV05/2019__EPI_ISL_402128 spike protein CDS gc (1-1147)(A890C_V1040C)
auguucguguuccugguccuccugccccuggugagcucccagugcgugaaccucaccacccgcacgcagcugccgcccgccuacaccaacagcuucacccggggcgucuacuaccccgacaagguguuccgcuccagcgugcugcacuccacccaggaccucuuccugcccuucuucagcaacgucacgugguuccacgccauccacguguccgggaccaacggcaccaagcgguucgacaacccggugcugcccuucaacgacggggucuacuucgcgagcaccgagaaguccaacaucauccgcggcuggaucuucgggacgacccucgacagcaagacccagucccugcugaucgugaacaacgccaccaacguggucaucaaggugugcgaguuccaguucugcaacgaccccuuccucggcguguacuaccacaagaacaacaagagcuggauggaguccgaguuccgggucuacagcuccgccaacaacugcacguucgaguacgugagccagcccuuccugauggaccuggagggcaagcaggggaacuucaagaaccuccgcgaguucguguucaagaacaucgacggcuacuucaagaucuacuccaagcacaccccgaucaaccugguccgggaccugccccagggguucagcgcccucgagccccugguggaccugcccaucggcaucaacaucacccgcuuccagacccuccuggcccugcaccgguccuaccucacgccgggggacagcagcuccggcuggaccgcgggcgccgccgccuacuacgugggguaccugcagccccgcaccuuccugcucaaguacaacgagaacggcaccaucacggacgcggucgacugcgcccuggacccccugagcgagaccaagugcacccucaaguccuucaccguggagaaggggaucuaccagacgagcaacuuccgggugcagcccaccgaguccaucguccgcuucccgaacaucaccaaccugugccccuucggcgagguguucaacgccacccgguucgccagcgucuacgccuggaaccgcaagcggaucuccaacugcguggcggacuacagcgugcuguacaacuccgccagcuucuccacguucaagugcuacggcgucagccccaccaagcucaacgaccugugcuucaccaacguguacgccgacuccuucgugauccgcggggacgagguccggcagaucgcccccggccagaccgggaagaucgccgacuacaacuacaagcugccggacgacuucacgggcugcgugaucgcguggaacagcaacaaccucgacuccaaggucgggggcaacuacaacuaccuguaccgccuguuccgcaagagcaaccucaagcccuucgagcgggacaucuccaccgagaucuaccaggccggcagcacccccugcaacgggguggagggcuucaacugcuacuucccccugcaguccuacggguuccagccgaccaacggcgugggguaccagcccuaccggguggucgugcugagcuucgagcuccugcacgcccccgccacggugugcggccccaagaaguccaccaaccuggucaagaacaagugcgugaacuucaacuucaacggccucaccgggaccggcgugcugaccgagagcaacaagaaguuccugccguuccagcaguucgggcgcgacaucgccgacacgaccgacgcgguccgcgacccccagacccuggagauccucgacaucacccccugcagcuucggcgggguguccgugaucacgccgggcaccaacaccagcaaccaggucgccgugcuguaccaggacgugaacugcaccgagguccccguggccauccacgccgaccagcugacgcccaccuggcggguguacuccaccggcagcaacgucuuccagacccgcgccgggugccucaucggcgcggagcacgugaacaacuccuacgagugcgacauccccaucggggccggcaucugcgccagcuaccagacgcagaccaacuccccgcggcgcgcccggagcguggcgucccagagcaucaucgccuacaccaugucccugggcgccgagaacagcgucgccuacuccaacaacagcaucgccauccccaccaacuucacgaucuccgugaccaccgagauccugcccgugagcaugaccaagacgagcgucgacugcaccauguacaucugcggggacuccaccgagugcagcaaccuccugcugcaguacggcuccuucugcacccagcucaaccgcgcgcugacggggaucgccguggagcaggacaagaacacccaggagguguucgcccaggucaagcagaucuacaagacgcccccgaucaaggacuucggcggguucaacuucagccagauccugcccgaccccuccaagcccagcaagcgguccuucaucgaggaccuccuguucaacaaggugacccuggccgacgccggcuucaucaagcaguacggcgacugccucggggacaucgcggcccgcgaccugaucugcgcccagaaguucaacggccugaccgugcucccgccccugcugaccgacgagaugaucgcccaguacaccagcgcccuccuggcggggaccaucacguccggcuggaccuucgggugcggcgccgcccugcagauccccuucgcgaugcagauggccuaccgguucaacggcaucggggucacccagaacgugcucuacgagaaccagaagcugaucgccaaccaguucaacagcgccaucggcaagauccaggacucccugagcuccaccgccagcgcgcucgggaagcugcaggacguggucaaccagaacgcccaggcccugaacacgcucgugaagcagcuguccagcaacuucggcgccaucuccagcgugcugaacgacauccucucccgccuggacaaggucgaggccgaggugcagaucgaccggcugaucaccgggcgccuccagagccugcagaccuacgugacccagcagcugauccgggcggccgagauccgcgccagcgccaaccucgccgcgaccaagauguccgagugcguccugggccagagcaagcggugcgacuucugcggcaagggguaccaccugauguccuucccccagagcgccccgcacggcguggucuuccuccacgugacguacguccccgcccaggagaagaacuucaccaccgcccccgcgaucugccacgacgggaaggcccacuucccccgcgagggcguguucguguccaacgggacccacugguucgucacgcagcggaacuucuacgagccgcagaucaucaccaccgacaacaccuucgugagcggcaacugcgacguggucaucggcaucgugaacaacacgguguacgacccccugcagcccgagcuggacucc

SEQ ID NO: 11846 - RNA, 3441 nt, Artificial Sequence
  SARS-CoV-2/Wuhan/WIV05/2019__EPI_ISL_402128 spike protein CDS gc (1-1147)(T874C_S1055C)
auguucguguuccugguccuccugccccuggugagcucccagugcgugaaccucaccacccgcacgcagcugccgcccgccuacaccaacagcuucacccggggcgucuacuaccccgacaagguguuccgcuccagcgugcugcacuccacccaggaccucuuccugcccuucuucagcaacgucacgugguuccacgccauccacguguccgggaccaacggcaccaagcgguucgacaacccggugcugcccuucaacgacggggucuacuucgcgagcaccgagaaguccaacaucauccgcggcuggaucuucgggacgacccucgacagcaagacccagucccugcugaucgugaacaacgccaccaacguggucaucaaggugugcgaguuccaguucugcaacgaccccuuccucggcguguacuaccacaagaacaacaagagcuggauggaguccgaguuccgggucuacagcuccgccaacaacugcacguucgaguacgugagccagcccuuccugauggaccuggagggcaagcaggggaacuucaagaaccuccgcgaguucguguucaagaacaucgacggcuacuucaagaucuacuccaagcacaccccgaucaaccugguccgggaccugccccagggguucagcgcccucgagccccugguggaccugcccaucggcaucaacaucacccgcuuccagacccuccuggcccugcaccgguccuaccucacgccgggggacagcagcuccggcuggaccgcgggcgccgccgccuacuacgugggguaccugcagccccgcaccuuccugcucaaguacaacgagaacggcaccaucacggacgcggucgacugcgcccuggacccccugagcgagaccaagugcacccucaaguccuucaccguggagaaggggaucuaccagacgagcaacuuccgggugcagcccaccgaguccaucguccgcuucccgaacaucaccaaccugugccccuucggcgagguguucaacgccacccgguucgccagcgucuacgccuggaaccgcaagcggaucuccaacugcguggcggacuacagcgugcuguacaacuccgccagcuucuccacguucaagugcuacggcgucagccccaccaagcucaacgaccugugcuucaccaacguguacgccgacuccuucgugauccgcggggacgagguccggcagaucgcccccggccagaccgggaagaucgccgacuacaacuacaagcugccggacgacuucacgggcugcgugaucgcguggaacagcaacaaccucgacuccaaggucgggggcaacuacaacuaccuguaccgccuguuccgcaagagcaaccucaagcccuucgagcgggacaucuccaccgagaucuaccaggccggcagcacccccugcaacgggguggagggcuucaacugcuacuucccccugcaguccuacggguuccagccgaccaacggcgugggguaccagcccuaccggguggucgugcugagcuucgagcuccugcacgcccccgccacggugugcggccccaagaaguccaccaaccuggucaagaacaagugcgugaacuucaacuucaacggccucaccgggaccggcgugcugaccgagagcaacaagaaguuccugccguuccagcaguucgggcgcgacaucgccgacacgaccgacgcgguccgcgacccccagacccuggagauccucgacaucacccccugcagcuucggcgggguguccgugaucacgccgggcaccaacaccagcaaccaggucgccgugcuguaccaggacgugaacugcaccgagguccccguggccauccacgccgaccagcugacgcccaccuggcggguguacuccaccggcagcaacgucuuccagacccgcgccgggugccucaucggcgcggagcacgugaacaacuccuacgagugcgacauccccaucggggccggcaucugcgccagcuaccagacgcagaccaacuccccgcggcgcgcccggagcguggcgucccagagcaucaucgccuacaccaugucccugggcgccgagaacagcgucgccuacuccaacaacagcaucgccauccccaccaacuucacgaucuccgugaccaccgagauccugcccgugagcaugaccaagacgagcgucgacugcaccauguacaucugcggggacuccaccgagugcagcaaccuccugcugcaguacggcuccuucugcacccagcucaaccgcgcgcugacggggaucgccguggagcaggacaagaacacccaggagguguucgcccaggucaagcagaucuacaagacgcccccgaucaaggacuucggcggguucaacuucagccagauccugcccgaccccuccaagcccagcaagcgguccuucaucgaggaccuccuguucaacaaggugacccuggccgacgccggcuucaucaagcaguacggcgacugccucggggacaucgcggcccgcgaccugaucugcgcccagaaguucaacggccugaccgugcucccgccccugcugaccgacgagaugaucgcccaguacugcagcgcccuccuggcggggaccaucacguccggcuggaccuucggggccggcgccgcccugcagauccccuucgcgaugcagauggccuaccgguucaacggcaucggggucacccagaacgugcucuacgagaaccagaagcugaucgccaaccaguucaacagcgccaucggcaagauccaggacucccugagcuccaccgccagcgcgcucgggaagcugcaggacguggucaaccagaacgcccaggcccugaacacgcucgugaagcagcuguccagcaacuucggcgccaucuccagcgugcugaacgacauccucucccgccuggacaaggucgaggccgaggugcagaucgaccggcugaucaccgggcgccuccagagccugcagaccuacgugacccagcagcugauccgggcggccgagauccgcgccagcgccaaccucgccgcgaccaagauguccgagugcguccugggccagagcaagcggguggacuucugcggcaagggguaccaccugauguccuucccccagugcgccccgcacggcguggucuuccuccacgugacguacguccccgcccaggagaagaacuucaccaccgcccccgcgaucugccacgacgggaaggcccacuucccccgcgagggcguguucguguccaacgggacccacugguucgucacgcagcggaacuucuacgagccgcagaucaucaccaccgacaacaccuucgugagcggcaacugcgacguggucaucggcaucgugaacaacacgguguacgacccccugcagcccgagcuggacucc

SEQ ID NO: 11847 - RNA, 4116 nt, Artificial Sequence
  SARS-CoV-2/Wuhan/WIV05/2019__EPI_ISL_402128 spike protein CDS gc (1-1211) LumSynth construct
auguucguguuccugguccuccugccccuggugagcucccagugcgugaaccucaccacccgcacgcagcugccgcccgccuacaccaacagcuucacccggggcgucuacuaccccgacaagguguuccgcuccagcgugcugcacuccacccaggaccucuuccugcccuucuucagcaacgucacgugguuccacgccauccacguguccgggaccaacggcaccaagcgguucgacaacccggugcugcccuucaacgacggggucuacuucgcgagcaccgagaaguccaacaucauccgcggcuggaucuucgggacgacccucgacagcaagacccagucccugcugaucgugaacaacgccaccaacguggucaucaaggugugcgaguuccaguucugcaacgaccccuuccucggcguguacuaccacaagaacaacaagagcuggauggaguccgaguuccgggucuacagcuccgccaacaacugcacguucgaguacgugagccagcccuuccugauggaccuggagggcaagcaggggaacuucaagaaccuccgcgaguucguguucaagaacaucgacggcuacuucaagaucuacuccaagcacaccccgaucaaccugguccgggaccugccccagggguucagcgcccucgagccccugguggaccugcccaucggcaucaacaucacccgcuuccagacccuccuggcccugcaccgguccuaccucacgccgggggacagcagcuccggcuggaccgcgggcgccgccgccuacuacgugggguaccugcagccccgcaccuuccugcucaaguacaacgagaacggcaccaucacggacgcggucgacugcgcccuggacccccugagcgagaccaagugcacccucaaguccuucaccguggagaaggggaucuaccagacgagcaacuuccgggugcagcccaccgaguccaucguccgcuucccgaacaucaccaaccugugccccuucggcgagguguucaacgccacccgguucgccagcgucuacgccuggaaccgcaagcggaucuccaacugcguggcggacuacagcgugcuguacaacuccgccagcuucuccacguucaagugcuacggcgucagccccaccaagcucaacgaccugugcuucaccaacguguacgccgacuccuucgugauccgcggggacgagguccggcagaucgcccccggccagaccgggaagaucgccgacuacaacuacaagcugccggacgacuucacgggcugcgugaucgcguggaacagcaacaaccucgacuccaaggucgggggcaacuacaacuaccuguaccgccuguuccgcaagagcaaccucaagcccuucgagcgggacaucuccaccgagaucuaccaggccggcagcacccccugcaacgggguggagggcuucaacugcuacuucccccugcaguccuacggguuccagccgaccaacggcgugggguaccagcccuaccggguggucgugcugagcuucgagcuccugcacgcccccgccacggugugcggccccaagaaguccaccaaccuggucaagaacaagugcgugaacuucaacuucaacggccucaccgggaccggcgugcugaccgagagcaacaagaaguuccugccguuccagcaguucgggcgcgacaucgccgacacgaccgacgcgguccgcgacccccagacccuggagauccucgacaucacccccugcagcuucggcgggguguccgugaucacgccgggcaccaacaccagcaaccaggucgccgugcuguaccaggacgugaacugcaccgagguccccguggccauccacgccgaccagcugacgcccaccuggcggguguacuccaccggcagcaacgucuuccagacccgcgccgggugccucaucggcgcggagcacgugaacaacuccuacgagugcgacauccccaucggggccggcaucugcgccagcuaccagacgcagaccaacuccccgcggcgcgcccggagcguggcgucccagagcaucaucgccuacaccaugucccugggcgccgagaacagcgucgccuacuccaacaacagcaucgccauccccaccaacuucacgaucuccgugaccaccgagauccugcccgugagcaugaccaagacgagcgucgacugcaccauguacaucugcggggacuccaccgagugcagcaaccuccugcugcaguacggcuccuucugcacccagcucaaccgcgcgcugacggggaucgccguggagcaggacaagaacacccaggagguguucgcccaggucaagcagaucuacaagacgcccccgaucaaggacuucggcggguucaacuucagccagauccugcccgaccccuccaagcccagcaagcgguccuucaucgaggaccuccuguucaacaaggugacccuggccgacgccggcuucaucaagcaguacggcgacugccucggggacaucgcggcccgcgaccugaucugcgcccagaaguucaacggccugaccgugcucccgccccugcugaccgacgagaugaucgcccaguacaccagcgcccuccuggcggggaccaucacguccggcuggaccuucggggccggcgccgcccugcagauccccuucgcgaugcagauggccuaccgguucaacggcaucggggucacccagaacgugcucuacgagaaccagaagcugaucgccaaccaguucaacagcgccaucggcaagauccaggacucccugagcuccaccgccagcgcgcucgggaagcugcaggacguggucaaccagaacgcccaggcccugaacacgcucgugaagcagcuguccagcaacuucggcgccaucuccagcgugcugaacgacauccucucccgccuggacaaggucgaggccgaggugcagaucgaccggcugaucaccgggcgccuccagagccugcagaccuacgugacccagcagcugauccgggcggccgagauccgcgccagcgccaaccucgccgcgaccaagauguccgagugcguccugggccagagcaagcggguggacuucugcggcaagggguaccaccugauguccuucccccagagcgccccgcacggcguggucuuccuccacgugacguacguccccgcccaggagaagaacuucaccaccgcccccgcgaucugccacgacgggaaggcccacuucccccgcgagggcguguucguguccaacgggacccacugguucgucacgcagcggaacuucuacgagccgcagaucaucaccaccgacaacaccuucgugagcggcaacugcgacguggucaucggcaucgugaacaacacgguguacgacccccugcagcccgagcuggacuccuucaaggaggagcucgacaaguacuucaagaaccacaccagccccgacgucgaccugggggacaucuccggcaucaacgccagcguggugaacauccagaaggagaucgaccgccugaacgaggucgccaagaaccucaacgagucccugaucgaccugcaggagcucgggaaguacgagcaguacaucaagggcggcgggagcgggggcgggcagaucuacgagggcaagcugaccgccgaggggcuccgcuucggcaucguggccagccgguucaaccacgcgcuggucgaccgccugguggagggggccaucgacgccaucgugcggcacggcgggcgcgaggaggacaucacccucguccgggugcccggcuccugggagaucccgguggccgccggcgagcuggcccgcaaggaggacaucgacgcggucaucgccaucggggugcugauccggggcgccacgccccacuucgacuacaucgccagcgagguguccaaggggcucgcggaccugagccuggagcuccgcaagcccaucaccuucggcgucaucaccgccgacacccuggagcaggccaucgagcgggccgggacgaagcacggcaacaagggcugggaggccgcgcuguccgccaucgagauggccaaccucuucaagagccugcgcuga

SEQ ID NO: 11848 - RNA, 4116 nt, Artificial Sequence
  SARS-CoV-2/Wuhan/WIV05/2019__EPI_ISL_402128 spike protein CDS gc (1-1211)(K986P_V987P) LumSynth construct
auguucguguuccugguccuccugccccuggugagcucccagugcgugaaccucaccacccgcacgcagcugccgcccgccuacaccaacagcuucacccggggcgucuacuaccccgacaagguguuccgcuccagcgugcugcacuccacccaggaccucuuccugcccuucuucagcaacgucacgugguuccacgccauccacguguccgggaccaacggcaccaagcgguucgacaacccggugcugcccuucaacgacggggucuacuucgcgagcaccgagaaguccaacaucauccgcggcuggaucuucgggacgacccucgacagcaagacccagucccugcugaucgugaacaacgccaccaacguggucaucaaggugugcgaguuccaguucugcaacgaccccuuccucggcguguacuaccacaagaacaacaagagcuggauggaguccgaguuccgggucuacagcuccgccaacaacugcacguucgaguacgugagccagcccuuccugauggaccuggagggcaagcaggggaacuucaagaaccuccgcgaguucguguucaagaacaucgacggcuacuucaagaucuacuccaagcacaccccgaucaaccugguccgggaccugccccagggguucagcgcccucgagccccugguggaccugcccaucggcaucaacaucacccgcuuccagacccuccuggcccugcaccgguccuaccucacgccgggggacagcagcuccggcuggaccgcgggcgccgccgccuacuacgugggguaccugcagccccgcaccuuccugcucaaguacaacgagaacggcaccaucacggacgcggucgacugcgcccuggacccccugagcgagaccaagugcacccucaaguccuucaccguggagaaggggaucuaccagacgagcaacuuccgggugcagcccaccgaguccaucguccgcuucccgaacaucaccaaccugugccccuucggcgagguguucaacgccacccgguucgccagcgucuacgccuggaaccgcaagcggaucuccaacugcguggcggacuacagcgugcuguacaacuccgccagcuucuccacguucaagugcuacggcgucagccccaccaagcucaacgaccugugcuucaccaacguguacgccgacuccuucgugauccgcggggacgagguccggcagaucgcccccggccagaccgggaagaucgccgacuacaacuacaagcugccggacgacuucacgggcugcgugaucgcguggaacagcaacaaccucgacuccaaggucgggggcaacuacaacuaccuguaccgccuguuccgcaagagcaaccucaagcccuucgagcgggacaucuccaccgagaucuaccaggccggcagcacccccugcaacgggguggagggcuucaacugcuacuucccccugcaguccuacggguuccagccgaccaacggcgugggguaccagcccuaccggguggucgugcugagcuucgagcuccugcacgcccccgccacggugugcggccccaagaaguccaccaaccuggucaagaacaagugcgugaacuucaacuucaacggccucaccgggaccggcgugcugaccgagagcaacaagaaguuccugccguuccagcaguucgggcgcgacaucgccgacacgaccgacgcgguccgcgacccccagacccuggagauccucgacaucacccccugcagcuucggcgggguguccgugaucacgccgggcaccaacaccagcaaccaggucgccgugcuguaccaggacgugaacugcaccgagguccccguggccauccacgccgaccagcugacgcccaccuggcggguguacuccaccggcagcaacgucuuccagacccgcgccgggugccucaucggcgcggagcacgugaacaacuccuacgagugcgacauccccaucggggccggcaucugcgccagcuaccagacgcagaccaacuccccgcggcgcgcccggagcguggcgucccagagcaucaucgccuacaccaugucccugggcgccgagaacagcgucgccuacuccaacaacagcaucgccauccccaccaacuucacgaucuccgugaccaccgagauccugcccgugagcaugaccaagacgagcgucgacugcaccauguacaucugcggggacuccaccgagugcagcaaccuccugcugcaguacggcuccuucugcacccagcucaaccgcgcgcugacggggaucgccguggagcaggacaagaacacccaggagguguucgcccaggucaagcagaucuacaagacgcccccgaucaaggacuucggcggguucaacuucagccagauccugcccgaccccuccaagcccagcaagcgguccuucaucgaggaccuccuguucaacaaggugacccuggccgacgccggcuucaucaagcaguacggcgacugccucggggacaucgcggcccgcgaccugaucugcgcccagaaguucaacggccugaccgugcucccgccccugcugaccgacgagaugaucgcccaguacaccagcgcccuccuggcggggaccaucacguccggcuggaccuucggggccggcgccgcccugcagauccccuucgcgaugcagauggccuaccgguucaacggcaucggggucacccagaacgugcucuacgagaaccagaagcugaucgccaaccaguucaacagcgccaucggcaagauccaggacucccugagcuccaccgccagcgcgcucgggaagcugcaggacguggucaaccagaacgcccaggcccugaacacgcucgugaagcagcuguccagcaacuucggcgccaucuccagcgugcugaacgacauccucucccgccuggacccgcccgaggccgaggugcagaucgaccggcugaucaccgggcgccuccagagccugcagaccuacgugacccagcagcugauccgggcggccgagauccgcgccagcgccaaccucgccgcgaccaagauguccgagugcguccugggccagagcaagcggguggacuucugcggcaagggguaccaccugauguccuucccccagagcgccccgcacggcguggucuuccuccacgugacguacguccccgcccaggagaagaacuucaccaccgcccccgcgaucugccacgacgggaaggcccacuucccccgcgagggcguguucguguccaacgggacccacugguucgucacgcagcggaacuucuacgagccgcagaucaucaccaccgacaacaccuucgugagcggcaacugcgacguggucaucggcaucgugaacaacacgguguacgacccccugcagcccgagcuggacuccuucaaggaggagcucgacaaguacuucaagaaccacaccagccccgacgucgaccugggggacaucuccggcaucaacgccagcguggugaacauccagaaggagaucgaccgccugaacgaggucgccaagaaccucaacgagucccugaucgaccugcaggagcucgggaaguacgagcaguacaucaagggcggcgggagcgggggcgggcagaucuacgagggcaagcugaccgccgaggggcuccgcuucggcaucguggccagccgguucaaccacgcgcuggucgaccgccugguggagggggccaucgacgccaucgugcggcacggcgggcgcgaggaggacaucacccucguccgggugcccggcuccugggagaucccgguggccgccggcgagcuggcccgcaaggaggacaucgacgcggucaucgccaucggggugcugauccggggcgccacgccccacuucgacuacaucgccagcgagguguccaaggggcucgcggaccugagccuggagcuccgcaagcccaucaccuucggcgucaucaccgccgacacccuggagcaggccaucgagcgggccgggacgaagcacggcaacaagggcugggaggccgcgcuguccgccaucgagauggccaaccucuucaagagccugcgcuga

SEQ ID NO: 11849 - RNA, 4116 nt, Artificial Sequence
  SARS-CoV-2/Wuhan/WIV05/2019__EPI_ISL_402128 spike protein CDS gc (1-1211)(K986P_V987P_T887WN_A1020W) LumSynth construct
auguucguguuccugguccuccugccccuggugagcucccagugcgugaaccucaccacccgcacgcagcugccgcccgccuacaccaacagcuucacccggggcgucuacuaccccgacaagguguuccgcuccagcgugcugcacuccacccaggaccucuuccugcccuucuucagcaacgucacgugguuccacgccauccacguguccgggaccaacggcaccaagcgguucgacaacccggugcugcccuucaacgacggggucuacuucgcgagcaccgagaaguccaacaucauccgcggcuggaucuucgggacgacccucgacagcaagacccagucccugcugaucgugaacaacgccaccaacguggucaucaaggugugcgaguuccaguucugcaacgaccccuuccucggcguguacuaccacaagaacaacaagagcuggauggaguccgaguuccgggucuacagcuccgccaacaacugcacguucgaguacgugagccagcccuuccugauggaccuggagggcaagcaggggaacuucaagaaccuccgcgaguucguguucaagaacaucgacggcuacuucaagaucuacuccaagcacaccccgaucaaccugguccgggaccugccccagggguucagcgcccucgagccccugguggaccugcccaucggcaucaacaucacccgcuuccagacccuccuggcccugcaccgguccuaccucacgccgggggacagcagcuccggcuggaccgcgggcgccgccgccuacuacgugggguaccugcagccccgcaccuuccugcucaaguacaacgagaacggcaccaucacggacgcggucgacugcgcccuggacccccugagcgagaccaagugcacccucaaguccuucaccguggagaaggggaucuaccagacgagcaacuuccgggugcagcccaccgaguccaucguccgcuucccgaacaucaccaaccugugccccuucggcgagguguucaacgccacccgguucgccagcgucuacgccuggaaccgcaagcggaucuccaacugcguggcggacuacagcgugcuguacaacuccgccagcuucuccacguucaagugcuacggcgucagccccaccaagcucaacgaccugugcuucaccaacguguacgccgacuccuucgugauccgcggggacgagguccggcagaucgcccccggccagaccgggaagaucgccgacuacaacuacaagcugccggacgacuucacgggcugcgugaucgcguggaacagcaacaaccucgacuccaaggucgggggcaacuacaacuaccuguaccgccuguuccgcaagagcaaccucaagcccuucgagcgggacaucuccaccgagaucuaccaggccggcagcacccccugcaacgggguggagggcuucaacugcuacuucccccugcaguccuacggguuccagccgaccaacggcgugggguaccagcccuaccggguggucgugcugagcuucgagcuccugcacgcccccgccacggugugcggccccaagaaguccaccaaccuggucaagaacaagugcgugaacuucaacuucaacggccucaccgggaccggcgugcugaccgagagcaacaagaaguuccugccguuccagcaguucgggcgcgacaucgccgacacgaccgacgcgguccgcgacccccagacccuggagauccucgacaucacccccugcagcuucggcgggguguccgugaucacgccgggcaccaacaccagcaaccaggucgccgugcuguaccaggacgugaacugcaccgagguccccguggccauccacgccgaccagcugacgcccaccuggcggguguacuccaccggcagcaacgucuuccagacccgcgccgggugccucaucggcgcggagcacgugaacaacuccuacgagugcgacauccccaucggggccggcaucugcgccagcuaccagacgcagaccaacuccccgcggcgcgcccggagcguggcgucccagagcaucaucgccuacaccaugucccugggcgccgagaacagcgucgccuacuccaacaacagcaucgccauccccaccaacuucacgaucuccgugaccaccgagauccugcccgugagcaugaccaagacgagcgucgacugcaccauguacaucugcggggacuccaccgagugcagcaaccuccugcugcaguacggcuccuucugcacccagcucaaccgcgcgcugacggggaucgccguggagcaggacaagaacacccaggagguguucgcccaggucaagcagaucuacaagacgcccccgaucaaggacuucggcggguucaacuucagccagauccugcccgaccccuccaagcccagcaagcgguccuucaucgaggaccuccuguucaacaaggugacccuggccgacgccggcuucaucaagcaguacggcgacugccucggggacaucgcggcccgcgaccugaucugcgcccagaaguucaacggccugaccgugcucccgccccugcugaccgacgagaugaucgcccaguacaccagcgcccuccuggcggggaccaucacguccggcuggugguucggggccggcgccgcccugcagauccccuucgcgaugcagauggccuaccgguucaacggcaucggggucacccagaacgugcucuacgagaaccagaagcugaucgccaaccaguucaacagcgccaucggcaagauccaggacucccugagcuccaccgccagcgcgcucgggaagcugcaggacguggucaaccagaacgcccaggcccugaacacgcucgugaagcagcuguccagcaacuucggcgccaucuccagcgugcugaacgacauccucucccgccuggacccgcccgaggccgaggugcagaucgaccggcugaucaccgggcgccuccagagccugcagaccuacgugacccagcagcugauccgggcggccgagauccgcuggagcgccaaccucgccgcgaccaagauguccgagugcguccugggccagagcaagcggguggacuucugcggcaagggguaccaccugauguccuucccccagagcgccccgcacggcguggucuuccuccacgugacguacguccccgcccaggagaagaacuucaccaccgcccccgcgaucugccacgacgggaaggcccacuucccccgcgagggcguguucguguccaacgggacccacugguucgucacgcagcggaacuucuacgagccgcagaucaucaccaccgacaacaccuucgugagcggcaacugcgacguggucaucggcaucgugaacaacacgguguacgacccccugcagcccgagcuggacuccuucaaggaggagcucgacaaguacuucaagaaccacaccagccccgacgucgaccugggggacaucuccggcaucaacgccagcguggugaacauccagaaggagaucgaccgccugaacgaggucgccaagaaccucaacgagucccugaucgaccugcaggagcucgggaaguacgagcaguacaucaagggcggcgggagcgggggcgggcagaucuacgagggcaagcugaccgccgaggggcuccgcuucggcaucguggccagccgguucaaccacgcgcuggucgaccgccugguggagggggccaucgacgccaucgugcggcacggcgggcgcgaggaggacaucacccucguccgggugcccggcuccugggagaucccgguggccgccggcgagcuggcccgcaaggaggacaucgacgcggucaucgccaucggggugcugauccggggcgccacgccccacuucgacuacaucgccagcgagguguccaaggggcucgcggaccugagccuggagcuccgcaagcccaucaccuucggcgucaucaccgccgacacccuggagcaggccaucgagcgggccgggacgaagcacggcaacaagggcugggaggccgcgcuguccgccaucgagauggccaaccucuucaagagccugcgcuga

SEQ ID NO: 11850 - RNA, 4116 nt, Artificial Sequence
  SARS-CoV-2/Wuhan/WIV05/2019__EPI_ISL_402128 spike protein CDS gc (1-1211)(K986P_V987P_P1069F) LumSynth construct
auguucguguuccugguccuccugccccuggugagcucccagugcgugaaccucaccacccgcacgcagcugccgcccgccuacaccaacagcuucacccggggcgucuacuaccccgacaagguguuccgcuccagcgugcugcacuccacccaggaccucuuccugcccuucuucagcaacgucacgugguuccacgccauccacguguccgggaccaacggcaccaagcgguucgacaacccggugcugcccuucaacgacggggucuacuucgcgagcaccgagaaguccaacaucauccgcggcuggaucuucgggacgacccucgacagcaagacccagucccugcugaucgugaacaacgccaccaacguggucaucaaggugugcgaguuccaguucugcaacgaccccuuccucggcguguacuaccacaagaacaacaagagcuggauggaguccgaguuccgggucuacagcuccgccaacaacugcacguucgaguacgugagccagcccuuccugauggaccuggagggcaagcaggggaacuucaagaaccuccgcgaguucguguucaagaacaucgacggcuacuucaagaucuacuccaagcacaccccgaucaaccugguccgggaccugccccagggguucagcgcccucgagccccugguggaccugcccaucggcaucaacaucacccgcuuccagacccuccuggcccugcaccgguccuaccucacgccgggggacagcagcuccggcuggaccgcgggcgccgccgccuacuacgugggguaccugcagccccgcaccuuccugcucaaguacaacgagaacggcaccaucacggacgcggucgacugcgcccuggacccccugagcgagaccaagugcacccucaaguccuucaccguggagaaggggaucuaccagacgagcaacuuccgggugcagcccaccgaguccaucguccgcuucccgaacaucaccaaccugugccccuucggcgagguguucaacgccacccgguucgccagcgucuacgccuggaaccgcaagcggaucuccaacugcguggcggacuacagcgugcuguacaacuccgccagcuucuccacguucaagugcuacggcgucagccccaccaagcucaacgaccugugcuucaccaacguguacgccgacuccuucgugauccgcggggacgagguccggcagaucgcccccggccagaccgggaagaucgccgacuacaacuacaagcugccggacgacuucacgggcugcgugaucgcguggaacagcaacaaccucgacuccaaggucgggggcaacuacaacuaccuguaccgccuguuccgcaagagcaaccucaagcccuucgagcgggacaucuccaccgagaucuaccaggccggcagcacccccugcaacgggguggagggcuucaacugcuacuucccccugcaguccuacggguuccagccgaccaacggcgugggguaccagcccuaccggguggucgugcugagcuucgagcuccugcacgcccccgccacggugugcggccccaagaaguccaccaaccuggucaagaacaagugcgugaacuucaacuucaacggccucaccgggaccggcgugcugaccgagagcaacaagaaguuccugccguuccagcaguucgggcgcgacaucgccgacacgaccgacgcgguccgcgacccccagacccuggagauccucgacaucacccccugcagcuucggcgggguguccgugaucacgccgggcaccaacaccagcaaccaggucgccgugcuguaccaggacgugaacugcaccgagguccccguggccauccacgccgaccagcugacgcccaccuggcggguguacuccaccggcagcaacgucuuccagacccgcgccgggugccucaucggcgcggagcacgugaacaacuccuacgagugcgacauccccaucggggccggcaucugcgccagcuaccagacgcagaccaacuccccgcggcgcgcccggagcguggcgucccagagcaucaucgccuacaccaugucccugggcgccgagaacagcgucgccuacuccaacaacagcaucgccauccccaccaacuucacgaucuccgugaccaccgagauccugcccgugagcaugaccaagacgagcgucgacugcaccauguacaucugcggggacuccaccgagugcagcaaccuccugcugcaguacggcuccuucugcacccagcucaaccgcgcgcugacggggaucgccguggagcaggacaagaacacccaggagguguucgcccaggucaagcagaucuacaagacgcccccgaucaaggacuucggcggguucaacuucagccagauccugcccgaccccuccaagcccagcaagcgguccuucaucgaggaccuccuguucaacaaggugacccuggccgacgccggcuucaucaagcaguacggcgacugccucggggacaucgcggcccgcgaccugaucugcgcccagaaguucaacggccugaccgugcucccgccccugcugaccgacgagaugaucgcccaguacaccagcgcccuccuggcggggaccaucacguccggcuggaccuucggggccggcgccgcccugcagauccccuucgcgaugcagauggccuaccgguucaacggcaucggggucacccagaacgugcucuacgagaaccagaagcugaucgccaaccaguucaacagcgccaucggcaagauccaggacucccugagcuccaccgccagcgcgcucgggaagcugcaggacguggucaaccagaacgcccaggcccugaacacgcucgugaagcagcuguccagcaacuucggcgccaucuccagcgugcugaacgacauccucucccgccuggacccgcccgaggccgaggugcagaucgaccggcugaucaccgggcgccuccagagccugcagaccuacgugacccagcagcugauccgggcggccgagauccgcgccagcgccaaccucgccgcgaccaagauguccgagugcguccugggccagagcaagcggguggacuucugcggcaagggguaccaccugauguccuucccccagagcgccccgcacggcguggucuuccuccacgugacguacgucuucgcccaggagaagaacuucaccaccgcccccgcgaucugccacgacgggaaggcccacuucccccgcgagggcguguucguguccaacgggacccacugguucgucacgcagcggaacuucuacgagccgcagaucaucaccaccgacaacaccuucgugagcggcaacugcgacguggucaucggcaucgugaacaacacgguguacgacccccugcagcccgagcuggacuccuucaaggaggagcucgacaaguacuucaagaaccacaccagccccgacgucgaccugggggacaucuccggcaucaacgccagcguggugaacauccagaaggagaucgaccgccugaacgaggucgccaagaaccucaacgagucccugaucgaccugcaggagcucgggaaguacgagcaguacaucaagggcggcgggagcgggggcgggcagaucuacgagggcaagcugaccgccgaggggcuccgcuucggcaucguggccagccgguucaaccacgcgcuggucgaccgccugguggagggggccaucgacgccaucgugcggcacggcgggcgcgaggaggacaucacccucguccgggugcccggcuccugggagaucccgguggccgccggcgagcuggcccgcaaggaggacaucgacgcggucaucgccaucggggugcugauccggggcgccacgccccacuucgacuacaucgccagcgagguguccaaggggcucgcggaccugagccuggagcuccgcaagcccaucaccuucggcgucaucaccgccgacacccuggagcaggccaucgagcgggccgggacgaagcacggcaacaagggcugggaggccgcgcuguccgccaucgagauggccaaccucuucaagagccugcgcuga

SEQ ID NO: 11851 - RNA, 4116 nt, Artificial Sequence
  SARS-CoV-2/Wuhan/WIV05/2019__EPI_ISL_402128 spike protein CDS gc (1-1211)(K986P_V987P_ H1048Q_H1064N_ H1083N_H1101N) LumSynth construct
auguucguguuccugguccuccugccccuggugagcucccagugcgugaaccucaccacccgcacgcagcugccgcccgccuacaccaacagcuucacccggggcgucuacuaccccgacaagguguuccgcuccagcgugcugcacuccacccaggaccucuuccugcccuucuucagcaacgucacgugguuccacgccauccacguguccgggaccaacggcaccaagcgguucgacaacccggugcugcccuucaacgacggggucuacuucgcgagcaccgagaaguccaacaucauccgcggcuggaucuucgggacgacccucgacagcaagacccagucccugcugaucgugaacaacgccaccaacguggucaucaaggugugcgaguuccaguucugcaacgaccccuuccucggcguguacuaccacaagaacaacaagagcuggauggaguccgaguuccgggucuacagcuccgccaacaacugcacguucgaguacgugagccagcccuuccugauggaccuggagggcaagcaggggaacuucaagaaccuccgcgaguucguguucaagaacaucgacggcuacuucaagaucuacuccaagcacaccccgaucaaccugguccgggaccugccccagggguucagcgcccucgagccccugguggaccugcccaucggcaucaacaucacccgcuuccagacccuccuggcccugcaccgguccuaccucacgccgggggacagcagcuccggcuggaccgcgggcgccgccgccuacuacgugggguaccugcagccccgcaccuuccugcucaaguacaacgagaacggcaccaucacggacgcggucgacugcgcccuggacccccugagcgagaccaagugcacccucaaguccuucaccguggagaaggggaucuaccagacgagcaacuuccgggugcagcccaccgaguccaucguccgcuucccgaacaucaccaaccugugccccuucggcgagguguucaacgccacccgguucgccagcgucuacgccuggaaccgcaagcggaucuccaacugcguggcggacuacagcgugcuguacaacuccgccagcuucuccacguucaagugcuacggcgucagccccaccaagcucaacgaccugugcuucaccaacguguacgccgacuccuucgugauccgcggggacgagguccggcagaucgcccccggccagaccgggaagaucgccgacuacaacuacaagcugccggacgacuucacgggcugcgugaucgcguggaacagcaacaaccucgacuccaaggucgggggcaacuacaacuaccuguaccgccuguuccgcaagagcaaccucaagcccuucgagcgggacaucuccaccgagaucuaccaggccggcagcacccccugcaacgggguggagggcuucaacugcuacuucccccugcaguccuacggguuccagccgaccaacggcgugggguaccagcccuaccggguggucgugcugagcuucgagcuccugcacgcccccgccacggugugcggccccaagaaguccaccaaccuggucaagaacaagugcgugaacuucaacuucaacggccucaccgggaccggcgugcugaccgagagcaacaagaaguuccugccguuccagcaguucgggcgcgacaucgccgacacgaccgacgcgguccgcgacccccagacccuggagauccucgacaucacccccugcagcuucggcgggguguccgugaucacgccgggcaccaacaccagcaaccaggucgccgugcuguaccaggacgugaacugcaccgagguccccguggccauccacgccgaccagcugacgcccaccuggcggguguacuccaccggcagcaacgucuuccagacccgcgccgggugccucaucggcgcggagcacgugaacaacuccuacgagugcgacauccccaucggggccggcaucugcgccagcuaccagacgcagaccaacuccccgcggcgcgcccggagcguggcgucccagagcaucaucgccuacaccaugucccugggcgccgagaacagcgucgccuacuccaacaacagcaucgccauccccaccaacuucacgaucuccgugaccaccgagauccugcccgugagcaugaccaagacgagcgucgacugcaccauguacaucugcggggacuccaccgagugcagcaaccuccugcugcaguacggcuccuucugcacccagcucaaccgcgcgcugacggggaucgccguggagcaggacaagaacacccaggagguguucgcccaggucaagcagaucuacaagacgcccccgaucaaggacuucggcggguucaacuucagccagauccugcccgaccccuccaagcccagcaagcgguccuucaucgaggaccuccuguucaacaaggugacccuggccgacgccggcuucaucaagcaguacggcgacugccucggggacaucgcggcccgcgaccugaucugcgcccagaaguucaacggccugaccgugcucccgccccugcugaccgacgagaugaucgcccaguacaccagcgcccuccuggcggggaccaucacguccggcuggaccuucggggccggcgccgcccugcagauccccuucgcgaugcagauggccuaccgguucaacggcaucggggucacccagaacgugcucuacgagaaccagaagcugaucgccaaccaguucaacagcgccaucggcaagauccaggacucccugagcuccaccgccagcgcgcucgggaagcugcaggacguggucaaccagaacgcccaggcccugaacacgcucgugaagcagcuguccagcaacuucggcgccaucuccagcgugcugaacgacauccucucccgccuggacccgcccgaggccgaggugcagaucgaccggcugaucaccgggcgccuccagagccugcagaccuacgugacccagcagcugauccgggcggccgagauccgcgccagcgccaaccucgccgcgaccaagauguccgagugcguccugggccagagcaagcggguggacuucugcggcaagggguaccagcugauguccuucccccagagcgccccgcacggcguggucuuccucaacgugacguacguccccgcccaggagaagaacuucaccaccgcccccgcgaucugcaacgacgggaaggcccacuucccccgcgagggcguguucguguccaacgggaccaacugguucgucacgcagcggaacuucuacgagccgcagaucaucaccaccgacaacaccuucgugagcggcaacugcgacguggucaucggcaucgugaacaacacgguguacgacccccugcagcccgagcuggacuccuucaaggaggagcucgacaaguacuucaagaaccacaccagccccgacgucgaccugggggacaucuccggcaucaacgccagcguggugaacauccagaaggagaucgaccgccugaacgaggucgccaagaaccucaacgagucccugaucgaccugcaggagcucgggaaguacgagcaguacaucaagggcggcgggagcgggggcgggcagaucuacgagggcaagcugaccgccgaggggcuccgcuucggcaucguggccagccgguucaaccacgcgcuggucgaccgccugguggagggggccaucgacgccaucgugcggcacggcgggcgcgaggaggacaucacccucguccgggugcccggcuccugggagaucccgguggccgccggcgagcuggcccgcaaggaggacaucgacgcggucaucgccaucggggugcugauccggggcgccacgccccacuucgacuacaucgccagcgagguguccaaggggcucgcggaccugagccuggagcuccgcaagcccaucaccuucggcgucaucaccgccgacacccuggagcaggccaucgagcgggccgggacgaagcacggcaacaagggcugggaggccgcgcuguccgccaucgagauggccaaccucuucaagagccugcgcuga

SEQ ID NO: 11852 - RNA, 4116 nt, Artificial Sequence
  SARS-CoV-2/Wuhan/WIV05/2019__EPI_ISL_402128 spike protein CDS gc (1-1211)(I712C_T1077C) LumSynth construct
auguucguguuccugguccuccugccccuggugagcucccagugcgugaaccucaccacccgcacgcagcugccgcccgccuacaccaacagcuucacccggggcgucuacuaccccgacaagguguuccgcuccagcgugcugcacuccacccaggaccucuuccugcccuucuucagcaacgucacgugguuccacgccauccacguguccgggaccaacggcaccaagcgguucgacaacccggugcugcccuucaacgacggggucuacuucgcgagcaccgagaaguccaacaucauccgcggcuggaucuucgggacgacccucgacagcaagacccagucccugcugaucgugaacaacgccaccaacguggucaucaaggugugcgaguuccaguucugcaacgaccccuuccucggcguguacuaccacaagaacaacaagagcuggauggaguccgaguuccgggucuacagcuccgccaacaacugcacguucgaguacgugagccagcccuuccugauggaccuggagggcaagcaggggaacuucaagaaccuccgcgaguucguguucaagaacaucgacggcuacuucaagaucuacuccaagcacaccccgaucaaccugguccgggaccugccccagggguucagcgcccucgagccccugguggaccugcccaucggcaucaacaucacccgcuuccagacccuccuggcccugcaccgguccuaccucacgccgggggacagcagcuccggcuggaccgcgggcgccgccgccuacuacgugggguaccugcagccccgcaccuuccugcucaaguacaacgagaacggcaccaucacggacgcggucgacugcgcccuggacccccugagcgagaccaagugcacccucaaguccuucaccguggagaaggggaucuaccagacgagcaacuuccgggugcagcccaccgaguccaucguccgcuucccgaacaucaccaaccugugccccuucggcgagguguucaacgccacccgguucgccagcgucuacgccuggaaccgcaagcggaucuccaacugcguggcggacuacagcgugcuguacaacuccgccagcuucuccacguucaagugcuacggcgucagccccaccaagcucaacgaccugugcuucaccaacguguacgccgacuccuucgugauccgcggggacgagguccggcagaucgcccccggccagaccgggaagaucgccgacuacaacuacaagcugccggacgacuucacgggcugcgugaucgcguggaacagcaacaaccucgacuccaaggucgggggcaacuacaacuaccuguaccgccuguuccgcaagagcaaccucaagcccuucgagcgggacaucuccaccgagaucuaccaggccggcagcacccccugcaacgggguggagggcuucaacugcuacuucccccugcaguccuacggguuccagccgaccaacggcgugggguaccagcccuaccggguggucgugcugagcuucgagcuccugcacgcccccgccacggugugcggccccaagaaguccaccaaccuggucaagaacaagugcgugaacuucaacuucaacggccucaccgggaccggcgugcugaccgagagcaacaagaaguuccugccguuccagcaguucgggcgcgacaucgccgacacgaccgacgcgguccgcgacccccagacccuggagauccucgacaucacccccugcagcuucggcgggguguccgugaucacgccgggcaccaacaccagcaaccaggucgccgugcuguaccaggacgugaacugcaccgagguccccguggccauccacgccgaccagcugacgcccaccuggcggguguacuccaccggcagcaacgucuuccagacccgcgccgggugccucaucggcgcggagcacgugaacaacuccuacgagugcgacauccccaucggggccggcaucugcgccagcuaccagacgcagaccaacuccccgcggcgcgcccggagcguggcgucccagagcaucaucgccuacaccaugucccugggcgccgagaacagcgucgccuacuccaacaacagcugcgccauccccaccaacuucacgaucuccgugaccaccgagauccugcccgugagcaugaccaagacgagcgucgacugcaccauguacaucugcggggacuccaccgagugcagcaaccuccugcugcaguacggcuccuucugcacccagcucaaccgcgcgcugacggggaucgccguggagcaggacaagaacacccaggagguguucgcccaggucaagcagaucuacaagacgcccccgaucaaggacuucggcggguucaacuucagccagauccugcccgaccccuccaagcccagcaagcgguccuucaucgaggaccuccuguucaacaaggugacccuggccgacgccggcuucaucaagcaguacggcgacugccucggggacaucgcggcccgcgaccugaucugcgcccagaaguucaacggccugaccgugcucccgccccugcugaccgacgagaugaucgcccaguacaccagcgcccuccuggcggggaccaucacguccggcuggaccuucggggccggcgccgcccugcagauccccuucgcgaugcagauggccuaccgguucaacggcaucggggucacccagaacgugcucuacgagaaccagaagcugaucgccaaccaguucaacagcgccaucggcaagauccaggacucccugagcuccaccgccagcgcgcucgggaagcugcaggacguggucaaccagaacgcccaggcccugaacacgcucgugaagcagcuguccagcaacuucggcgccaucuccagcgugcugaacgacauccucucccgccuggacaaggucgaggccgaggugcagaucgaccggcugaucaccgggcgccuccagagccugcagaccuacgugacccagcagcugauccgggcggccgagauccgcgccagcgccaaccucgccgcgaccaagauguccgagugcguccugggccagagcaagcggguggacuucugcggcaagggguaccaccugauguccuucccccagagcgccccgcacggcguggucuuccuccacgugacguacguccccgcccaggagaagaacuucaccugcgcccccgcgaucugccacgacgggaaggcccacuucccccgcgagggcguguucguguccaacgggacccacugguucgucacgcagcggaacuucuacgagccgcagaucaucaccaccgacaacaccuucgugagcggcaacugcgacguggucaucggcaucgugaacaacacgguguacgacccccugcagcccgagcuggacuccuucaaggaggagcucgacaaguacuucaagaaccacaccagccccgacgucgaccugggggacaucuccggcaucaacgccagcguggugaacauccagaaggagaucgaccgccugaacgaggucgccaagaaccucaacgagucccugaucgaccugcaggagcucgggaaguacgagcaguacaucaagggcggcgggagcgggggcgggcagaucuacgagggcaagcugaccgccgaggggcuccgcuucggcaucguggccagccgguucaaccacgcgcuggucgaccgccugguggagggggccaucgacgccaucgugcggcacggcgggcgcgaggaggacaucacccucguccgggugcccggcuccugggagaucccgguggccgccggcgagcuggcccgcaaggaggacaucgacgcggucaucgccaucggggugcugauccggggcgccacgccccacuucgacuacaucgccagcgagguguccaaggggcucgcggaccugagccuggagcuccgcaagcccaucaccuucggcgucaucaccgccgacacccuggagcaggccaucgagcgggccgggacgaagcacggcaacaagggcugggaggccgcgcuguccgccaucgagauggccaaccucuucaagagccugcgcuga

SEQ ID NO: 11853 - RNA, 4116 nt, Artificial Sequence
  SARS-CoV-2/Wuhan/WIV05/2019__EPI_ISL_402128 spike protein CDS gc (1-1211)(I714C_Y1110C) LumSynth construct
auguucguguuccugguccuccugccccuggugagcucccagugcgugaaccucaccacccgcacgcagcugccgcccgccuacaccaacagcuucacccggggcgucuacuaccccgacaagguguuccgcuccagcgugcugcacuccacccaggaccucuuccugcccuucuucagcaacgucacgugguuccacgccauccacguguccgggaccaacggcaccaagcgguucgacaacccggugcugcccuucaacgacggggucuacuucgcgagcaccgagaaguccaacaucauccgcggcuggaucuucgggacgacccucgacagcaagacccagucccugcugaucgugaacaacgccaccaacguggucaucaaggugugcgaguuccaguucugcaacgaccccuuccucggcguguacuaccacaagaacaacaagagcuggauggaguccgaguuccgggucuacagcuccgccaacaacugcacguucgaguacgugagccagcccuuccugauggaccuggagggcaagcaggggaacuucaagaaccuccgcgaguucguguucaagaacaucgacggcuacuucaagaucuacuccaagcacaccccgaucaaccugguccgggaccugccccagggguucagcgcccucgagccccugguggaccugcccaucggcaucaacaucacccgcuuccagacccuccuggcccugcaccgguccuaccucacgccgggggacagcagcuccggcuggaccgcgggcgccgccgccuacuacgugggguaccugcagccccgcaccuuccugcucaaguacaacgagaacggcaccaucacggacgcggucgacugcgcccuggacccccugagcgagaccaagugcacccucaaguccuucaccguggagaaggggaucuaccagacgagcaacuuccgggugcagcccaccgaguccaucguccgcuucccgaacaucaccaaccugugccccuucggcgagguguucaacgccacccgguucgccagcgucuacgccuggaaccgcaagcggaucuccaacugcguggcggacuacagcgugcuguacaacuccgccagcuucuccacguucaagugcuacggcgucagccccaccaagcucaacgaccugugcuucaccaacguguacgccgacuccuucgugauccgcggggacgagguccggcagaucgcccccggccagaccgggaagaucgccgacuacaacuacaagcugccggacgacuucacgggcugcgugaucgcguggaacagcaacaaccucgacuccaaggucgggggcaacuacaacuaccuguaccgccuguuccgcaagagcaaccucaagcccuucgagcgggacaucuccaccgagaucuaccaggccggcagcacccccugcaacgggguggagggcuucaacugcuacuucccccugcaguccuacggguuccagccgaccaacggcgugggguaccagcccuaccggguggucgugcugagcuucgagcuccugcacgcccccgccacggugugcggccccaagaaguccaccaaccuggucaagaacaagugcgugaacuucaacuucaacggccucaccgggaccggcgugcugaccgagagcaacaagaaguuccugccguuccagcaguucgggcgcgacaucgccgacacgaccgacgcgguccgcgacccccagacccuggagauccucgacaucacccccugcagcuucggcgggguguccgugaucacgccgggcaccaacaccagcaaccaggucgccgugcuguaccaggacgugaacugcaccgagguccccguggccauccacgccgaccagcugacgcccaccuggcggguguacuccaccggcagcaacgucuuccagacccgcgccgggugccucaucggcgcggagcacgugaacaacuccuacgagugcgacauccccaucggggccggcaucugcgccagcuaccagacgcagaccaacuccccgcggcgcgcccggagcguggcgucccagagcaucaucgccuacaccaugucccugggcgccgagaacagcgucgccuacuccaacaacagcaucgccugccccaccaacuucacgaucuccgugaccaccgagauccugcccgugagcaugaccaagacgagcgucgacugcaccauguacaucugcggggacuccaccgagugcagcaaccuccugcugcaguacggcuccuucugcacccagcucaaccgcgcgcugacggggaucgccguggagcaggacaagaacacccaggagguguucgcccaggucaagcagaucuacaagacgcccccgaucaaggacuucggcggguucaacuucagccagauccugcccgaccccuccaagcccagcaagcgguccuucaucgaggaccuccuguucaacaaggugacccuggccgacgccggcuucaucaagcaguacggcgacugccucggggacaucgcggcccgcgaccugaucugcgcccagaaguucaacggccugaccgugcucccgccccugcugaccgacgagaugaucgcccaguacaccagcgcccuccuggcggggaccaucacguccggcuggaccuucggggccggcgccgcccugcagauccccuucgcgaugcagauggccuaccgguucaacggcaucggggucacccagaacgugcucuacgagaaccagaagcugaucgccaaccaguucaacagcgccaucggcaagauccaggacucccugagcuccaccgccagcgcgcucgggaagcugcaggacguggucaaccagaacgcccaggcccugaacacgcucgugaagcagcuguccagcaacuucggcgccaucuccagcgugcugaacgacauccucucccgccuggacaaggucgaggccgaggugcagaucgaccggcugaucaccgggcgccuccagagccugcagaccuacgugacccagcagcugauccgggcggccgagauccgcgccagcgccaaccucgccgcgaccaagauguccgagugcguccugggccagagcaagcggguggacuucugcggcaagggguaccaccugauguccuucccccagagcgccccgcacggcguggucuuccuccacgugacguacguccccgcccaggagaagaacuucaccaccgcccccgcgaucugccacgacgggaaggcccacuucccccgcgagggcguguucguguccaacgggacccacugguucgucacgcagcggaacuucugcgagccgcagaucaucaccaccgacaacaccuucgugagcggcaacugcgacguggucaucggcaucgugaacaacacgguguacgacccccugcagcccgagcuggacuccuucaaggaggagcucgacaaguacuucaagaaccacaccagccccgacgucgaccugggggacaucuccggcaucaacgccagcguggugaacauccagaaggagaucgaccgccugaacgaggucgccaagaaccucaacgagucccugaucgaccugcaggagcucgggaaguacgagcaguacaucaagggcggcgggagcgggggcgggcagaucuacgagggcaagcugaccgccgaggggcuccgcuucggcaucguggccagccgguucaaccacgcgcuggucgaccgccugguggagggggccaucgacgccaucgugcggcacggcgggcgcgaggaggacaucacccucguccgggugcccggcuccugggagaucccgguggccgccggcgagcuggcccgcaaggaggacaucgacgcggucaucgccaucggggugcugauccggggcgccacgccccacuucgacuacaucgccagcgagguguccaaggggcucgcggaccugagccuggagcuccgcaagcccaucaccuucggcgucaucaccgccgacacccuggagcaggccaucgagcgggccgggacgaagcacggcaacaagggcugggaggccgcgcuguccgccaucgagauggccaaccucuucaagagccugcgcuga

SEQ ID NO: 11854 - RNA, 4116 nt, Artificial Sequence
  SARS-CoV-2/Wuhan/WIV05/2019__EPI_ISL_402128 spike protein CDS gc (1-1211)(P715C_P1069C) LumSynth construct
auguucguguuccugguccuccugccccuggugagcucccagugcgugaaccucaccacccgcacgcagcugccgcccgccuacaccaacagcuucacccggggcgucuacuaccccgacaagguguuccgcuccagcgugcugcacuccacccaggaccucuuccugcccuucuucagcaacgucacgugguuccacgccauccacguguccgggaccaacggcaccaagcgguucgacaacccggugcugcccuucaacgacggggucuacuucgcgagcaccgagaaguccaacaucauccgcggcuggaucuucgggacgacccucgacagcaagacccagucccugcugaucgugaacaacgccaccaacguggucaucaaggugugcgaguuccaguucugcaacgaccccuuccucggcguguacuaccacaagaacaacaagagcuggauggaguccgaguuccgggucuacagcuccgccaacaacugcacguucgaguacgugagccagcccuuccugauggaccuggagggcaagcaggggaacuucaagaaccuccgcgaguucguguucaagaacaucgacggcuacuucaagaucuacuccaagcacaccccgaucaaccugguccgggaccugccccagggguucagcgcccucgagccccugguggaccugcccaucggcaucaacaucacccgcuuccagacccuccuggcccugcaccgguccuaccucacgccgggggacagcagcuccggcuggaccgcgggcgccgccgccuacuacgugggguaccugcagccccgcaccuuccugcucaaguacaacgagaacggcaccaucacggacgcggucgacugcgcccuggacccccugagcgagaccaagugcacccucaaguccuucaccguggagaaggggaucuaccagacgagcaacuuccgggugcagcccaccgaguccaucguccgcuucccgaacaucaccaaccugugccccuucggcgagguguucaacgccacccgguucgccagcgucuacgccuggaaccgcaagcggaucuccaacugcguggcggacuacagcgugcuguacaacuccgccagcuucuccacguucaagugcuacggcgucagccccaccaagcucaacgaccugugcuucaccaacguguacgccgacuccuucgugauccgcggggacgagguccggcagaucgcccccggccagaccgggaagaucgccgacuacaacuacaagcugccggacgacuucacgggcugcgugaucgcguggaacagcaacaaccucgacuccaaggucgggggcaacuacaacuaccuguaccgccuguuccgcaagagcaaccucaagcccuucgagcgggacaucuccaccgagaucuaccaggccggcagcacccccugcaacgggguggagggcuucaacugcuacuucccccugcaguccuacggguuccagccgaccaacggcgugggguaccagcccuaccggguggucgugcugagcuucgagcuccugcacgcccccgccacggugugcggccccaagaaguccaccaaccuggucaagaacaagugcgugaacuucaacuucaacggccucaccgggaccggcgugcugaccgagagcaacaagaaguuccugccguuccagcaguucgggcgcgacaucgccgacacgaccgacgcgguccgcgacccccagacccuggagauccucgacaucacccccugcagcuucggcgggguguccgugaucacgccgggcaccaacaccagcaaccaggucgccgugcuguaccaggacgugaacugcaccgagguccccguggccauccacgccgaccagcugacgcccaccuggcggguguacuccaccggcagcaacgucuuccagacccgcgccgggugccucaucggcgcggagcacgugaacaacuccuacgagugcgacauccccaucggggccggcaucugcgccagcuaccagacgcagaccaacuccccgcggcgcgcccggagcguggcgucccagagcaucaucgccuacaccaugucccugggcgccgagaacagcgucgccuacuccaacaacagcaucgccaucugcaccaacuucacgaucuccgugaccaccgagauccugcccgugagcaugaccaagacgagcgucgacugcaccauguacaucugcggggacuccaccgagugcagcaaccuccugcugcaguacggcuccuucugcacccagcucaaccgcgcgcugacggggaucgccguggagcaggacaagaacacccaggagguguucgcccaggucaagcagaucuacaagacgcccccgaucaaggacuucggcggguucaacuucagccagauccugcccgaccccuccaagcccagcaagcgguccuucaucgaggaccuccuguucaacaaggugacccuggccgacgccggcuucaucaagcaguacggcgacugccucggggacaucgcggcccgcgaccugaucugcgcccagaaguucaacggccugaccgugcucccgccccugcugaccgacgagaugaucgcccaguacaccagcgcccuccuggcggggaccaucacguccggcuggaccuucggggccggcgccgcccugcagauccccuucgcgaugcagauggccuaccgguucaacggcaucggggucacccagaacgugcucuacgagaaccagaagcugaucgccaaccaguucaacagcgccaucggcaagauccaggacucccugagcuccaccgccagcgcgcucgggaagcugcaggacguggucaaccagaacgcccaggcccugaacacgcucgugaagcagcuguccagcaacuucggcgccaucuccagcgugcugaacgacauccucucccgccuggacaaggucgaggccgaggugcagaucgaccggcugaucaccgggcgccuccagagccugcagaccuacgugacccagcagcugauccgggcggccgagauccgcgccagcgccaaccucgccgcgaccaagauguccgagugcguccugggccagagcaagcggguggacuucugcggcaagggguaccaccugauguccuucccccagagcgccccgcacggcguggucuuccuccacgugacguacgucugcgcccaggagaagaacuucaccaccgcccccgcgaucugccacgacgggaaggcccacuucccccgcgagggcguguucguguccaacgggacccacugguucgucacgcagcggaacuucuacgagccgcagaucaucaccaccgacaacaccuucgugagcggcaacugcgacguggucaucggcaucgugaacaacacgguguacgacccccugcagcccgagcuggacuccuucaaggaggagcucgacaaguacuucaagaaccacaccagccccgacgucgaccugggggacaucuccggcaucaacgccagcguggugaacauccagaaggagaucgaccgccugaacgaggucgccaagaaccucaacgagucccugaucgaccugcaggagcucgggaaguacgagcaguacaucaagggcggcgggagcgggggcgggcagaucuacgagggcaagcugaccgccgaggggcuccgcuucggcaucguggccagccgguucaaccacgcgcuggucgaccgccugguggagggggccaucgacgccaucgugcggcacggcgggcgcgaggaggacaucacccucguccgggugcccggcuccugggagaucccgguggccgccggcgagcuggcccgcaaggaggacaucgacgcggucaucgccaucggggugcugauccggggcgccacgccccacuucgacuacaucgccagcgagguguccaaggggcucgcggaccugagccuggagcuccgcaagcccaucaccuucggcgucaucaccgccgacacccuggagcaggccaucgagcgggccgggacgaagcacggcaacaagggcugggaggccgcgcuguccgccaucgagauggccaaccucuucaagagccugcgcuga

SEQ ID NO: 11855 - RNA, 4116 nt, Artificial Sequence
  SARS-CoV-2/Wuhan/WIV05/2019__EPI_ISL_402128 spike protein CDS gc (1-1211)(G889C_L1034C) LumSynth construct
auguucguguuccugguccuccugccccuggugagcucccagugcgugaaccucaccacccgcacgcagcugccgcccgccuacaccaacagcuucacccggggcgucuacuaccccgacaagguguuccgcuccagcgugcugcacuccacccaggaccucuuccugcccuucuucagcaacgucacgugguuccacgccauccacguguccgggaccaacggcaccaagcgguucgacaacccggugcugcccuucaacgacggggucuacuucgcgagcaccgagaaguccaacaucauccgcggcuggaucuucgggacgacccucgacagcaagacccagucccugcugaucgugaacaacgccaccaacguggucaucaaggugugcgaguuccaguucugcaacgaccccuuccucggcguguacuaccacaagaacaacaagagcuggauggaguccgaguuccgggucuacagcuccgccaacaacugcacguucgaguacgugagccagcccuuccugauggaccuggagggcaagcaggggaacuucaagaaccuccgcgaguucguguucaagaacaucgacggcuacuucaagaucuacuccaagcacaccccgaucaaccugguccgggaccugccccagggguucagcgcccucgagccccugguggaccugcccaucggcaucaacaucacccgcuuccagacccuccuggcccugcaccgguccuaccucacgccgggggacagcagcuccggcuggaccgcgggcgccgccgccuacuacgugggguaccugcagccccgcaccuuccugcucaaguacaacgagaacggcaccaucacggacgcggucgacugcgcccuggacccccugagcgagaccaagugcacccucaaguccuucaccguggagaaggggaucuaccagacgagcaacuuccgggugcagcccaccgaguccaucguccgcuucccgaacaucaccaaccugugccccuucggcgagguguucaacgccacccgguucgccagcgucuacgccuggaaccgcaagcggaucuccaacugcguggcggacuacagcgugcuguacaacuccgccagcuucuccacguucaagugcuacggcgucagccccaccaagcucaacgaccugugcuucaccaacguguacgccgacuccuucgugauccgcggggacgagguccggcagaucgcccccggccagaccgggaagaucgccgacuacaacuacaagcugccggacgacuucacgggcugcgugaucgcguggaacagcaacaaccucgacuccaaggucgggggcaacuacaacuaccuguaccgccuguuccgcaagagcaaccucaagcccuucgagcgggacaucuccaccgagaucuaccaggccggcagcacccccugcaacgggguggagggcuucaacugcuacuucccccugcaguccuacggguuccagccgaccaacggcgugggguaccagcccuaccggguggucgugcugagcuucgagcuccugcacgcccccgccacggugugcggccccaagaaguccaccaaccuggucaagaacaagugcgugaacuucaacuucaacggccucaccgggaccggcgugcugaccgagagcaacaagaaguuccugccguuccagcaguucgggcgcgacaucgccgacacgaccgacgcgguccgcgacccccagacccuggagauccucgacaucacccccugcagcuucggcgggguguccgugaucacgccgggcaccaacaccagcaaccaggucgccgugcuguaccaggacgugaacugcaccgagguccccguggccauccacgccgaccagcugacgcccaccuggcggguguacuccaccggcagcaacgucuuccagacccgcgccgggugccucaucggcgcggagcacgugaacaacuccuacgagugcgacauccccaucggggccggcaucugcgccagcuaccagacgcagaccaacuccccgcggcgcgcccggagcguggcgucccagagcaucaucgccuacaccaugucccugggcgccgagaacagcgucgccuacuccaacaacagcaucgccauccccaccaacuucacgaucuccgugaccaccgagauccugcccgugagcaugaccaagacgagcgucgacugcaccauguacaucugcggggacuccaccgagugcagcaaccuccugcugcaguacggcuccuucugcacccagcucaaccgcgcgcugacggggaucgccguggagcaggacaagaacacccaggagguguucgcccaggucaagcagaucuacaagacgcccccgaucaaggacuucggcggguucaacuucagccagauccugcccgaccccuccaagcccagcaagcgguccuucaucgaggaccuccuguucaacaaggugacccuggccgacgccggcuucaucaagcaguacggcgacugccucggggacaucgcggcccgcgaccugaucugcgcccagaaguucaacggccugaccgugcucccgccccugcugaccgacgagaugaucgcccaguacaccagcgcccuccuggcggggaccaucacguccggcuggaccuucugcgccggcgccgcccugcagauccccuucgcgaugcagauggccuaccgguucaacggcaucggggucacccagaacgugcucuacgagaaccagaagcugaucgccaaccaguucaacagcgccaucggcaagauccaggacucccugagcuccaccgccagcgcgcucgggaagcugcaggacguggucaaccagaacgcccaggcccugaacacgcucgugaagcagcuguccagcaacuucggcgccaucuccagcgugcugaacgacauccucucccgccuggacaaggucgaggccgaggugcagaucgaccggcugaucaccgggcgccuccagagccugcagaccuacgugacccagcagcugauccgggcggccgagauccgcgccagcgccaaccucgccgcgaccaagauguccgagugcgucugcggccagagcaagcggguggacuucugcggcaagggguaccaccugauguccuucccccagagcgccccgcacggcguggucuuccuccacgugacguacguccccgcccaggagaagaacuucaccaccgcccccgcgaucugccacgacgggaaggcccacuucccccgcgagggcguguucguguccaacgggacccacugguucgucacgcagcggaacuucuacgagccgcagaucaucaccaccgacaacaccuucgugagcggcaacugcgacguggucaucggcaucgugaacaacacgguguacgacccccugcagcccgagcuggacuccuucaaggaggagcucgacaaguacuucaagaaccacaccagccccgacgucgaccugggggacaucuccggcaucaacgccagcguggugaacauccagaaggagaucgaccgccugaacgaggucgccaagaaccucaacgagucccugaucgaccugcaggagcucgggaaguacgagcaguacaucaagggcggcgggagcgggggcgggcagaucuacgagggcaagcugaccgccgaggggcuccgcuucggcaucguggccagccgguucaaccacgcgcuggucgaccgccugguggagggggccaucgacgccaucgugcggcacggcgggcgcgaggaggacaucacccucguccgggugcccggcuccugggagaucccgguggccgccggcgagcuggcccgcaaggaggacaucgacgcggucaucgccaucggggugcugauccggggcgccacgccccacuucgacuacaucgccagcgagguguccaaggggcucgcggaccugagccuggagcuccgcaagcccaucaccuucggcgucaucaccgccgacacccuggagcaggccaucgagcgggccgggacgaagcacggcaacaagggcugggaggccgcgcuguccgccaucgagauggccaaccucuucaagagccugcgcuga

SEQ ID NO: 11856 - RNA, 4116 nt, Artificial Sequence
  SARS-CoV-2/Wuhan/WIV05/2019__EPI_ISL_402128 spike protein CDS gc (1-1211)(I909C_Y1047C) LumSynth construct
auguucguguuccugguccuccugccccuggugagcucccagugcgugaaccucaccacccgcacgcagcugccgcccgccuacaccaacagcuucacccggggcgucuacuaccccgacaagguguuccgcuccagcgugcugcacuccacccaggaccucuuccugcccuucuucagcaacgucacgugguuccacgccauccacguguccgggaccaacggcaccaagcgguucgacaacccggugcugcccuucaacgacggggucuacuucgcgagcaccgagaaguccaacaucauccgcggcuggaucuucgggacgacccucgacagcaagacccagucccugcugaucgugaacaacgccaccaacguggucaucaaggugugcgaguuccaguucugcaacgaccccuuccucggcguguacuaccacaagaacaacaagagcuggauggaguccgaguuccgggucuacagcuccgccaacaacugcacguucgaguacgugagccagcccuuccugauggaccuggagggcaagcaggggaacuucaagaaccuccgcgaguucguguucaagaacaucgacggcuacuucaagaucuacuccaagcacaccccgaucaaccugguccgggaccugccccagggguucagcgcccucgagccccugguggaccugcccaucggcaucaacaucacccgcuuccagacccuccuggcccugcaccgguccuaccucacgccgggggacagcagcuccggcuggaccgcgggcgccgccgccuacuacgugggguaccugcagccccgcaccuuccugcucaaguacaacgagaacggcaccaucacggacgcggucgacugcgcccuggacccccugagcgagaccaagugcacccucaaguccuucaccguggagaaggggaucuaccagacgagcaacuuccgggugcagcccaccgaguccaucguccgcuucccgaacaucaccaaccugugccccuucggcgagguguucaacgccacccgguucgccagcgucuacgccuggaaccgcaagcggaucuccaacugcguggcggacuacagcgugcuguacaacuccgccagcuucuccacguucaagugcuacggcgucagccccaccaagcucaacgaccugugcuucaccaacguguacgccgacuccuucgugauccgcggggacgagguccggcagaucgcccccggccagaccgggaagaucgccgacuacaacuacaagcugccggacgacuucacgggcugcgugaucgcguggaacagcaacaaccucgacuccaaggucgggggcaacuacaacuaccuguaccgccuguuccgcaagagcaaccucaagcccuucgagcgggacaucuccaccgagaucuaccaggccggcagcacccccugcaacgggguggagggcuucaacugcuacuucccccugcaguccuacggguuccagccgaccaacggcgugggguaccagcccuaccggguggucgugcugagcuucgagcuccugcacgcccccgccacggugugcggccccaagaaguccaccaaccuggucaagaacaagugcgugaacuucaacuucaacggccucaccgggaccggcgugcugaccgagagcaacaagaaguuccugccguuccagcaguucgggcgcgacaucgccgacacgaccgacgcgguccgcgacccccagacccuggagauccucgacaucacccccugcagcuucggcgggguguccgugaucacgccgggcaccaacaccagcaaccaggucgccgugcuguaccaggacgugaacugcaccgagguccccguggccauccacgccgaccagcugacgcccaccuggcggguguacuccaccggcagcaacgucuuccagacccgcgccgggugccucaucggcgcggagcacgugaacaacuccuacgagugcgacauccccaucggggccggcaucugcgccagcuaccagacgcagaccaacuccccgcggcgcgcccggagcguggcgucccagagcaucaucgccuacaccaugucccugggcgccgagaacagcgucgccuacuccaacaacagcaucgccauccccaccaacuucacgaucuccgugaccaccgagauccugcccgugagcaugaccaagacgagcgucgacugcaccauguacaucugcggggacuccaccgagugcagcaaccuccugcugcaguacggcuccuucugcacccagcucaaccgcgcgcugacggggaucgccguggagcaggacaagaacacccaggagguguucgcccaggucaagcagaucuacaagacgcccccgaucaaggacuucggcggguucaacuucagccagauccugcccgaccccuccaagcccagcaagcgguccuucaucgaggaccuccuguucaacaaggugacccuggccgacgccggcuucaucaagcaguacggcgacugccucggggacaucgcggcccgcgaccugaucugcgcccagaaguucaacggccugaccgugcucccgccccugcugaccgacgagaugaucgcccaguacaccagcgcccuccuggcggggaccaucacguccggcuggaccuucggggccggcgccgcccugcagauccccuucgcgaugcagauggccuaccgguucaacggcugcggggucacccagaacgugcucuacgagaaccagaagcugaucgccaaccaguucaacagcgccaucggcaagauccaggacucccugagcuccaccgccagcgcgcucgggaagcugcaggacguggucaaccagaacgcccaggcccugaacacgcucgugaagcagcuguccagcaacuucggcgccaucuccagcgugcugaacgacauccucucccgccuggacaaggucgaggccgaggugcagaucgaccggcugaucaccgggcgccuccagagccugcagaccuacgugacccagcagcugauccgggcggccgagauccgcgccagcgccaaccucgccgcgaccaagauguccgagugcguccugggccagagcaagcggguggacuucugcggcaaggggugccaccugauguccuucccccagagcgccccgcacggcguggucuuccuccacgugacguacguccccgcccaggagaagaacuucaccaccgcccccgcgaucugccacgacgggaaggcccacuucccccgcgagggcguguucguguccaacgggacccacugguucgucacgcagcggaacuucuacgagccgcagaucaucaccaccgacaacaccuucgugagcggcaacugcgacguggucaucggcaucgugaacaacacgguguacgacccccugcagcccgagcuggacuccuucaaggaggagcucgacaaguacuucaagaaccacaccagccccgacgucgaccugggggacaucuccggcaucaacgccagcguggugaacauccagaaggagaucgaccgccugaacgaggucgccaagaaccucaacgagucccugaucgaccugcaggagcucgggaaguacgagcaguacaucaagggcggcgggagcgggggcgggcagaucuacgagggcaagcugaccgccgaggggcuccgcuucggcaucguggccagccgguucaaccacgcgcuggucgaccgccugguggagggggccaucgacgccaucgugcggcacggcgggcgcgaggaggacaucacccucguccgggugcccggcuccugggagaucccgguggccgccggcgagcuggcccgcaaggaggacaucgacgcggucaucgccaucggggugcugauccggggcgccacgccccacuucgacuacaucgccagcgagguguccaaggggcucgcggaccugagccuggagcuccgcaagcccaucaccuucggcgucaucaccgccgacacccuggagcaggccaucgagcgggccgggacgaagcacggcaacaagggcugggaggccgcgcuguccgccaucgagauggccaaccucuucaagagccugcgcuga

SEQ ID NO: 11857 - RNA, 4116 nt, Artificial Sequence
  SARS-CoV-2/Wuhan/WIV05/2019__EPI_ISL_402128 spike protein CDS gc (1-1211)(Q965C_S1003C) LumSynth construct
auguucguguuccugguccuccugccccuggugagcucccagugcgugaaccucaccacccgcacgcagcugccgcccgccuacaccaacagcuucacccggggcgucuacuaccccgacaagguguuccgcuccagcgugcugcacuccacccaggaccucuuccugcccuucuucagcaacgucacgugguuccacgccauccacguguccgggaccaacggcaccaagcgguucgacaacccggugcugcccuucaacgacggggucuacuucgcgagcaccgagaaguccaacaucauccgcggcuggaucuucgggacgacccucgacagcaagacccagucccugcugaucgugaacaacgccaccaacguggucaucaaggugugcgaguuccaguucugcaacgaccccuuccucggcguguacuaccacaagaacaacaagagcuggauggaguccgaguuccgggucuacagcuccgccaacaacugcacguucgaguacgugagccagcccuuccugauggaccuggagggcaagcaggggaacuucaagaaccuccgcgaguucguguucaagaacaucgacggcuacuucaagaucuacuccaagcacaccccgaucaaccugguccgggaccugccccagggguucagcgcccucgagccccugguggaccugcccaucggcaucaacaucacccgcuuccagacccuccuggcccugcaccgguccuaccucacgccgggggacagcagcuccggcuggaccgcgggcgccgccgccuacuacgugggguaccugcagccccgcaccuuccugcucaaguacaacgagaacggcaccaucacggacgcggucgacugcgcccuggacccccugagcgagaccaagugcacccucaaguccuucaccguggagaaggggaucuaccagacgagcaacuuccgggugcagcccaccgaguccaucguccgcuucccgaacaucaccaaccugugccccuucggcgagguguucaacgccacccgguucgccagcgucuacgccuggaaccgcaagcggaucuccaacugcguggcggacuacagcgugcuguacaacuccgccagcuucuccacguucaagugcuacggcgucagccccaccaagcucaacgaccugugcuucaccaacguguacgccgacuccuucgugauccgcggggacgagguccggcagaucgcccccggccagaccgggaagaucgccgacuacaacuacaagcugccggacgacuucacgggcugcgugaucgcguggaacagcaacaaccucgacuccaaggucgggggcaacuacaacuaccuguaccgccuguuccgcaagagcaaccucaagcccuucgagcgggacaucuccaccgagaucuaccaggccggcagcacccccugcaacgggguggagggcuucaacugcuacuucccccugcaguccuacggguuccagccgaccaacggcgugggguaccagcccuaccggguggucgugcugagcuucgagcuccugcacgcccccgccacggugugcggccccaagaaguccaccaaccuggucaagaacaagugcgugaacuucaacuucaacggccucaccgggaccggcgugcugaccgagagcaacaagaaguuccugccguuccagcaguucgggcgcgacaucgccgacacgaccgacgcgguccgcgacccccagacccuggagauccucgacaucacccccugcagcuucggcgggguguccgugaucacgccgggcaccaacaccagcaaccaggucgccgugcuguaccaggacgugaacugcaccgagguccccguggccauccacgccgaccagcugacgcccaccuggcggguguacuccaccggcagcaacgucuuccagacccgcgccgggugccucaucggcgcggagcacgugaacaacuccuacgagugcgacauccccaucggggccggcaucugcgccagcuaccagacgcagaccaacuccccgcggcgcgcccggagcguggcgucccagagcaucaucgccuacaccaugucccugggcgccgagaacagcgucgccuacuccaacaacagcaucgccauccccaccaacuucacgaucuccgugaccaccgagauccugcccgugagcaugaccaagacgagcgucgacugcaccauguacaucugcggggacuccaccgagugcagcaaccuccugcugcaguacggcuccuucugcacccagcucaaccgcgcgcugacggggaucgccguggagcaggacaagaacacccaggagguguucgcccaggucaagcagaucuacaagacgcccccgaucaaggacuucggcggguucaacuucagccagauccugcccgaccccuccaagcccagcaagcgguccuucaucgaggaccuccuguucaacaaggugacccuggccgacgccggcuucaucaagcaguacggcgacugccucggggacaucgcggcccgcgaccugaucugcgcccagaaguucaacggccugaccgugcucccgccccugcugaccgacgagaugaucgcccaguacaccagcgcccuccuggcggggaccaucacguccggcuggaccuucggggccggcgccgcccugcagauccccuucgcgaugcagauggccuaccgguucaacggcaucggggucacccagaacgugcucuacgagaaccagaagcugaucgccaaccaguucaacagcgccaucggcaagauccaggacucccugagcuccaccgccagcgcgcucgggaagcugcaggacguggucaaccagaacgcccaggcccugaacacgcucgugaagugccuguccagcaacuucggcgccaucuccagcgugcugaacgacauccucucccgccuggacaaggucgaggccgaggugcagaucgaccggcugaucaccgggcgccuccagugccugcagaccuacgugacccagcagcugauccgggcggccgagauccgcgccagcgccaaccucgccgcgaccaagauguccgagugcguccugggccagagcaagcggguggacuucugcggcaagggguaccaccugauguccuucccccagagcgccccgcacggcguggucuuccuccacgugacguacguccccgcccaggagaagaacuucaccaccgcccccgcgaucugccacgacgggaaggcccacuucccccgcgagggcguguucguguccaacgggacccacugguucgucacgcagcggaacuucuacgagccgcagaucaucaccaccgacaacaccuucgugagcggcaacugcgacguggucaucggcaucgugaacaacacgguguacgacccccugcagcccgagcuggacuccuucaaggaggagcucgacaaguacuucaagaaccacaccagccccgacgucgaccugggggacaucuccggcaucaacgccagcguggugaacauccagaaggagaucgaccgccugaacgaggucgccaagaaccucaacgagucccugaucgaccugcaggagcucgggaaguacgagcaguacaucaagggcggcgggagcgggggcgggcagaucuacgagggcaagcugaccgccgaggggcuccgcuucggcaucguggccagccgguucaaccacgcgcuggucgaccgccugguggagggggccaucgacgccaucgugcggcacggcgggcgcgaggaggacaucacccucguccgggugcccggcuccugggagaucccgguggccgccggcgagcuggcccgcaaggaggacaucgacgcggucaucgccaucggggugcugauccggggcgccacgccccacuucgacuacaucgccagcgagguguccaaggggcucgcggaccugagccuggagcuccgcaagcccaucaccuucggcgucaucaccgccgacacccuggagcaggccaucgagcgggccgggacgaagcacggcaacaagggcugggaggccgcgcuguccgccaucgagauggccaaccucuucaagagccugcgcuga

SEQ ID NO: 11858 - RNA, 4116 nt, Artificial Sequence
  SARS-CoV-2/Wuhan/WIV05/2019__EPI_ISL_402128 spike protein CDS gc (1-1211)(F970C_G999C) LumSynth construct
auguucguguuccugguccuccugccccuggugagcucccagugcgugaaccucaccacccgcacgcagcugccgcccgccuacaccaacagcuucacccggggcgucuacuaccccgacaagguguuccgcuccagcgugcugcacuccacccaggaccucuuccugcccuucuucagcaacgucacgugguuccacgccauccacguguccgggaccaacggcaccaagcgguucgacaacccggugcugcccuucaacgacggggucuacuucgcgagcaccgagaaguccaacaucauccgcggcuggaucuucgggacgacccucgacagcaagacccagucccugcugaucgugaacaacgccaccaacguggucaucaaggugugcgaguuccaguucugcaacgaccccuuccucggcguguacuaccacaagaacaacaagagcuggauggaguccgaguuccgggucuacagcuccgccaacaacugcacguucgaguacgugagccagcccuuccugauggaccuggagggcaagcaggggaacuucaagaaccuccgcgaguucguguucaagaacaucgacggcuacuucaagaucuacuccaagcacaccccgaucaaccugguccgggaccugccccagggguucagcgcccucgagccccugguggaccugcccaucggcaucaacaucacccgcuuccagacccuccuggcccugcaccgguccuaccucacgccgggggacagcagcuccggcuggaccgcgggcgccgccgccuacuacgugggguaccugcagccccgcaccuuccugcucaaguacaacgagaacggcaccaucacggacgcggucgacugcgcccuggacccccugagcgagaccaagugcacccucaaguccuucaccguggagaaggggaucuaccagacgagcaacuuccgggugcagcccaccgaguccaucguccgcuucccgaacaucaccaaccugugccccuucggcgagguguucaacgccacccgguucgccagcgucuacgccuggaaccgcaagcggaucuccaacugcguggcggacuacagcgugcuguacaacuccgccagcuucuccacguucaagugcuacggcgucagccccaccaagcucaacgaccugugcuucaccaacguguacgccgacuccuucgugauccgcggggacgagguccggcagaucgcccccggccagaccgggaagaucgccgacuacaacuacaagcugccggacgacuucacgggcugcgugaucgcguggaacagcaacaaccucgacuccaaggucgggggcaacuacaacuaccuguaccgccuguuccgcaagagcaaccucaagcccuucgagcgggacaucuccaccgagaucuaccaggccggcagcacccccugcaacgggguggagggcuucaacugcuacuucccccugcaguccuacggguuccagccgaccaacggcgugggguaccagcccuaccggguggucgugcugagcuucgagcuccugcacgcccccgccacggugugcggccccaagaaguccaccaaccuggucaagaacaagugcgugaacuucaacuucaacggccucaccgggaccggcgugcugaccgagagcaacaagaaguuccugccguuccagcaguucgggcgcgacaucgccgacacgaccgacgcgguccgcgacccccagacccuggagauccucgacaucacccccugcagcuucggcgggguguccgugaucacgccgggcaccaacaccagcaaccaggucgccgugcuguaccaggacgugaacugcaccgagguccccguggccauccacgccgaccagcugacgcccaccuggcggguguacuccaccggcagcaacgucuuccagacccgcgccgggugccucaucggcgcggagcacgugaacaacuccuacgagugcgacauccccaucggggccggcaucugcgccagcuaccagacgcagaccaacuccccgcggcgcgcccggagcguggcgucccagagcaucaucgccuacaccaugucccugggcgccgagaacagcgucgccuacuccaacaacagcaucgccauccccaccaacuucacgaucuccgugaccaccgagauccugcccgugagcaugaccaagacgagcgucgacugcaccauguacaucugcggggacuccaccgagugcagcaaccuccugcugcaguacggcuccuucugcacccagcucaaccgcgcgcugacggggaucgccguggagcaggacaagaacacccaggagguguucgcccaggucaagcagaucuacaagacgcccccgaucaaggacuucggcggguucaacuucagccagauccugcccgaccccuccaagcccagcaagcgguccuucaucgaggaccuccuguucaacaaggugacccuggccgacgccggcuucaucaagcaguacggcgacugccucggggacaucgcggcccgcgaccugaucugcgcccagaaguucaacggccugaccgugcucccgccccugcugaccgacgagaugaucgcccaguacaccagcgcccuccuggcggggaccaucacguccggcuggaccuucggggccggcgccgcccugcagauccccuucgcgaugcagauggccuaccgguucaacggcaucggggucacccagaacgugcucuacgagaaccagaagcugaucgccaaccaguucaacagcgccaucggcaagauccaggacucccugagcuccaccgccagcgcgcucgggaagcugcaggacguggucaaccagaacgcccaggcccugaacacgcucgugaagcagcuguccagcaacugcggcgccaucuccagcgugcugaacgacauccucucccgccuggacaaggucgaggccgaggugcagaucgaccggcugaucaccugucgccuccagagccugcagaccuacgugacccagcagcugauccgggcggccgagauccgcgccagcgccaaccucgccgcgaccaagauguccgagugcguccugggccagagcaagcggguggacuucugcggcaagggguaccaccugauguccuucccccagagcgccccgcacggcguggucuuccuccacgugacguacguccccgcccaggagaagaacuucaccaccgcccccgcgaucugccacgacgggaaggcccacuucccccgcgagggcguguucguguccaacgggacccacugguucgucacgcagcggaacuucuacgagccgcagaucaucaccaccgacaacaccuucgugagcggcaacugcgacguggucaucggcaucgugaacaacacgguguacgacccccugcagcccgagcuggacuccuucaaggaggagcucgacaaguacuucaagaaccacaccagccccgacgucgaccugggggacaucuccggcaucaacgccagcguggugaacauccagaaggagaucgaccgccugaacgaggucgccaagaaccucaacgagucccugaucgaccugcaggagcucgggaaguacgagcaguacaucaagggcggcgggagcgggggcgggcagaucuacgagggcaagcugaccgccgaggggcuccgcuucggcaucguggccagccgguucaaccacgcgcuggucgaccgccugguggagggggccaucgacgccaucgugcggcacggcgggcgcgaggaggacaucacccucguccgggugcccggcuccugggagaucccgguggccgccggcgagcuggcccgcaaggaggacaucgacgcggucaucgccaucggggugcugauccggggcgccacgccccacuucgacuacaucgccagcgagguguccaaggggcucgcggaccugagccuggagcuccgcaagcccaucaccuucggcgucaucaccgccgacacccuggagcaggccaucgagcgggccgggacgaagcacggcaacaagggcugggaggccgcgcuguccgccaucgagauggccaaccucuucaagagccugcgcuga

SEQ ID NO: 11859 - RNA, 4116 nt, Artificial Sequence
  SARS-CoV-2/Wuhan/WIV05/2019__EPI_ISL_402128 spike protein CDS gc (1-1211)(A972C_R995C) LumSynth construct
auguucguguuccugguccuccugccccuggugagcucccagugcgugaaccucaccacccgcacgcagcugccgcccgccuacaccaacagcuucacccggggcgucuacuaccccgacaagguguuccgcuccagcgugcugcacuccacccaggaccucuuccugcccuucuucagcaacgucacgugguuccacgccauccacguguccgggaccaacggcaccaagcgguucgacaacccggugcugcccuucaacgacggggucuacuucgcgagcaccgagaaguccaacaucauccgcggcuggaucuucgggacgacccucgacagcaagacccagucccugcugaucgugaacaacgccaccaacguggucaucaaggugugcgaguuccaguucugcaacgaccccuuccucggcguguacuaccacaagaacaacaagagcuggauggaguccgaguuccgggucuacagcuccgccaacaacugcacguucgaguacgugagccagcccuuccugauggaccuggagggcaagcaggggaacuucaagaaccuccgcgaguucguguucaagaacaucgacggcuacuucaagaucuacuccaagcacaccccgaucaaccugguccgggaccugccccagggguucagcgcccucgagccccugguggaccugcccaucggcaucaacaucacccgcuuccagacccuccuggcccugcaccgguccuaccucacgccgggggacagcagcuccggcuggaccgcgggcgccgccgccuacuacgugggguaccugcagccccgcaccuuccugcucaaguacaacgagaacggcaccaucacggacgcggucgacugcgcccuggacccccugagcgagaccaagugcacccucaaguccuucaccguggagaaggggaucuaccagacgagcaacuuccgggugcagcccaccgaguccaucguccgcuucccgaacaucaccaaccugugccccuucggcgagguguucaacgccacccgguucgccagcgucuacgccuggaaccgcaagcggaucuccaacugcguggcggacuacagcgugcuguacaacuccgccagcuucuccacguucaagugcuacggcgucagccccaccaagcucaacgaccugugcuucaccaacguguacgccgacuccuucgugauccgcggggacgagguccggcagaucgcccccggccagaccgggaagaucgccgacuacaacuacaagcugccggacgacuucacgggcugcgugaucgcguggaacagcaacaaccucgacuccaaggucgggggcaacuacaacuaccuguaccgccuguuccgcaagagcaaccucaagcccuucgagcgggacaucuccaccgagaucuaccaggccggcagcacccccugcaacgggguggagggcuucaacugcuacuucccccugcaguccuacggguuccagccgaccaacggcgugggguaccagcccuaccggguggucgugcugagcuucgagcuccugcacgcccccgccacggugugcggccccaagaaguccaccaaccuggucaagaacaagugcgugaacuucaacuucaacggccucaccgggaccggcgugcugaccgagagcaacaagaaguuccugccguuccagcaguucgggcgcgacaucgccgacacgaccgacgcgguccgcgacccccagacccuggagauccucgacaucacccccugcagcuucggcgggguguccgugaucacgccgggcaccaacaccagcaaccaggucgccgugcuguaccaggacgugaacugcaccgagguccccguggccauccacgccgaccagcugacgcccaccuggcggguguacuccaccggcagcaacgucuuccagacccgcgccgggugccucaucggcgcggagcacgugaacaacuccuacgagugcgacauccccaucggggccggcaucugcgccagcuaccagacgcagaccaacuccccgcggcgcgcccggagcguggcgucccagagcaucaucgccuacaccaugucccugggcgccgagaacagcgucgccuacuccaacaacagcaucgccauccccaccaacuucacgaucuccgugaccaccgagauccugcccgugagcaugaccaagacgagcgucgacugcaccauguacaucugcggggacuccaccgagugcagcaaccuccugcugcaguacggcuccuucugcacccagcucaaccgcgcgcugacggggaucgccguggagcaggacaagaacacccaggagguguucgcccaggucaagcagaucuacaagacgcccccgaucaaggacuucggcggguucaacuucagccagauccugcccgaccccuccaagcccagcaagcgguccuucaucgaggaccuccuguucaacaaggugacccuggccgacgccggcuucaucaagcaguacggcgacugccucggggacaucgcggcccgcgaccugaucugcgcccagaaguucaacggccugaccgugcucccgccccugcugaccgacgagaugaucgcccaguacaccagcgcccuccuggcggggaccaucacguccggcuggaccuucggggccggcgccgcccugcagauccccuucgcgaugcagauggccuaccgguucaacggcaucggggucacccagaacgugcucuacgagaaccagaagcugaucgccaaccaguucaacagcgccaucggcaagauccaggacucccugagcuccaccgccagcgcgcucgggaagcugcaggacguggucaaccagaacgcccaggcccugaacacgcucgugaagcagcuguccagcaacuucggcugcaucuccagcgugcugaacgacauccucucccgccuggacaaggucgaggccgaggugcagaucgacugccugaucaccgggcgccuccagagccugcagaccuacgugacccagcagcugauccgggcggccgagauccgcgccagcgccaaccucgccgcgaccaagauguccgagugcguccugggccagagcaagcggguggacuucugcggcaagggguaccaccugauguccuucccccagagcgccccgcacggcguggucuuccuccacgugacguacguccccgcccaggagaagaacuucaccaccgcccccgcgaucugccacgacgggaaggcccacuucccccgcgagggcguguucguguccaacgggacccacugguucgucacgcagcggaacuucuacgagccgcagaucaucaccaccgacaacaccuucgugagcggcaacugcgacguggucaucggcaucgugaacaacacgguguacgacccccugcagcccgagcuggacuccuucaaggaggagcucgacaaguacuucaagaaccacaccagccccgacgucgaccugggggacaucuccggcaucaacgccagcguggugaacauccagaaggagaucgaccgccugaacgaggucgccaagaaccucaacgagucccugaucgaccugcaggagcucgggaaguacgagcaguacaucaagggcggcgggagcgggggcgggcagaucuacgagggcaagcugaccgccgaggggcuccgcuucggcaucguggccagccgguucaaccacgcgcuggucgaccgccugguggagggggccaucgacgccaucgugcggcacggcgggcgcgaggaggacaucacccucguccgggugcccggcuccugggagaucccgguggccgccggcgagcuggcccgcaaggaggacaucgacgcggucaucgccaucggggugcugauccggggcgccacgccccacuucgacuacaucgccagcgagguguccaaggggcucgcggaccugagccuggagcuccgcaagcccaucaccuucggcgucaucaccgccgacacccuggagcaggccaucgagcgggccgggacgaagcacggcaacaagggcugggaggccgcgcuguccgccaucgagauggccaaccucuucaagagccugcgcuga

SEQ ID NO: 11860 - RNA, 4116 nt, Artificial Sequence
  SARS-CoV-2/Wuhan/WIV05/2019__EPI_ISL_402128 spike protein CDS gc (1-1211)(A890C_V1040C) LumSynth construct
auguucguguuccugguccuccugccccuggugagcucccagugcgugaaccucaccacccgcacgcagcugccgcccgccuacaccaacagcuucacccggggcgucuacuaccccgacaagguguuccgcuccagcgugcugcacuccacccaggaccucuuccugcccuucuucagcaacgucacgugguuccacgccauccacguguccgggaccaacggcaccaagcgguucgacaacccggugcugcccuucaacgacggggucuacuucgcgagcaccgagaaguccaacaucauccgcggcuggaucuucgggacgacccucgacagcaagacccagucccugcugaucgugaacaacgccaccaacguggucaucaaggugugcgaguuccaguucugcaacgaccccuuccucggcguguacuaccacaagaacaacaagagcuggauggaguccgaguuccgggucuacagcuccgccaacaacugcacguucgaguacgugagccagcccuuccugauggaccuggagggcaagcaggggaacuucaagaaccuccgcgaguucguguucaagaacaucgacggcuacuucaagaucuacuccaagcacaccccgaucaaccugguccgggaccugccccagggguucagcgcccucgagccccugguggaccugcccaucggcaucaacaucacccgcuuccagacccuccuggcccugcaccgguccuaccucacgccgggggacagcagcuccggcuggaccgcgggcgccgccgccuacuacgugggguaccugcagccccgcaccuuccugcucaaguacaacgagaacggcaccaucacggacgcggucgacugcgcccuggacccccugagcgagaccaagugcacccucaaguccuucaccguggagaaggggaucuaccagacgagcaacuuccgggugcagcccaccgaguccaucguccgcuucccgaacaucaccaaccugugccccuucggcgagguguucaacgccacccgguucgccagcgucuacgccuggaaccgcaagcggaucuccaacugcguggcggacuacagcgugcuguacaacuccgccagcuucuccacguucaagugcuacggcgucagccccaccaagcucaacgaccugugcuucaccaacguguacgccgacuccuucgugauccgcggggacgagguccggcagaucgcccccggccagaccgggaagaucgccgacuacaacuacaagcugccggacgacuucacgggcugcgugaucgcguggaacagcaacaaccucgacuccaaggucgggggcaacuacaacuaccuguaccgccuguuccgcaagagcaaccucaagcccuucgagcgggacaucuccaccgagaucuaccaggccggcagcacccccugcaacgggguggagggcuucaacugcuacuucccccugcaguccuacggguuccagccgaccaacggcgugggguaccagcccuaccggguggucgugcugagcuucgagcuccugcacgcccccgccacggugugcggccccaagaaguccaccaaccuggucaagaacaagugcgugaacuucaacuucaacggccucaccgggaccggcgugcugaccgagagcaacaagaaguuccugccguuccagcaguucgggcgcgacaucgccgacacgaccgacgcgguccgcgacccccagacccuggagauccucgacaucacccccugcagcuucggcgggguguccgugaucacgccgggcaccaacaccagcaaccaggucgccgugcuguaccaggacgugaacugcaccgagguccccguggccauccacgccgaccagcugacgcccaccuggcggguguacuccaccggcagcaacgucuuccagacccgcgccgggugccucaucggcgcggagcacgugaacaacuccuacgagugcgacauccccaucggggccggcaucugcgccagcuaccagacgcagaccaacuccccgcggcgcgcccggagcguggcgucccagagcaucaucgccuacaccaugucccugggcgccgagaacagcgucgccuacuccaacaacagcaucgccauccccaccaacuucacgaucuccgugaccaccgagauccugcccgugagcaugaccaagacgagcgucgacugcaccauguacaucugcggggacuccaccgagugcagcaaccuccugcugcaguacggcuccuucugcacccagcucaaccgcgcgcugacggggaucgccguggagcaggacaagaacacccaggagguguucgcccaggucaagcagaucuacaagacgcccccgaucaaggacuucggcggguucaacuucagccagauccugcccgaccccuccaagcccagcaagcgguccuucaucgaggaccuccuguucaacaaggugacccuggccgacgccggcuucaucaagcaguacggcgacugccucggggacaucgcggcccgcgaccugaucugcgcccagaaguucaacggccugaccgugcucccgccccugcugaccgacgagaugaucgcccaguacaccagcgcccuccuggcggggaccaucacguccggcuggaccuucgggugcggcgccgcccugcagauccccuucgcgaugcagauggccuaccgguucaacggcaucggggucacccagaacgugcucuacgagaaccagaagcugaucgccaaccaguucaacagcgccaucggcaagauccaggacucccugagcuccaccgccagcgcgcucgggaagcugcaggacguggucaaccagaacgcccaggcccugaacacgcucgugaagcagcuguccagcaacuucggcgccaucuccagcgugcugaacgacauccucucccgccuggacaaggucgaggccgaggugcagaucgaccggcugaucaccgggcgccuccagagccugcagaccuacgugacccagcagcugauccgggcggccgagauccgcgccagcgccaaccucgccgcgaccaagauguccgagugcguccugggccagagcaagcggugcgacuucugcggcaagggguaccaccugauguccuucccccagagcgccccgcacggcguggucuuccuccacgugacguacguccccgcccaggagaagaacuucaccaccgcccccgcgaucugccacgacgggaaggcccacuucccccgcgagggcguguucguguccaacgggacccacugguucgucacgcagcggaacuucuacgagccgcagaucaucaccaccgacaacaccuucgugagcggcaacugcgacguggucaucggcaucgugaacaacacgguguacgacccccugcagcccgagcuggacuccuucaaggaggagcucgacaaguacuucaagaaccacaccagccccgacgucgaccugggggacaucuccggcaucaacgccagcguggugaacauccagaaggagaucgaccgccugaacgaggucgccaagaaccucaacgagucccugaucgaccugcaggagcucgggaaguacgagcaguacaucaagggcggcgggagcgggggcgggcagaucuacgagggcaagcugaccgccgaggggcuccgcuucggcaucguggccagccgguucaaccacgcgcuggucgaccgccugguggagggggccaucgacgccaucgugcggcacggcgggcgcgaggaggacaucacccucguccgggugcccggcuccugggagaucccgguggccgccggcgagcuggcccgcaaggaggacaucgacgcggucaucgccaucggggugcugauccggggcgccacgccccacuucgacuacaucgccagcgagguguccaaggggcucgcggaccugagccuggagcuccgcaagcccaucaccuucggcgucaucaccgccgacacccuggagcaggccaucgagcgggccgggacgaagcacggcaacaagggcugggaggccgcgcuguccgccaucgagauggccaaccucuucaagagccugcgcuga

SEQ ID NO: 11861 - RNA, 4116 nt, Artificial Sequence
  SARS-CoV-2/Wuhan/WIV05/2019__EPI_ISL_402128 spike protein CDS gc (1-1211)(T874C_S1055C) LumSynth construct
auguucguguuccugguccuccugccccuggugagcucccagugcgugaaccucaccacccgcacgcagcugccgcccgccuacaccaacagcuucacccggggcgucuacuaccccgacaagguguuccgcuccagcgugcugcacuccacccaggaccucuuccugcccuucuucagcaacgucacgugguuccacgccauccacguguccgggaccaacggcaccaagcgguucgacaacccggugcugcccuucaacgacggggucuacuucgcgagcaccgagaaguccaacaucauccgcggcuggaucuucgggacgacccucgacagcaagacccagucccugcugaucgugaacaacgccaccaacguggucaucaaggugugcgaguuccaguucugcaacgaccccuuccucggcguguacuaccacaagaacaacaagagcuggauggaguccgaguuccgggucuacagcuccgccaacaacugcacguucgaguacgugagccagcccuuccugauggaccuggagggcaagcaggggaacuucaagaaccuccgcgaguucguguucaagaacaucgacggcuacuucaagaucuacuccaagcacaccccgaucaaccugguccgggaccugccccagggguucagcgcccucgagccccugguggaccugcccaucggcaucaacaucacccgcuuccagacccuccuggcccugcaccgguccuaccucacgccgggggacagcagcuccggcuggaccgcgggcgccgccgccuacuacgugggguaccugcagccccgcaccuuccugcucaaguacaacgagaacggcaccaucacggacgcggucgacugcgcccuggacccccugagcgagaccaagugcacccucaaguccuucaccguggagaaggggaucuaccagacgagcaacuuccgggugcagcccaccgaguccaucguccgcuucccgaacaucaccaaccugugccccuucggcgagguguucaacgccacccgguucgccagcgucuacgccuggaaccgcaagcggaucuccaacugcguggcggacuacagcgugcuguacaacuccgccagcuucuccacguucaagugcuacggcgucagccccaccaagcucaacgaccugugcuucaccaacguguacgccgacuccuucgugauccgcggggacgagguccggcagaucgcccccggccagaccgggaagaucgccgacuacaacuacaagcugccggacgacuucacgggcugcgugaucgcguggaacagcaacaaccucgacuccaaggucgggggcaacuacaacuaccuguaccgccuguuccgcaagagcaaccucaagcccuucgagcgggacaucuccaccgagaucuaccaggccggcagcacccccugcaacgggguggagggcuucaacugcuacuucccccugcaguccuacggguuccagccgaccaacggcgugggguaccagcccuaccggguggucgugcugagcuucgagcuccugcacgcccccgccacggugugcggccccaagaaguccaccaaccuggucaagaacaagugcgugaacuucaacuucaacggccucaccgggaccggcgugcugaccgagagcaacaagaaguuccugccguuccagcaguucgggcgcgacaucgccgacacgaccgacgcgguccgcgacccccagacccuggagauccucgacaucacccccugcagcuucggcgggguguccgugaucacgccgggcaccaacaccagcaaccaggucgccgugcuguaccaggacgugaacugcaccgagguccccguggccauccacgccgaccagcugacgcccaccuggcggguguacuccaccggcagcaacgucuuccagacccgcgccgggugccucaucggcgcggagcacgugaacaacuccuacgagugcgacauccccaucggggccggcaucugcgccagcuaccagacgcagaccaacuccccgcggcgcgcccggagcguggcgucccagagcaucaucgccuacaccaugucccugggcgccgagaacagcgucgccuacuccaacaacagcaucgccauccccaccaacuucacgaucuccgugaccaccgagauccugcccgugagcaugaccaagacgagcgucgacugcaccauguacaucugcggggacuccaccgagugcagcaaccuccugcugcaguacggcuccuucugcacccagcucaaccgcgcgcugacggggaucgccguggagcaggacaagaacacccaggagguguucgcccaggucaagcagaucuacaagacgcccccgaucaaggacuucggcggguucaacuucagccagauccugcccgaccccuccaagcccagcaagcgguccuucaucgaggaccuccuguucaacaaggugacccuggccgacgccggcuucaucaagcaguacggcgacugccucggggacaucgcggcccgcgaccugaucugcgcccagaaguucaacggccugaccgugcucccgccccugcugaccgacgagaugaucgcccaguacugcagcgcccuccuggcggggaccaucacguccggcuggaccuucggggccggcgccgcccugcagauccccuucgcgaugcagauggccuaccgguucaacggcaucggggucacccagaacgugcucuacgagaaccagaagcugaucgccaaccaguucaacagcgccaucggcaagauccaggacucccugagcuccaccgccagcgcgcucgggaagcugcaggacguggucaaccagaacgcccaggcccugaacacgcucgugaagcagcuguccagcaacuucggcgccaucuccagcgugcugaacgacauccucucccgccuggacaaggucgaggccgaggugcagaucgaccggcugaucaccgggcgccuccagagccugcagaccuacgugacccagcagcugauccgggcggccgagauccgcgccagcgccaaccucgccgcgaccaagauguccgagugcguccugggccagagcaagcggguggacuucugcggcaagggguaccaccugauguccuucccccagugcgccccgcacggcguggucuuccuccacgugacguacguccccgcccaggagaagaacuucaccaccgcccccgcgaucugccacgacgggaaggcccacuucccccgcgagggcguguucguguccaacgggacccacugguucgucacgcagcggaacuucuacgagccgcagaucaucaccaccgacaacaccuucgugagcggcaacugcgacguggucaucggcaucgugaacaacacgguguacgacccccugcagcccgagcuggacuccuucaaggaggagcucgacaaguacuucaagaaccacaccagccccgacgucgaccugggggacaucuccggcaucaacgccagcguggugaacauccagaaggagaucgaccgccugaacgaggucgccaagaaccucaacgagucccugaucgaccugcaggagcucgggaaguacgagcaguacaucaagggcggcgggagcgggggcgggcagaucuacgagggcaagcugaccgccgaggggcuccgcuucggcaucguggccagccgguucaaccacgcgcuggucgaccgccugguggagggggccaucgacgccaucgugcggcacggcgggcgcgaggaggacaucacccucguccgggugcccggcuccugggagaucccgguggccgccggcgagcuggcccgcaaggaggacaucgacgcggucaucgccaucggggugcugauccggggcgccacgccccacuucgacuacaucgccagcgagguguccaaggggcucgcggaccugagccuggagcuccgcaagcccaucaccuucggcgucaucaccgccgacacccuggagcaggccaucgagcgggccgggacgaagcacggcaacaagggcugggaggccgcgcuguccgccaucgagauggccaaccucuucaagagccugcgcuga

SEQ ID NO: 11862 - RNA, 4140 nt, Artificial Sequence
  SARS-CoV-2/Wuhan/WIV05/2019__EPI_ISL_402128 spike protein CDS gc (1-1211) Ferritin construct
auguucguguuccugguccuccugccccuggugagcucccagugcgugaaccucaccacccgcacgcagcugccgcccgccuacaccaacagcuucacccggggcgucuacuaccccgacaagguguuccgcuccagcgugcugcacuccacccaggaccucuuccugcccuucuucagcaacgucacgugguuccacgccauccacguguccgggaccaacggcaccaagcgguucgacaacccggugcugcccuucaacgacggggucuacuucgcgagcaccgagaaguccaacaucauccgcggcuggaucuucgggacgacccucgacagcaagacccagucccugcugaucgugaacaacgccaccaacguggucaucaaggugugcgaguuccaguucugcaacgaccccuuccucggcguguacuaccacaagaacaacaagagcuggauggaguccgaguuccgggucuacagcuccgccaacaacugcacguucgaguacgugagccagcccuuccugauggaccuggagggcaagcaggggaacuucaagaaccuccgcgaguucguguucaagaacaucgacggcuacuucaagaucuacuccaagcacaccccgaucaaccugguccgggaccugccccagggguucagcgcccucgagccccugguggaccugcccaucggcaucaacaucacccgcuuccagacccuccuggcccugcaccgguccuaccucacgccgggggacagcagcuccggcuggaccgcgggcgccgccgccuacuacgugggguaccugcagccccgcaccuuccugcucaaguacaacgagaacggcaccaucacggacgcggucgacugcgcccuggacccccugagcgagaccaagugcacccucaaguccuucaccguggagaaggggaucuaccagacgagcaacuuccgggugcagcccaccgaguccaucguccgcuucccgaacaucaccaaccugugccccuucggcgagguguucaacgccacccgguucgccagcgucuacgccuggaaccgcaagcggaucuccaacugcguggcggacuacagcgugcuguacaacuccgccagcuucuccacguucaagugcuacggcgucagccccaccaagcucaacgaccugugcuucaccaacguguacgccgacuccuucgugauccgcggggacgagguccggcagaucgcccccggccagaccgggaagaucgccgacuacaacuacaagcugccggacgacuucacgggcugcgugaucgcguggaacagcaacaaccucgacuccaaggucgggggcaacuacaacuaccuguaccgccuguuccgcaagagcaaccucaagcccuucgagcgggacaucuccaccgagaucuaccaggccggcagcacccccugcaacgggguggagggcuucaacugcuacuucccccugcaguccuacggguuccagccgaccaacggcgugggguaccagcccuaccggguggucgugcugagcuucgagcuccugcacgcccccgccacggugugcggccccaagaaguccaccaaccuggucaagaacaagugcgugaacuucaacuucaacggccucaccgggaccggcgugcugaccgagagcaacaagaaguuccugccguuccagcaguucgggcgcgacaucgccgacacgaccgacgcgguccgcgacccccagacccuggagauccucgacaucacccccugcagcuucggcgggguguccgugaucacgccgggcaccaacaccagcaaccaggucgccgugcuguaccaggacgugaacugcaccgagguccccguggccauccacgccgaccagcugacgcccaccuggcggguguacuccaccggcagcaacgucuuccagacccgcgccgggugccucaucggcgcggagcacgugaacaacuccuacgagugcgacauccccaucggggccggcaucugcgccagcuaccagacgcagaccaacuccccgcggcgcgcccggagcguggcgucccagagcaucaucgccuacaccaugucccugggcgccgagaacagcgucgccuacuccaacaacagcaucgccauccccaccaacuucacgaucuccgugaccaccgagauccugcccgugagcaugaccaagacgagcgucgacugcaccauguacaucugcggggacuccaccgagugcagcaaccuccugcugcaguacggcuccuucugcacccagcucaaccgcgcgcugacggggaucgccguggagcaggacaagaacacccaggagguguucgcccaggucaagcagaucuacaagacgcccccgaucaaggacuucggcggguucaacuucagccagauccugcccgaccccuccaagcccagcaagcgguccuucaucgaggaccuccuguucaacaaggugacccuggccgacgccggcuucaucaagcaguacggcgacugccucggggacaucgcggcccgcgaccugaucugcgcccagaaguucaacggccugaccgugcucccgccccugcugaccgacgagaugaucgcccaguacaccagcgcccuccuggcggggaccaucacguccggcuggaccuucggggccggcgccgcccugcagauccccuucgcgaugcagauggccuaccgguucaacggcaucggggucacccagaacgugcucuacgagaaccagaagcugaucgccaaccaguucaacagcgccaucggcaagauccaggacucccugagcuccaccgccagcgcgcucgggaagcugcaggacguggucaaccagaacgcccaggcccugaacacgcucgugaagcagcuguccagcaacuucggcgccaucuccagcgugcugaacgacauccucucccgccuggacaaggucgaggccgaggugcagaucgaccggcugaucaccgggcgccuccagagccugcagaccuacgugacccagcagcugauccgggcggccgagauccgcgccagcgccaaccucgccgcgaccaagauguccgagugcguccugggccagagcaagcggguggacuucugcggcaagggguaccaccugauguccuucccccagagcgccccgcacggcguggucuuccuccacgugacguacguccccgcccaggagaagaacuucaccaccgcccccgcgaucugccacgacgggaaggcccacuucccccgcgagggcguguucguguccaacgggacccacugguucgucacgcagcggaacuucuacgagccgcagaucaucaccaccgacaacaccuucgugagcggcaacugcgacguggucaucggcaucgugaacaacacgguguacgacccccugcagcccgagcuggacuccuucaaggaggagcucgacaaguacuucaagaaccacaccagccccgacgucgaccugggggacaucuccggcaucaacgccagcguggugaacauccagaaggagaucgaccgccugaacgaggucgccaagaaccucaacgagucccugaucgaccugcaggagcucgggaaguacgagcaguacaucaagggcgggggcgggagcgacaucaucaagcuccugaacgagcaggucaacaaggagaugcaguccagcaaccuguacauguccaugagcuccuggugcuacacccacagccucgacggcgccgggcuguuccuguucgaccacgccgcggaggaguacgagcacgccaagaagcucaucaucuuccugaacgagaacaacgugcccgugcagcugaccuccaucagcgccccggagcacaaguucgagggccucacgcagaucuuccagaaggccuacgagcacgagcagcacaucuccgagagcaucaacaacaucguggaccacgccaucaaguccaaggaccacgcgaccuucaacuuccugcagugguacgucgccgagcagcacgaggaggaggugcuguucaaggacauccucgacaagaucgagcugaucgggaacgagaaccacggccuguaccucgccgaccaguacgugaaggggaucgccaagagccgcaaguccuga

SEQ ID NO: 11863 - RNA, 4140 nt, Artificial Sequence
  SARS-CoV-2/Wuhan/WIV05/2019__EPI_ISL_402128 spike protein CDS gc (1-1211)(K986P_V987P) Ferritin construct
auguucguguuccugguccuccugccccuggugagcucccagugcgugaaccucaccacccgcacgcagcugccgcccgccuacaccaacagcuucacccggggcgucuacuaccccgacaagguguuccgcuccagcgugcugcacuccacccaggaccucuuccugcccuucuucagcaacgucacgugguuccacgccauccacguguccgggaccaacggcaccaagcgguucgacaacccggugcugcccuucaacgacggggucuacuucgcgagcaccgagaaguccaacaucauccgcggcuggaucuucgggacgacccucgacagcaagacccagucccugcugaucgugaacaacgccaccaacguggucaucaaggugugcgaguuccaguucugcaacgaccccuuccucggcguguacuaccacaagaacaacaagagcuggauggaguccgaguuccgggucuacagcuccgccaacaacugcacguucgaguacgugagccagcccuuccugauggaccuggagggcaagcaggggaacuucaagaaccuccgcgaguucguguucaagaacaucgacggcuacuucaagaucuacuccaagcacaccccgaucaaccugguccgggaccugccccagggguucagcgcccucgagccccugguggaccugcccaucggcaucaacaucacccgcuuccagacccuccuggcccugcaccgguccuaccucacgccgggggacagcagcuccggcuggaccgcgggcgccgccgccuacuacgugggguaccugcagccccgcaccuuccugcucaaguacaacgagaacggcaccaucacggacgcggucgacugcgcccuggacccccugagcgagaccaagugcacccucaaguccuucaccguggagaaggggaucuaccagacgagcaacuuccgggugcagcccaccgaguccaucguccgcuucccgaacaucaccaaccugugccccuucggcgagguguucaacgccacccgguucgccagcgucuacgccuggaaccgcaagcggaucuccaacugcguggcggacuacagcgugcuguacaacuccgccagcuucuccacguucaagugcuacggcgucagccccaccaagcucaacgaccugugcuucaccaacguguacgccgacuccuucgugauccgcggggacgagguccggcagaucgcccccggccagaccgggaagaucgccgacuacaacuacaagcugccggacgacuucacgggcugcgugaucgcguggaacagcaacaaccucgacuccaaggucgggggcaacuacaacuaccuguaccgccuguuccgcaagagcaaccucaagcccuucgagcgggacaucuccaccgagaucuaccaggccggcagcacccccugcaacgggguggagggcuucaacugcuacuucccccugcaguccuacggguuccagccgaccaacggcgugggguaccagcccuaccggguggucgugcugagcuucgagcuccugcacgcccccgccacggugugcggccccaagaaguccaccaaccuggucaagaacaagugcgugaacuucaacuucaacggccucaccgggaccggcgugcugaccgagagcaacaagaaguuccugccguuccagcaguucgggcgcgacaucgccgacacgaccgacgcgguccgcgacccccagacccuggagauccucgacaucacccccugcagcuucggcgggguguccgugaucacgccgggcaccaacaccagcaaccaggucgccgugcuguaccaggacgugaacugcaccgagguccccguggccauccacgccgaccagcugacgcccaccuggcggguguacuccaccggcagcaacgucuuccagacccgcgccgggugccucaucggcgcggagcacgugaacaacuccuacgagugcgacauccccaucggggccggcaucugcgccagcuaccagacgcagaccaacuccccgcggcgcgcccggagcguggcgucccagagcaucaucgccuacaccaugucccugggcgccgagaacagcgucgccuacuccaacaacagcaucgccauccccaccaacuucacgaucuccgugaccaccgagauccugcccgugagcaugaccaagacgagcgucgacugcaccauguacaucugcggggacuccaccgagugcagcaaccuccugcugcaguacggcuccuucugcacccagcucaaccgcgcgcugacggggaucgccguggagcaggacaagaacacccaggagguguucgcccaggucaagcagaucuacaagacgcccccgaucaaggacuucggcggguucaacuucagccagauccugcccgaccccuccaagcccagcaagcgguccuucaucgaggaccuccuguucaacaaggugacccuggccgacgccggcuucaucaagcaguacggcgacugccucggggacaucgcggcccgcgaccugaucugcgcccagaaguucaacggccugaccgugcucccgccccugcugaccgacgagaugaucgcccaguacaccagcgcccuccuggcggggaccaucacguccggcuggaccuucggggccggcgccgcccugcagauccccuucgcgaugcagauggccuaccgguucaacggcaucggggucacccagaacgugcucuacgagaaccagaagcugaucgccaaccaguucaacagcgccaucggcaagauccaggacucccugagcuccaccgccagcgcgcucgggaagcugcaggacguggucaaccagaacgcccaggcccugaacacgcucgugaagcagcuguccagcaacuucggcgccaucuccagcgugcugaacgacauccucucccgccuggacccgcccgaggccgaggugcagaucgaccggcugaucaccgggcgccuccagagccugcagaccuacgugacccagcagcugauccgggcggccgagauccgcgccagcgccaaccucgccgcgaccaagauguccgagugcguccugggccagagcaagcggguggacuucugcggcaagggguaccaccugauguccuucccccagagcgccccgcacggcguggucuuccuccacgugacguacguccccgcccaggagaagaacuucaccaccgcccccgcgaucugccacgacgggaaggcccacuucccccgcgagggcguguucguguccaacgggacccacugguucgucacgcagcggaacuucuacgagccgcagaucaucaccaccgacaacaccuucgugagcggcaacugcgacguggucaucggcaucgugaacaacacgguguacgacccccugcagcccgagcuggacuccuucaaggaggagcucgacaaguacuucaagaaccacaccagccccgacgucgaccugggggacaucuccggcaucaacgccagcguggugaacauccagaaggagaucgaccgccugaacgaggucgccaagaaccucaacgagucccugaucgaccugcaggagcucgggaaguacgagcaguacaucaagggcgggggcgggagcgacaucaucaagcuccugaacgagcaggucaacaaggagaugcaguccagcaaccuguacauguccaugagcuccuggugcuacacccacagccucgacggcgccgggcuguuccuguucgaccacgccgcggaggaguacgagcacgccaagaagcucaucaucuuccugaacgagaacaacgugcccgugcagcugaccuccaucagcgccccggagcacaaguucgagggccucacgcagaucuuccagaaggccuacgagcacgagcagcacaucuccgagagcaucaacaacaucguggaccacgccaucaaguccaaggaccacgcgaccuucaacuuccugcagugguacgucgccgagcagcacgaggaggaggugcuguucaaggacauccucgacaagaucgagcugaucgggaacgagaaccacggccuguaccucgccgaccaguacgugaaggggaucgccaagagccgcaaguccuga

SEQ ID NO: 11864 - RNA, 4140 nt, Artificial Sequence
  SARS-CoV-2/Wuhan/WIV05/2019__EPI_ISL_402128 spike protein CDS gc (1-1211)(K986P_V987P_T887WN_A1020W) Ferritin construct
auguucguguuccugguccuccugccccuggugagcucccagugcgugaaccucaccacccgcacgcagcugccgcccgccuacaccaacagcuucacccggggcgucuacuaccccgacaagguguuccgcuccagcgugcugcacuccacccaggaccucuuccugcccuucuucagcaacgucacgugguuccacgccauccacguguccgggaccaacggcaccaagcgguucgacaacccggugcugcccuucaacgacggggucuacuucgcgagcaccgagaaguccaacaucauccgcggcuggaucuucgggacgacccucgacagcaagacccagucccugcugaucgugaacaacgccaccaacguggucaucaaggugugcgaguuccaguucugcaacgaccccuuccucggcguguacuaccacaagaacaacaagagcuggauggaguccgaguuccgggucuacagcuccgccaacaacugcacguucgaguacgugagccagcccuuccugauggaccuggagggcaagcaggggaacuucaagaaccuccgcgaguucguguucaagaacaucgacggcuacuucaagaucuacuccaagcacaccccgaucaaccugguccgggaccugccccagggguucagcgcccucgagccccugguggaccugcccaucggcaucaacaucacccgcuuccagacccuccuggcccugcaccgguccuaccucacgccgggggacagcagcuccggcuggaccgcgggcgccgccgccuacuacgugggguaccugcagccccgcaccuuccugcucaaguacaacgagaacggcaccaucacggacgcggucgacugcgcccuggacccccugagcgagaccaagugcacccucaaguccuucaccguggagaaggggaucuaccagacgagcaacuuccgggugcagcccaccgaguccaucguccgcuucccgaacaucaccaaccugugccccuucggcgagguguucaacgccacccgguucgccagcgucuacgccuggaaccgcaagcggaucuccaacugcguggcggacuacagcgugcuguacaacuccgccagcuucuccacguucaagugcuacggcgucagccccaccaagcucaacgaccugugcuucaccaacguguacgccgacuccuucgugauccgcggggacgagguccggcagaucgcccccggccagaccgggaagaucgccgacuacaacuacaagcugccggacgacuucacgggcugcgugaucgcguggaacagcaacaaccucgacuccaaggucgggggcaacuacaacuaccuguaccgccuguuccgcaagagcaaccucaagcccuucgagcgggacaucuccaccgagaucuaccaggccggcagcacccccugcaacgggguggagggcuucaacugcuacuucccccugcaguccuacggguuccagccgaccaacggcgugggguaccagcccuaccggguggucgugcugagcuucgagcuccugcacgcccccgccacggugugcggccccaagaaguccaccaaccuggucaagaacaagugcgugaacuucaacuucaacggccucaccgggaccggcgugcugaccgagagcaacaagaaguuccugccguuccagcaguucgggcgcgacaucgccgacacgaccgacgcgguccgcgacccccagacccuggagauccucgacaucacccccugcagcuucggcgggguguccgugaucacgccgggcaccaacaccagcaaccaggucgccgugcuguaccaggacgugaacugcaccgagguccccguggccauccacgccgaccagcugacgcccaccuggcggguguacuccaccggcagcaacgucuuccagacccgcgccgggugccucaucggcgcggagcacgugaacaacuccuacgagugcgacauccccaucggggccggcaucugcgccagcuaccagacgcagaccaacuccccgcggcgcgcccggagcguggcgucccagagcaucaucgccuacaccaugucccugggcgccgagaacagcgucgccuacuccaacaacagcaucgccauccccaccaacuucacgaucuccgugaccaccgagauccugcccgugagcaugaccaagacgagcgucgacugcaccauguacaucugcggggacuccaccgagugcagcaaccuccugcugcaguacggcuccuucugcacccagcucaaccgcgcgcugacggggaucgccguggagcaggacaagaacacccaggagguguucgcccaggucaagcagaucuacaagacgcccccgaucaaggacuucggcggguucaacuucagccagauccugcccgaccccuccaagcccagcaagcgguccuucaucgaggaccuccuguucaacaaggugacccuggccgacgccggcuucaucaagcaguacggcgacugccucggggacaucgcggcccgcgaccugaucugcgcccagaaguucaacggccugaccgugcucccgccccugcugaccgacgagaugaucgcccaguacaccagcgcccuccuggcggggaccaucacguccggcuggugguucggggccggcgccgcccugcagauccccuucgcgaugcagauggccuaccgguucaacggcaucggggucacccagaacgugcucuacgagaaccagaagcugaucgccaaccaguucaacagcgccaucggcaagauccaggacucccugagcuccaccgccagcgcgcucgggaagcugcaggacguggucaaccagaacgcccaggcccugaacacgcucgugaagcagcuguccagcaacuucggcgccaucuccagcgugcugaacgacauccucucccgccuggacccgcccgaggccgaggugcagaucgaccggcugaucaccgggcgccuccagagccugcagaccuacgugacccagcagcugauccgggcggccgagauccgcuggagcgccaaccucgccgcgaccaagauguccgagugcguccugggccagagcaagcggguggacuucugcggcaagggguaccaccugauguccuucccccagagcgccccgcacggcguggucuuccuccacgugacguacguccccgcccaggagaagaacuucaccaccgcccccgcgaucugccacgacgggaaggcccacuucccccgcgagggcguguucguguccaacgggacccacugguucgucacgcagcggaacuucuacgagccgcagaucaucaccaccgacaacaccuucgugagcggcaacugcgacguggucaucggcaucgugaacaacacgguguacgacccccugcagcccgagcuggacuccuucaaggaggagcucgacaaguacuucaagaaccacaccagccccgacgucgaccugggggacaucuccggcaucaacgccagcguggugaacauccagaaggagaucgaccgccugaacgaggucgccaagaaccucaacgagucccugaucgaccugcaggagcucgggaaguacgagcaguacaucaagggcgggggcgggagcgacaucaucaagcuccugaacgagcaggucaacaaggagaugcaguccagcaaccuguacauguccaugagcuccuggugcuacacccacagccucgacggcgccgggcuguuccuguucgaccacgccgcggaggaguacgagcacgccaagaagcucaucaucuuccugaacgagaacaacgugcccgugcagcugaccuccaucagcgccccggagcacaaguucgagggccucacgcagaucuuccagaaggccuacgagcacgagcagcacaucuccgagagcaucaacaacaucguggaccacgccaucaaguccaaggaccacgcgaccuucaacuuccugcagugguacgucgccgagcagcacgaggaggaggugcuguucaaggacauccucgacaagaucgagcugaucgggaacgagaaccacggccuguaccucgccgaccaguacgugaaggggaucgccaagagccgcaaguccuga

SEQ ID NO: 11865 - RNA, 4140 nt, Artificial Sequence
  SARS-CoV-2/Wuhan/WIV05/2019__EPI_ISL_402128 spike protein CDS gc (1-1211)(K986P_V987P_P1069F) Ferritin construct
auguucguguuccugguccuccugccccuggugagcucccagugcgugaaccucaccacccgcacgcagcugccgcccgccuacaccaacagcuucacccggggcgucuacuaccccgacaagguguuccgcuccagcgugcugcacuccacccaggaccucuuccugcccuucuucagcaacgucacgugguuccacgccauccacguguccgggaccaacggcaccaagcgguucgacaacccggugcugcccuucaacgacggggucuacuucgcgagcaccgagaaguccaacaucauccgcggcuggaucuucgggacgacccucgacagcaagacccagucccugcugaucgugaacaacgccaccaacguggucaucaaggugugcgaguuccaguucugcaacgaccccuuccucggcguguacuaccacaagaacaacaagagcuggauggaguccgaguuccgggucuacagcuccgccaacaacugcacguucgaguacgugagccagcccuuccugauggaccuggagggcaagcaggggaacuucaagaaccuccgcgaguucguguucaagaacaucgacggcuacuucaagaucuacuccaagcacaccccgaucaaccugguccgggaccugccccagggguucagcgcccucgagccccugguggaccugcccaucggcaucaacaucacccgcuuccagacccuccuggcccugcaccgguccuaccucacgccgggggacagcagcuccggcuggaccgcgggcgccgccgccuacuacgugggguaccugcagccccgcaccuuccugcucaaguacaacgagaacggcaccaucacggacgcggucgacugcgcccuggacccccugagcgagaccaagugcacccucaaguccuucaccguggagaaggggaucuaccagacgagcaacuuccgggugcagcccaccgaguccaucguccgcuucccgaacaucaccaaccugugccccuucggcgagguguucaacgccacccgguucgccagcgucuacgccuggaaccgcaagcggaucuccaacugcguggcggacuacagcgugcuguacaacuccgccagcuucuccacguucaagugcuacggcgucagccccaccaagcucaacgaccugugcuucaccaacguguacgccgacuccuucgugauccgcggggacgagguccggcagaucgcccccggccagaccgggaagaucgccgacuacaacuacaagcugccggacgacuucacgggcugcgugaucgcguggaacagcaacaaccucgacuccaaggucgggggcaacuacaacuaccuguaccgccuguuccgcaagagcaaccucaagcccuucgagcgggacaucuccaccgagaucuaccaggccggcagcacccccugcaacgggguggagggcuucaacugcuacuucccccugcaguccuacggguuccagccgaccaacggcgugggguaccagcccuaccggguggucgugcugagcuucgagcuccugcacgcccccgccacggugugcggccccaagaaguccaccaaccuggucaagaacaagugcgugaacuucaacuucaacggccucaccgggaccggcgugcugaccgagagcaacaagaaguuccugccguuccagcaguucgggcgcgacaucgccgacacgaccgacgcgguccgcgacccccagacccuggagauccucgacaucacccccugcagcuucggcgggguguccgugaucacgccgggcaccaacaccagcaaccaggucgccgugcuguaccaggacgugaacugcaccgagguccccguggccauccacgccgaccagcugacgcccaccuggcggguguacuccaccggcagcaacgucuuccagacccgcgccgggugccucaucggcgcggagcacgugaacaacuccuacgagugcgacauccccaucggggccggcaucugcgccagcuaccagacgcagaccaacuccccgcggcgcgcccggagcguggcgucccagagcaucaucgccuacaccaugucccugggcgccgagaacagcgucgccuacuccaacaacagcaucgccauccccaccaacuucacgaucuccgugaccaccgagauccugcccgugagcaugaccaagacgagcgucgacugcaccauguacaucugcggggacuccaccgagugcagcaaccuccugcugcaguacggcuccuucugcacccagcucaaccgcgcgcugacggggaucgccguggagcaggacaagaacacccaggagguguucgcccaggucaagcagaucuacaagacgcccccgaucaaggacuucggcggguucaacuucagccagauccugcccgaccccuccaagcccagcaagcgguccuucaucgaggaccuccuguucaacaaggugacccuggccgacgccggcuucaucaagcaguacggcgacugccucggggacaucgcggcccgcgaccugaucugcgcccagaaguucaacggccugaccgugcucccgccccugcugaccgacgagaugaucgcccaguacaccagcgcccuccuggcggggaccaucacguccggcuggaccuucggggccggcgccgcccugcagauccccuucgcgaugcagauggccuaccgguucaacggcaucggggucacccagaacgugcucuacgagaaccagaagcugaucgccaaccaguucaacagcgccaucggcaagauccaggacucccugagcuccaccgccagcgcgcucgggaagcugcaggacguggucaaccagaacgcccaggcccugaacacgcucgugaagcagcuguccagcaacuucggcgccaucuccagcgugcugaacgacauccucucccgccuggacccgcccgaggccgaggugcagaucgaccggcugaucaccgggcgccuccagagccugcagaccuacgugacccagcagcugauccgggcggccgagauccgcgccagcgccaaccucgccgcgaccaagauguccgagugcguccugggccagagcaagcggguggacuucugcggcaagggguaccaccugauguccuucccccagagcgccccgcacggcguggucuuccuccacgugacguacgucuucgcccaggagaagaacuucaccaccgcccccgcgaucugccacgacgggaaggcccacuucccccgcgagggcguguucguguccaacgggacccacugguucgucacgcagcggaacuucuacgagccgcagaucaucaccaccgacaacaccuucgugagcggcaacugcgacguggucaucggcaucgugaacaacacgguguacgacccccugcagcccgagcuggacuccuucaaggaggagcucgacaaguacuucaagaaccacaccagccccgacgucgaccugggggacaucuccggcaucaacgccagcguggugaacauccagaaggagaucgaccgccugaacgaggucgccaagaaccucaacgagucccugaucgaccugcaggagcucgggaaguacgagcaguacaucaagggcgggggcgggagcgacaucaucaagcuccugaacgagcaggucaacaaggagaugcaguccagcaaccuguacauguccaugagcuccuggugcuacacccacagccucgacggcgccgggcuguuccuguucgaccacgccgcggaggaguacgagcacgccaagaagcucaucaucuuccugaacgagaacaacgugcccgugcagcugaccuccaucagcgccccggagcacaaguucgagggccucacgcagaucuuccagaaggccuacgagcacgagcagcacaucuccgagagcaucaacaacaucguggaccacgccaucaaguccaaggaccacgcgaccuucaacuuccugcagugguacgucgccgagcagcacgaggaggaggugcuguucaaggacauccucgacaagaucgagcugaucgggaacgagaaccacggccuguaccucgccgaccaguacgugaaggggaucgccaagagccgcaaguccuga

SEQ ID NO: 11866 - RNA, 4140 nt, Artificial Sequence
  SARS-CoV-2/Wuhan/WIV05/2019__EPI_ISL_402128 spike protein CDS gc (1-1211)(K986P_V987P_ H1048Q_H1064N_ H1083N_H1101N) Ferritin construct
auguucguguuccugguccuccugccccuggugagcucccagugcgugaaccucaccacccgcacgcagcugccgcccgccuacaccaacagcuucacccggggcgucuacuaccccgacaagguguuccgcuccagcgugcugcacuccacccaggaccucuuccugcccuucuucagcaacgucacgugguuccacgccauccacguguccgggaccaacggcaccaagcgguucgacaacccggugcugcccuucaacgacggggucuacuucgcgagcaccgagaaguccaacaucauccgcggcuggaucuucgggacgacccucgacagcaagacccagucccugcugaucgugaacaacgccaccaacguggucaucaaggugugcgaguuccaguucugcaacgaccccuuccucggcguguacuaccacaagaacaacaagagcuggauggaguccgaguuccgggucuacagcuccgccaacaacugcacguucgaguacgugagccagcccuuccugauggaccuggagggcaagcaggggaacuucaagaaccuccgcgaguucguguucaagaacaucgacggcuacuucaagaucuacuccaagcacaccccgaucaaccugguccgggaccugccccagggguucagcgcccucgagccccugguggaccugcccaucggcaucaacaucacccgcuuccagacccuccuggcccugcaccgguccuaccucacgccgggggacagcagcuccggcuggaccgcgggcgccgccgccuacuacgugggguaccugcagccccgcaccuuccugcucaaguacaacgagaacggcaccaucacggacgcggucgacugcgcccuggacccccugagcgagaccaagugcacccucaaguccuucaccguggagaaggggaucuaccagacgagcaacuuccgggugcagcccaccgaguccaucguccgcuucccgaacaucaccaaccugugccccuucggcgagguguucaacgccacccgguucgccagcgucuacgccuggaaccgcaagcggaucuccaacugcguggcggacuacagcgugcuguacaacuccgccagcuucuccacguucaagugcuacggcgucagccccaccaagcucaacgaccugugcuucaccaacguguacgccgacuccuucgugauccgcggggacgagguccggcagaucgcccccggccagaccgggaagaucgccgacuacaacuacaagcugccggacgacuucacgggcugcgugaucgcguggaacagcaacaaccucgacuccaaggucgggggcaacuacaacuaccuguaccgccuguuccgcaagagcaaccucaagcccuucgagcgggacaucuccaccgagaucuaccaggccggcagcacccccugcaacgggguggagggcuucaacugcuacuucccccugcaguccuacggguuccagccgaccaacggcgugggguaccagcccuaccggguggucgugcugagcuucgagcuccugcacgcccccgccacggugugcggccccaagaaguccaccaaccuggucaagaacaagugcgugaacuucaacuucaacggccucaccgggaccggcgugcugaccgagagcaacaagaaguuccugccguuccagcaguucgggcgcgacaucgccgacacgaccgacgcgguccgcgacccccagacccuggagauccucgacaucacccccugcagcuucggcgggguguccgugaucacgccgggcaccaacaccagcaaccaggucgccgugcuguaccaggacgugaacugcaccgagguccccguggccauccacgccgaccagcugacgcccaccuggcggguguacuccaccggcagcaacgucuuccagacccgcgccgggugccucaucggcgcggagcacgugaacaacuccuacgagugcgacauccccaucggggccggcaucugcgccagcuaccagacgcagaccaacuccccgcggcgcgcccggagcguggcgucccagagcaucaucgccuacaccaugucccugggcgccgagaacagcgucgccuacuccaacaacagcaucgccauccccaccaacuucacgaucuccgugaccaccgagauccugcccgugagcaugaccaagacgagcgucgacugcaccauguacaucugcggggacuccaccgagugcagcaaccuccugcugcaguacggcuccuucugcacccagcucaaccgcgcgcugacggggaucgccguggagcaggacaagaacacccaggagguguucgcccaggucaagcagaucuacaagacgcccccgaucaaggacuucggcggguucaacuucagccagauccugcccgaccccuccaagcccagcaagcgguccuucaucgaggaccuccuguucaacaaggugacccuggccgacgccggcuucaucaagcaguacggcgacugccucggggacaucgcggcccgcgaccugaucugcgcccagaaguucaacggccugaccgugcucccgccccugcugaccgacgagaugaucgcccaguacaccagcgcccuccuggcggggaccaucacguccggcuggaccuucggggccggcgccgcccugcagauccccuucgcgaugcagauggccuaccgguucaacggcaucggggucacccagaacgugcucuacgagaaccagaagcugaucgccaaccaguucaacagcgccaucggcaagauccaggacucccugagcuccaccgccagcgcgcucgggaagcugcaggacguggucaaccagaacgcccaggcccugaacacgcucgugaagcagcuguccagcaacuucggcgccaucuccagcgugcugaacgacauccucucccgccuggacccgcccgaggccgaggugcagaucgaccggcugaucaccgggcgccuccagagccugcagaccuacgugacccagcagcugauccgggcggccgagauccgcgccagcgccaaccucgccgcgaccaagauguccgagugcguccugggccagagcaagcggguggacuucugcggcaagggguaccagcugauguccuucccccagagcgccccgcacggcguggucuuccucaacgugacguacguccccgcccaggagaagaacuucaccaccgcccccgcgaucugcaacgacgggaaggcccacuucccccgcgagggcguguucguguccaacgggaccaacugguucgucacgcagcggaacuucuacgagccgcagaucaucaccaccgacaacaccuucgugagcggcaacugcgacguggucaucggcaucgugaacaacacgguguacgacccccugcagcccgagcuggacuccuucaaggaggagcucgacaaguacuucaagaaccacaccagccccgacgucgaccugggggacaucuccggcaucaacgccagcguggugaacauccagaaggagaucgaccgccugaacgaggucgccaagaaccucaacgagucccugaucgaccugcaggagcucgggaaguacgagcaguacaucaagggcgggggcgggagcgacaucaucaagcuccugaacgagcaggucaacaaggagaugcaguccagcaaccuguacauguccaugagcuccuggugcuacacccacagccucgacggcgccgggcuguuccuguucgaccacgccgcggaggaguacgagcacgccaagaagcucaucaucuuccugaacgagaacaacgugcccgugcagcugaccuccaucagcgccccggagcacaaguucgagggccucacgcagaucuuccagaaggccuacgagcacgagcagcacaucuccgagagcaucaacaacaucguggaccacgccaucaaguccaaggaccacgcgaccuucaacuuccugcagugguacgucgccgagcagcacgaggaggaggugcuguucaaggacauccucgacaagaucgagcugaucgggaacgagaaccacggccuguaccucgccgaccaguacgugaaggggaucgccaagagccgcaaguccuga

SEQ ID NO: 11867 - RNA, 4140 nt, Artificial Sequence
  SARS-CoV-2/Wuhan/WIV05/2019__EPI_ISL_402128 spike protein CDS gc (1-1211)(I712C_T1077C) Ferritin construct
auguucguguuccugguccuccugccccuggugagcucccagugcgugaaccucaccacccgcacgcagcugccgcccgccuacaccaacagcuucacccggggcgucuacuaccccgacaagguguuccgcuccagcgugcugcacuccacccaggaccucuuccugcccuucuucagcaacgucacgugguuccacgccauccacguguccgggaccaacggcaccaagcgguucgacaacccggugcugcccuucaacgacggggucuacuucgcgagcaccgagaaguccaacaucauccgcggcuggaucuucgggacgacccucgacagcaagacccagucccugcugaucgugaacaacgccaccaacguggucaucaaggugugcgaguuccaguucugcaacgaccccuuccucggcguguacuaccacaagaacaacaagagcuggauggaguccgaguuccgggucuacagcuccgccaacaacugcacguucgaguacgugagccagcccuuccugauggaccuggagggcaagcaggggaacuucaagaaccuccgcgaguucguguucaagaacaucgacggcuacuucaagaucuacuccaagcacaccccgaucaaccugguccgggaccugccccagggguucagcgcccucgagccccugguggaccugcccaucggcaucaacaucacccgcuuccagacccuccuggcccugcaccgguccuaccucacgccgggggacagcagcuccggcuggaccgcgggcgccgccgccuacuacgugggguaccugcagccccgcaccuuccugcucaaguacaacgagaacggcaccaucacggacgcggucgacugcgcccuggacccccugagcgagaccaagugcacccucaaguccuucaccguggagaaggggaucuaccagacgagcaacuuccgggugcagcccaccgaguccaucguccgcuucccgaacaucaccaaccugugccccuucggcgagguguucaacgccacccgguucgccagcgucuacgccuggaaccgcaagcggaucuccaacugcguggcggacuacagcgugcuguacaacuccgccagcuucuccacguucaagugcuacggcgucagccccaccaagcucaacgaccugugcuucaccaacguguacgccgacuccuucgugauccgcggggacgagguccggcagaucgcccccggccagaccgggaagaucgccgacuacaacuacaagcugccggacgacuucacgggcugcgugaucgcguggaacagcaacaaccucgacuccaaggucgggggcaacuacaacuaccuguaccgccuguuccgcaagagcaaccucaagcccuucgagcgggacaucuccaccgagaucuaccaggccggcagcacccccugcaacgggguggagggcuucaacugcuacuucccccugcaguccuacggguuccagccgaccaacggcgugggguaccagcccuaccggguggucgugcugagcuucgagcuccugcacgcccccgccacggugugcggccccaagaaguccaccaaccuggucaagaacaagugcgugaacuucaacuucaacggccucaccgggaccggcgugcugaccgagagcaacaagaaguuccugccguuccagcaguucgggcgcgacaucgccgacacgaccgacgcgguccgcgacccccagacccuggagauccucgacaucacccccugcagcuucggcgggguguccgugaucacgccgggcaccaacaccagcaaccaggucgccgugcuguaccaggacgugaacugcaccgagguccccguggccauccacgccgaccagcugacgcccaccuggcggguguacuccaccggcagcaacgucuuccagacccgcgccgggugccucaucggcgcggagcacgugaacaacuccuacgagugcgacauccccaucggggccggcaucugcgccagcuaccagacgcagaccaacuccccgcggcgcgcccggagcguggcgucccagagcaucaucgccuacaccaugucccugggcgccgagaacagcgucgccuacuccaacaacagcugcgccauccccaccaacuucacgaucuccgugaccaccgagauccugcccgugagcaugaccaagacgagcgucgacugcaccauguacaucugcggggacuccaccgagugcagcaaccuccugcugcaguacggcuccuucugcacccagcucaaccgcgcgcugacggggaucgccguggagcaggacaagaacacccaggagguguucgcccaggucaagcagaucuacaagacgcccccgaucaaggacuucggcggguucaacuucagccagauccugcccgaccccuccaagcccagcaagcgguccuucaucgaggaccuccuguucaacaaggugacccuggccgacgccggcuucaucaagcaguacggcgacugccucggggacaucgcggcccgcgaccugaucugcgcccagaaguucaacggccugaccgugcucccgccccugcugaccgacgagaugaucgcccaguacaccagcgcccuccuggcggggaccaucacguccggcuggaccuucggggccggcgccgcccugcagauccccuucgcgaugcagauggccuaccgguucaacggcaucggggucacccagaacgugcucuacgagaaccagaagcugaucgccaaccaguucaacagcgccaucggcaagauccaggacucccugagcuccaccgccagcgcgcucgggaagcugcaggacguggucaaccagaacgcccaggcccugaacacgcucgugaagcagcuguccagcaacuucggcgccaucuccagcgugcugaacgacauccucucccgccuggacaaggucgaggccgaggugcagaucgaccggcugaucaccgggcgccuccagagccugcagaccuacgugacccagcagcugauccgggcggccgagauccgcgccagcgccaaccucgccgcgaccaagauguccgagugcguccugggccagagcaagcggguggacuucugcggcaagggguaccaccugauguccuucccccagagcgccccgcacggcguggucuuccuccacgugacguacguccccgcccaggagaagaacuucaccugcgcccccgcgaucugccacgacgggaaggcccacuucccccgcgagggcguguucguguccaacgggacccacugguucgucacgcagcggaacuucuacgagccgcagaucaucaccaccgacaacaccuucgugagcggcaacugcgacguggucaucggcaucgugaacaacacgguguacgacccccugcagcccgagcuggacuccuucaaggaggagcucgacaaguacuucaagaaccacaccagccccgacgucgaccugggggacaucuccggcaucaacgccagcguggugaacauccagaaggagaucgaccgccugaacgaggucgccaagaaccucaacgagucccugaucgaccugcaggagcucgggaaguacgagcaguacaucaagggcgggggcgggagcgacaucaucaagcuccugaacgagcaggucaacaaggagaugcaguccagcaaccuguacauguccaugagcuccuggugcuacacccacagccucgacggcgccgggcuguuccuguucgaccacgccgcggaggaguacgagcacgccaagaagcucaucaucuuccugaacgagaacaacgugcccgugcagcugaccuccaucagcgccccggagcacaaguucgagggccucacgcagaucuuccagaaggccuacgagcacgagcagcacaucuccgagagcaucaacaacaucguggaccacgccaucaaguccaaggaccacgcgaccuucaacuuccugcagugguacgucgccgagcagcacgaggaggaggugcuguucaaggacauccucgacaagaucgagcugaucgggaacgagaaccacggccuguaccucgccgaccaguacgugaaggggaucgccaagagccgcaaguccuga

SEQ ID NO: 11868 - RNA, 4140 nt, Artificial Sequence
  SARS-CoV-2/Wuhan/WIV05/2019__EPI_ISL_402128 spike protein CDS gc (1-1211)(I714C_Y1110C) Ferritin construct
auguucguguuccugguccuccugccccuggugagcucccagugcgugaaccucaccacccgcacgcagcugccgcccgccuacaccaacagcuucacccggggcgucuacuaccccgacaagguguuccgcuccagcgugcugcacuccacccaggaccucuuccugcccuucuucagcaacgucacgugguuccacgccauccacguguccgggaccaacggcaccaagcgguucgacaacccggugcugcccuucaacgacggggucuacuucgcgagcaccgagaaguccaacaucauccgcggcuggaucuucgggacgacccucgacagcaagacccagucccugcugaucgugaacaacgccaccaacguggucaucaaggugugcgaguuccaguucugcaacgaccccuuccucggcguguacuaccacaagaacaacaagagcuggauggaguccgaguuccgggucuacagcuccgccaacaacugcacguucgaguacgugagccagcccuuccugauggaccuggagggcaagcaggggaacuucaagaaccuccgcgaguucguguucaagaacaucgacggcuacuucaagaucuacuccaagcacaccccgaucaaccugguccgggaccugccccagggguucagcgcccucgagccccugguggaccugcccaucggcaucaacaucacccgcuuccagacccuccuggcccugcaccgguccuaccucacgccgggggacagcagcuccggcuggaccgcgggcgccgccgccuacuacgugggguaccugcagccccgcaccuuccugcucaaguacaacgagaacggcaccaucacggacgcggucgacugcgcccuggacccccugagcgagaccaagugcacccucaaguccuucaccguggagaaggggaucuaccagacgagcaacuuccgggugcagcccaccgaguccaucguccgcuucccgaacaucaccaaccugugccccuucggcgagguguucaacgccacccgguucgccagcgucuacgccuggaaccgcaagcggaucuccaacugcguggcggacuacagcgugcuguacaacuccgccagcuucuccacguucaagugcuacggcgucagccccaccaagcucaacgaccugugcuucaccaacguguacgccgacuccuucgugauccgcggggacgagguccggcagaucgcccccggccagaccgggaagaucgccgacuacaacuacaagcugccggacgacuucacgggcugcgugaucgcguggaacagcaacaaccucgacuccaaggucgggggcaacuacaacuaccuguaccgccuguuccgcaagagcaaccucaagcccuucgagcgggacaucuccaccgagaucuaccaggccggcagcacccccugcaacgggguggagggcuucaacugcuacuucccccugcaguccuacggguuccagccgaccaacggcgugggguaccagcccuaccggguggucgugcugagcuucgagcuccugcacgcccccgccacggugugcggccccaagaaguccaccaaccuggucaagaacaagugcgugaacuucaacuucaacggccucaccgggaccggcgugcugaccgagagcaacaagaaguuccugccguuccagcaguucgggcgcgacaucgccgacacgaccgacgcgguccgcgacccccagacccuggagauccucgacaucacccccugcagcuucggcgggguguccgugaucacgccgggcaccaacaccagcaaccaggucgccgugcuguaccaggacgugaacugcaccgagguccccguggccauccacgccgaccagcugacgcccaccuggcggguguacuccaccggcagcaacgucuuccagacccgcgccgggugccucaucggcgcggagcacgugaacaacuccuacgagugcgacauccccaucggggccggcaucugcgccagcuaccagacgcagaccaacuccccgcggcgcgcccggagcguggcgucccagagcaucaucgccuacaccaugucccugggcgccgagaacagcgucgccuacuccaacaacagcaucgccugccccaccaacuucacgaucuccgugaccaccgagauccugcccgugagcaugaccaagacgagcgucgacugcaccauguacaucugcggggacuccaccgagugcagcaaccuccugcugcaguacggcuccuucugcacccagcucaaccgcgcgcugacggggaucgccguggagcaggacaagaacacccaggagguguucgcccaggucaagcagaucuacaagacgcccccgaucaaggacuucggcggguucaacuucagccagauccugcccgaccccuccaagcccagcaagcgguccuucaucgaggaccuccuguucaacaaggugacccuggccgacgccggcuucaucaagcaguacggcgacugccucggggacaucgcggcccgcgaccugaucugcgcccagaaguucaacggccugaccgugcucccgccccugcugaccgacgagaugaucgcccaguacaccagcgcccuccuggcggggaccaucacguccggcuggaccuucggggccggcgccgcccugcagauccccuucgcgaugcagauggccuaccgguucaacggcaucggggucacccagaacgugcucuacgagaaccagaagcugaucgccaaccaguucaacagcgccaucggcaagauccaggacucccugagcuccaccgccagcgcgcucgggaagcugcaggacguggucaaccagaacgcccaggcccugaacacgcucgugaagcagcuguccagcaacuucggcgccaucuccagcgugcugaacgacauccucucccgccuggacaaggucgaggccgaggugcagaucgaccggcugaucaccgggcgccuccagagccugcagaccuacgugacccagcagcugauccgggcggccgagauccgcgccagcgccaaccucgccgcgaccaagauguccgagugcguccugggccagagcaagcggguggacuucugcggcaagggguaccaccugauguccuucccccagagcgccccgcacggcguggucuuccuccacgugacguacguccccgcccaggagaagaacuucaccaccgcccccgcgaucugccacgacgggaaggcccacuucccccgcgagggcguguucguguccaacgggacccacugguucgucacgcagcggaacuucugcgagccgcagaucaucaccaccgacaacaccuucgugagcggcaacugcgacguggucaucggcaucgugaacaacacgguguacgacccccugcagcccgagcuggacuccuucaaggaggagcucgacaaguacuucaagaaccacaccagccccgacgucgaccugggggacaucuccggcaucaacgccagcguggugaacauccagaaggagaucgaccgccugaacgaggucgccaagaaccucaacgagucccugaucgaccugcaggagcucgggaaguacgagcaguacaucaagggcgggggcgggagcgacaucaucaagcuccugaacgagcaggucaacaaggagaugcaguccagcaaccuguacauguccaugagcuccuggugcuacacccacagccucgacggcgccgggcuguuccuguucgaccacgccgcggaggaguacgagcacgccaagaagcucaucaucuuccugaacgagaacaacgugcccgugcagcugaccuccaucagcgccccggagcacaaguucgagggccucacgcagaucuuccagaaggccuacgagcacgagcagcacaucuccgagagcaucaacaacaucguggaccacgccaucaaguccaaggaccacgcgaccuucaacuuccugcagugguacgucgccgagcagcacgaggaggaggugcuguucaaggacauccucgacaagaucgagcugaucgggaacgagaaccacggccuguaccucgccgaccaguacgugaaggggaucgccaagagccgcaaguccuga

SEQ ID NO: 11869 - RNA, 4140 nt, Artificial Sequence
  SARS-CoV-2/Wuhan/WIV05/2019__EPI_ISL_402128 spike protein CDS gc (1-1211)(P715C_P1069C) Ferritin construct
auguucguguuccugguccuccugccccuggugagcucccagugcgugaaccucaccacccgcacgcagcugccgcccgccuacaccaacagcuucacccggggcgucuacuaccccgacaagguguuccgcuccagcgugcugcacuccacccaggaccucuuccugcccuucuucagcaacgucacgugguuccacgccauccacguguccgggaccaacggcaccaagcgguucgacaacccggugcugcccuucaacgacggggucuacuucgcgagcaccgagaaguccaacaucauccgcggcuggaucuucgggacgacccucgacagcaagacccagucccugcugaucgugaacaacgccaccaacguggucaucaaggugugcgaguuccaguucugcaacgaccccuuccucggcguguacuaccacaagaacaacaagagcuggauggaguccgaguuccgggucuacagcuccgccaacaacugcacguucgaguacgugagccagcccuuccugauggaccuggagggcaagcaggggaacuucaagaaccuccgcgaguucguguucaagaacaucgacggcuacuucaagaucuacuccaagcacaccccgaucaaccugguccgggaccugccccagggguucagcgcccucgagccccugguggaccugcccaucggcaucaacaucacccgcuuccagacccuccuggcccugcaccgguccuaccucacgccgggggacagcagcuccggcuggaccgcgggcgccgccgccuacuacgugggguaccugcagccccgcaccuuccugcucaaguacaacgagaacggcaccaucacggacgcggucgacugcgcccuggacccccugagcgagaccaagugcacccucaaguccuucaccguggagaaggggaucuaccagacgagcaacuuccgggugcagcccaccgaguccaucguccgcuucccgaacaucaccaaccugugccccuucggcgagguguucaacgccacccgguucgccagcgucuacgccuggaaccgcaagcggaucuccaacugcguggcggacuacagcgugcuguacaacuccgccagcuucuccacguucaagugcuacggcgucagccccaccaagcucaacgaccugugcuucaccaacguguacgccgacuccuucgugauccgcggggacgagguccggcagaucgcccccggccagaccgggaagaucgccgacuacaacuacaagcugccggacgacuucacgggcugcgugaucgcguggaacagcaacaaccucgacuccaaggucgggggcaacuacaacuaccuguaccgccuguuccgcaagagcaaccucaagcccuucgagcgggacaucuccaccgagaucuaccaggccggcagcacccccugcaacgggguggagggcuucaacugcuacuucccccugcaguccuacggguuccagccgaccaacggcgugggguaccagcccuaccggguggucgugcugagcuucgagcuccugcacgcccccgccacggugugcggccccaagaaguccaccaaccuggucaagaacaagugcgugaacuucaacuucaacggccucaccgggaccggcgugcugaccgagagcaacaagaaguuccugccguuccagcaguucgggcgcgacaucgccgacacgaccgacgcgguccgcgacccccagacccuggagauccucgacaucacccccugcagcuucggcgggguguccgugaucacgccgggcaccaacaccagcaaccaggucgccgugcuguaccaggacgugaacugcaccgagguccccguggccauccacgccgaccagcugacgcccaccuggcggguguacuccaccggcagcaacgucuuccagacccgcgccgggugccucaucggcgcggagcacgugaacaacuccuacgagugcgacauccccaucggggccggcaucugcgccagcuaccagacgcagaccaacuccccgcggcgcgcccggagcguggcgucccagagcaucaucgccuacaccaugucccugggcgccgagaacagcgucgccuacuccaacaacagcaucgccaucugcaccaacuucacgaucuccgugaccaccgagauccugcccgugagcaugaccaagacgagcgucgacugcaccauguacaucugcggggacuccaccgagugcagcaaccuccugcugcaguacggcuccuucugcacccagcucaaccgcgcgcugacggggaucgccguggagcaggacaagaacacccaggagguguucgcccaggucaagcagaucuacaagacgcccccgaucaaggacuucggcggguucaacuucagccagauccugcccgaccccuccaagcccagcaagcgguccuucaucgaggaccuccuguucaacaaggugacccuggccgacgccggcuucaucaagcaguacggcgacugccucggggacaucgcggcccgcgaccugaucugcgcccagaaguucaacggccugaccgugcucccgccccugcugaccgacgagaugaucgcccaguacaccagcgcccuccuggcggggaccaucacguccggcuggaccuucggggccggcgccgcccugcagauccccuucgcgaugcagauggccuaccgguucaacggcaucggggucacccagaacgugcucuacgagaaccagaagcugaucgccaaccaguucaacagcgccaucggcaagauccaggacucccugagcuccaccgccagcgcgcucgggaagcugcaggacguggucaaccagaacgcccaggcccugaacacgcucgugaagcagcuguccagcaacuucggcgccaucuccagcgugcugaacgacauccucucccgccuggacaaggucgaggccgaggugcagaucgaccggcugaucaccgggcgccuccagagccugcagaccuacgugacccagcagcugauccgggcggccgagauccgcgccagcgccaaccucgccgcgaccaagauguccgagugcguccugggccagagcaagcggguggacuucugcggcaagggguaccaccugauguccuucccccagagcgccccgcacggcguggucuuccuccacgugacguacgucugcgcccaggagaagaacuucaccaccgcccccgcgaucugccacgacgggaaggcccacuucccccgcgagggcguguucguguccaacgggacccacugguucgucacgcagcggaacuucuacgagccgcagaucaucaccaccgacaacaccuucgugagcggcaacugcgacguggucaucggcaucgugaacaacacgguguacgacccccugcagcccgagcuggacuccuucaaggaggagcucgacaaguacuucaagaaccacaccagccccgacgucgaccugggggacaucuccggcaucaacgccagcguggugaacauccagaaggagaucgaccgccugaacgaggucgccaagaaccucaacgagucccugaucgaccugcaggagcucgggaaguacgagcaguacaucaagggcgggggcgggagcgacaucaucaagcuccugaacgagcaggucaacaaggagaugcaguccagcaaccuguacauguccaugagcuccuggugcuacacccacagccucgacggcgccgggcuguuccuguucgaccacgccgcggaggaguacgagcacgccaagaagcucaucaucuuccugaacgagaacaacgugcccgugcagcugaccuccaucagcgccccggagcacaaguucgagggccucacgcagaucuuccagaaggccuacgagcacgagcagcacaucuccgagagcaucaacaacaucguggaccacgccaucaaguccaaggaccacgcgaccuucaacuuccugcagugguacgucgccgagcagcacgaggaggaggugcuguucaaggacauccucgacaagaucgagcugaucgggaacgagaaccacggccuguaccucgccgaccaguacgugaaggggaucgccaagagccgcaaguccuga

SEQ ID NO: 11870 - RNA, 4140 nt, Artificial Sequence
  SARS-CoV-2/Wuhan/WIV05/2019__EPI_ISL_402128 spike protein CDS gc (1-1211)(G889C_L1034C) Ferritin construct
auguucguguuccugguccuccugccccuggugagcucccagugcgugaaccucaccacccgcacgcagcugccgcccgccuacaccaacagcuucacccggggcgucuacuaccccgacaagguguuccgcuccagcgugcugcacuccacccaggaccucuuccugcccuucuucagcaacgucacgugguuccacgccauccacguguccgggaccaacggcaccaagcgguucgacaacccggugcugcccuucaacgacggggucuacuucgcgagcaccgagaaguccaacaucauccgcggcuggaucuucgggacgacccucgacagcaagacccagucccugcugaucgugaacaacgccaccaacguggucaucaaggugugcgaguuccaguucugcaacgaccccuuccucggcguguacuaccacaagaacaacaagagcuggauggaguccgaguuccgggucuacagcuccgccaacaacugcacguucgaguacgugagccagcccuuccugauggaccuggagggcaagcaggggaacuucaagaaccuccgcgaguucguguucaagaacaucgacggcuacuucaagaucuacuccaagcacaccccgaucaaccugguccgggaccugccccagggguucagcgcccucgagccccugguggaccugcccaucggcaucaacaucacccgcuuccagacccuccuggcccugcaccgguccuaccucacgccgggggacagcagcuccggcuggaccgcgggcgccgccgccuacuacgugggguaccugcagccccgcaccuuccugcucaaguacaacgagaacggcaccaucacggacgcggucgacugcgcccuggacccccugagcgagaccaagugcacccucaaguccuucaccguggagaaggggaucuaccagacgagcaacuuccgggugcagcccaccgaguccaucguccgcuucccgaacaucaccaaccugugccccuucggcgagguguucaacgccacccgguucgccagcgucuacgccuggaaccgcaagcggaucuccaacugcguggcggacuacagcgugcuguacaacuccgccagcuucuccacguucaagugcuacggcgucagccccaccaagcucaacgaccugugcuucaccaacguguacgccgacuccuucgugauccgcggggacgagguccggcagaucgcccccggccagaccgggaagaucgccgacuacaacuacaagcugccggacgacuucacgggcugcgugaucgcguggaacagcaacaaccucgacuccaaggucgggggcaacuacaacuaccuguaccgccuguuccgcaagagcaaccucaagcccuucgagcgggacaucuccaccgagaucuaccaggccggcagcacccccugcaacgggguggagggcuucaacugcuacuucccccugcaguccuacggguuccagccgaccaacggcgugggguaccagcccuaccggguggucgugcugagcuucgagcuccugcacgcccccgccacggugugcggccccaagaaguccaccaaccuggucaagaacaagugcgugaacuucaacuucaacggccucaccgggaccggcgugcugaccgagagcaacaagaaguuccugccguuccagcaguucgggcgcgacaucgccgacacgaccgacgcgguccgcgacccccagacccuggagauccucgacaucacccccugcagcuucggcgggguguccgugaucacgccgggcaccaacaccagcaaccaggucgccgugcuguaccaggacgugaacugcaccgagguccccguggccauccacgccgaccagcugacgcccaccuggcggguguacuccaccggcagcaacgucuuccagacccgcgccgggugccucaucggcgcggagcacgugaacaacuccuacgagugcgacauccccaucggggccggcaucugcgccagcuaccagacgcagaccaacuccccgcggcgcgcccggagcguggcgucccagagcaucaucgccuacaccaugucccugggcgccgagaacagcgucgccuacuccaacaacagcaucgccauccccaccaacuucacgaucuccgugaccaccgagauccugcccgugagcaugaccaagacgagcgucgacugcaccauguacaucugcggggacuccaccgagugcagcaaccuccugcugcaguacggcuccuucugcacccagcucaaccgcgcgcugacggggaucgccguggagcaggacaagaacacccaggagguguucgcccaggucaagcagaucuacaagacgcccccgaucaaggacuucggcggguucaacuucagccagauccugcccgaccccuccaagcccagcaagcgguccuucaucgaggaccuccuguucaacaaggugacccuggccgacgccggcuucaucaagcaguacggcgacugccucggggacaucgcggcccgcgaccugaucugcgcccagaaguucaacggccugaccgugcucccgccccugcugaccgacgagaugaucgcccaguacaccagcgcccuccuggcggggaccaucacguccggcuggaccuucugcgccggcgccgcccugcagauccccuucgcgaugcagauggccuaccgguucaacggcaucggggucacccagaacgugcucuacgagaaccagaagcugaucgccaaccaguucaacagcgccaucggcaagauccaggacucccugagcuccaccgccagcgcgcucgggaagcugcaggacguggucaaccagaacgcccaggcccugaacacgcucgugaagcagcuguccagcaacuucggcgccaucuccagcgugcugaacgacauccucucccgccuggacaaggucgaggccgaggugcagaucgaccggcugaucaccgggcgccuccagagccugcagaccuacgugacccagcagcugauccgggcggccgagauccgcgccagcgccaaccucgccgcgaccaagauguccgagugcgucugcggccagagcaagcggguggacuucugcggcaagggguaccaccugauguccuucccccagagcgccccgcacggcguggucuuccuccacgugacguacguccccgcccaggagaagaacuucaccaccgcccccgcgaucugccacgacgggaaggcccacuucccccgcgagggcguguucguguccaacgggacccacugguucgucacgcagcggaacuucuacgagccgcagaucaucaccaccgacaacaccuucgugagcggcaacugcgacguggucaucggcaucgugaacaacacgguguacgacccccugcagcccgagcuggacuccuucaaggaggagcucgacaaguacuucaagaaccacaccagccccgacgucgaccugggggacaucuccggcaucaacgccagcguggugaacauccagaaggagaucgaccgccugaacgaggucgccaagaaccucaacgagucccugaucgaccugcaggagcucgggaaguacgagcaguacaucaagggcgggggcgggagcgacaucaucaagcuccugaacgagcaggucaacaaggagaugcaguccagcaaccuguacauguccaugagcuccuggugcuacacccacagccucgacggcgccgggcuguuccuguucgaccacgccgcggaggaguacgagcacgccaagaagcucaucaucuuccugaacgagaacaacgugcccgugcagcugaccuccaucagcgccccggagcacaaguucgagggccucacgcagaucuuccagaaggccuacgagcacgagcagcacaucuccgagagcaucaacaacaucguggaccacgccaucaaguccaaggaccacgcgaccuucaacuuccugcagugguacgucgccgagcagcacgaggaggaggugcuguucaaggacauccucgacaagaucgagcugaucgggaacgagaaccacggccuguaccucgccgaccaguacgugaaggggaucgccaagagccgcaaguccuga

SEQ ID NO: 11871 - RNA, 4140 nt, Artificial Sequence
  SARS-CoV-2/Wuhan/WIV05/2019__EPI_ISL_402128 spike protein CDS gc (1-1211)(I909C_Y1047C) Ferritin construct
auguucguguuccugguccuccugccccuggugagcucccagugcgugaaccucaccacccgcacgcagcugccgcccgccuacaccaacagcuucacccggggcgucuacuaccccgacaagguguuccgcuccagcgugcugcacuccacccaggaccucuuccugcccuucuucagcaacgucacgugguuccacgccauccacguguccgggaccaacggcaccaagcgguucgacaacccggugcugcccuucaacgacggggucuacuucgcgagcaccgagaaguccaacaucauccgcggcuggaucuucgggacgacccucgacagcaagacccagucccugcugaucgugaacaacgccaccaacguggucaucaaggugugcgaguuccaguucugcaacgaccccuuccucggcguguacuaccacaagaacaacaagagcuggauggaguccgaguuccgggucuacagcuccgccaacaacugcacguucgaguacgugagccagcccuuccugauggaccuggagggcaagcaggggaacuucaagaaccuccgcgaguucguguucaagaacaucgacggcuacuucaagaucuacuccaagcacaccccgaucaaccugguccgggaccugccccagggguucagcgcccucgagccccugguggaccugcccaucggcaucaacaucacccgcuuccagacccuccuggcccugcaccgguccuaccucacgccgggggacagcagcuccggcuggaccgcgggcgccgccgccuacuacgugggguaccugcagccccgcaccuuccugcucaaguacaacgagaacggcaccaucacggacgcggucgacugcgcccuggacccccugagcgagaccaagugcacccucaaguccuucaccguggagaaggggaucuaccagacgagcaacuuccgggugcagcccaccgaguccaucguccgcuucccgaacaucaccaaccugugccccuucggcgagguguucaacgccacccgguucgccagcgucuacgccuggaaccgcaagcggaucuccaacugcguggcggacuacagcgugcuguacaacuccgccagcuucuccacguucaagugcuacggcgucagccccaccaagcucaacgaccugugcuucaccaacguguacgccgacuccuucgugauccgcggggacgagguccggcagaucgcccccggccagaccgggaagaucgccgacuacaacuacaagcugccggacgacuucacgggcugcgugaucgcguggaacagcaacaaccucgacuccaaggucgggggcaacuacaacuaccuguaccgccuguuccgcaagagcaaccucaagcccuucgagcgggacaucuccaccgagaucuaccaggccggcagcacccccugcaacgggguggagggcuucaacugcuacuucccccugcaguccuacggguuccagccgaccaacggcgugggguaccagcccuaccggguggucgugcugagcuucgagcuccugcacgcccccgccacggugugcggccccaagaaguccaccaaccuggucaagaacaagugcgugaacuucaacuucaacggccucaccgggaccggcgugcugaccgagagcaacaagaaguuccugccguuccagcaguucgggcgcgacaucgccgacacgaccgacgcgguccgcgacccccagacccuggagauccucgacaucacccccugcagcuucggcgggguguccgugaucacgccgggcaccaacaccagcaaccaggucgccgugcuguaccaggacgugaacugcaccgagguccccguggccauccacgccgaccagcugacgcccaccuggcggguguacuccaccggcagcaacgucuuccagacccgcgccgggugccucaucggcgcggagcacgugaacaacuccuacgagugcgacauccccaucggggccggcaucugcgccagcuaccagacgcagaccaacuccccgcggcgcgcccggagcguggcgucccagagcaucaucgccuacaccaugucccugggcgccgagaacagcgucgccuacuccaacaacagcaucgccauccccaccaacuucacgaucuccgugaccaccgagauccugcccgugagcaugaccaagacgagcgucgacugcaccauguacaucugcggggacuccaccgagugcagcaaccuccugcugcaguacggcuccuucugcacccagcucaaccgcgcgcugacggggaucgccguggagcaggacaagaacacccaggagguguucgcccaggucaagcagaucuacaagacgcccccgaucaaggacuucggcggguucaacuucagccagauccugcccgaccccuccaagcccagcaagcgguccuucaucgaggaccuccuguucaacaaggugacccuggccgacgccggcuucaucaagcaguacggcgacugccucggggacaucgcggcccgcgaccugaucugcgcccagaaguucaacggccugaccgugcucccgccccugcugaccgacgagaugaucgcccaguacaccagcgcccuccuggcggggaccaucacguccggcuggaccuucggggccggcgccgcccugcagauccccuucgcgaugcagauggccuaccgguucaacggcugcggggucacccagaacgugcucuacgagaaccagaagcugaucgccaaccaguucaacagcgccaucggcaagauccaggacucccugagcuccaccgccagcgcgcucgggaagcugcaggacguggucaaccagaacgcccaggcccugaacacgcucgugaagcagcuguccagcaacuucggcgccaucuccagcgugcugaacgacauccucucccgccuggacaaggucgaggccgaggugcagaucgaccggcugaucaccgggcgccuccagagccugcagaccuacgugacccagcagcugauccgggcggccgagauccgcgccagcgccaaccucgccgcgaccaagauguccgagugcguccugggccagagcaagcggguggacuucugcggcaaggggugccaccugauguccuucccccagagcgccccgcacggcguggucuuccuccacgugacguacguccccgcccaggagaagaacuucaccaccgcccccgcgaucugccacgacgggaaggcccacuucccccgcgagggcguguucguguccaacgggacccacugguucgucacgcagcggaacuucuacgagccgcagaucaucaccaccgacaacaccuucgugagcggcaacugcgacguggucaucggcaucgugaacaacacgguguacgacccccugcagcccgagcuggacuccuucaaggaggagcucgacaaguacuucaagaaccacaccagccccgacgucgaccugggggacaucuccggcaucaacgccagcguggugaacauccagaaggagaucgaccgccugaacgaggucgccaagaaccucaacgagucccugaucgaccugcaggagcucgggaaguacgagcaguacaucaagggcgggggcgggagcgacaucaucaagcuccugaacgagcaggucaacaaggagaugcaguccagcaaccuguacauguccaugagcuccuggugcuacacccacagccucgacggcgccgggcuguuccuguucgaccacgccgcggaggaguacgagcacgccaagaagcucaucaucuuccugaacgagaacaacgugcccgugcagcugaccuccaucagcgccccggagcacaaguucgagggccucacgcagaucuuccagaaggccuacgagcacgagcagcacaucuccgagagcaucaacaacaucguggaccacgccaucaaguccaaggaccacgcgaccuucaacuuccugcagugguacgucgccgagcagcacgaggaggaggugcuguucaaggacauccucgacaagaucgagcugaucgggaacgagaaccacggccuguaccucgccgaccaguacgugaaggggaucgccaagagccgcaaguccuga

SEQ ID NO: 11872 - RNA, 4140 nt, Artificial Sequence
  SARS-CoV-2/Wuhan/WIV05/2019__EPI_ISL_402128 spike protein CDS gc (1-1211)(Q965C_S1003C) Ferritin construct
auguucguguuccugguccuccugccccuggugagcucccagugcgugaaccucaccacccgcacgcagcugccgcccgccuacaccaacagcuucacccggggcgucuacuaccccgacaagguguuccgcuccagcgugcugcacuccacccaggaccucuuccugcccuucuucagcaacgucacgugguuccacgccauccacguguccgggaccaacggcaccaagcgguucgacaacccggugcugcccuucaacgacggggucuacuucgcgagcaccgagaaguccaacaucauccgcggcuggaucuucgggacgacccucgacagcaagacccagucccugcugaucgugaacaacgccaccaacguggucaucaaggugugcgaguuccaguucugcaacgaccccuuccucggcguguacuaccacaagaacaacaagagcuggauggaguccgaguuccgggucuacagcuccgccaacaacugcacguucgaguacgugagccagcccuuccugauggaccuggagggcaagcaggggaacuucaagaaccuccgcgaguucguguucaagaacaucgacggcuacuucaagaucuacuccaagcacaccccgaucaaccugguccgggaccugccccagggguucagcgcccucgagccccugguggaccugcccaucggcaucaacaucacccgcuuccagacccuccuggcccugcaccgguccuaccucacgccgggggacagcagcuccggcuggaccgcgggcgccgccgccuacuacgugggguaccugcagccccgcaccuuccugcucaaguacaacgagaacggcaccaucacggacgcggucgacugcgcccuggacccccugagcgagaccaagugcacccucaaguccuucaccguggagaaggggaucuaccagacgagcaacuuccgggugcagcccaccgaguccaucguccgcuucccgaacaucaccaaccugugccccuucggcgagguguucaacgccacccgguucgccagcgucuacgccuggaaccgcaagcggaucuccaacugcguggcggacuacagcgugcuguacaacuccgccagcuucuccacguucaagugcuacggcgucagccccaccaagcucaacgaccugugcuucaccaacguguacgccgacuccuucgugauccgcggggacgagguccggcagaucgcccccggccagaccgggaagaucgccgacuacaacuacaagcugccggacgacuucacgggcugcgugaucgcguggaacagcaacaaccucgacuccaaggucgggggcaacuacaacuaccuguaccgccuguuccgcaagagcaaccucaagcccuucgagcgggacaucuccaccgagaucuaccaggccggcagcacccccugcaacgggguggagggcuucaacugcuacuucccccugcaguccuacggguuccagccgaccaacggcgugggguaccagcccuaccggguggucgugcugagcuucgagcuccugcacgcccccgccacggugugcggccccaagaaguccaccaaccuggucaagaacaagugcgugaacuucaacuucaacggccucaccgggaccggcgugcugaccgagagcaacaagaaguuccugccguuccagcaguucgggcgcgacaucgccgacacgaccgacgcgguccgcgacccccagacccuggagauccucgacaucacccccugcagcuucggcgggguguccgugaucacgccgggcaccaacaccagcaaccaggucgccgugcuguaccaggacgugaacugcaccgagguccccguggccauccacgccgaccagcugacgcccaccuggcggguguacuccaccggcagcaacgucuuccagacccgcgccgggugccucaucggcgcggagcacgugaacaacuccuacgagugcgacauccccaucggggccggcaucugcgccagcuaccagacgcagaccaacuccccgcggcgcgcccggagcguggcgucccagagcaucaucgccuacaccaugucccugggcgccgagaacagcgucgccuacuccaacaacagcaucgccauccccaccaacuucacgaucuccgugaccaccgagauccugcccgugagcaugaccaagacgagcgucgacugcaccauguacaucugcggggacuccaccgagugcagcaaccuccugcugcaguacggcuccuucugcacccagcucaaccgcgcgcugacggggaucgccguggagcaggacaagaacacccaggagguguucgcccaggucaagcagaucuacaagacgcccccgaucaaggacuucggcggguucaacuucagccagauccugcccgaccccuccaagcccagcaagcgguccuucaucgaggaccuccuguucaacaaggugacccuggccgacgccggcuucaucaagcaguacggcgacugccucggggacaucgcggcccgcgaccugaucugcgcccagaaguucaacggccugaccgugcucccgccccugcugaccgacgagaugaucgcccaguacaccagcgcccuccuggcggggaccaucacguccggcuggaccuucggggccggcgccgcccugcagauccccuucgcgaugcagauggccuaccgguucaacggcaucggggucacccagaacgugcucuacgagaaccagaagcugaucgccaaccaguucaacagcgccaucggcaagauccaggacucccugagcuccaccgccagcgcgcucgggaagcugcaggacguggucaaccagaacgcccaggcccugaacacgcucgugaagugccuguccagcaacuucggcgccaucuccagcgugcugaacgacauccucucccgccuggacaaggucgaggccgaggugcagaucgaccggcugaucaccgggcgccuccagugccugcagaccuacgugacccagcagcugauccgggcggccgagauccgcgccagcgccaaccucgccgcgaccaagauguccgagugcguccugggccagagcaagcggguggacuucugcggcaagggguaccaccugauguccuucccccagagcgccccgcacggcguggucuuccuccacgugacguacguccccgcccaggagaagaacuucaccaccgcccccgcgaucugccacgacgggaaggcccacuucccccgcgagggcguguucguguccaacgggacccacugguucgucacgcagcggaacuucuacgagccgcagaucaucaccaccgacaacaccuucgugagcggcaacugcgacguggucaucggcaucgugaacaacacgguguacgacccccugcagcccgagcuggacuccuucaaggaggagcucgacaaguacuucaagaaccacaccagccccgacgucgaccugggggacaucuccggcaucaacgccagcguggugaacauccagaaggagaucgaccgccugaacgaggucgccaagaaccucaacgagucccugaucgaccugcaggagcucgggaaguacgagcaguacaucaagggcgggggcgggagcgacaucaucaagcuccugaacgagcaggucaacaaggagaugcaguccagcaaccuguacauguccaugagcuccuggugcuacacccacagccucgacggcgccgggcuguuccuguucgaccacgccgcggaggaguacgagcacgccaagaagcucaucaucuuccugaacgagaacaacgugcccgugcagcugaccuccaucagcgccccggagcacaaguucgagggccucacgcagaucuuccagaaggccuacgagcacgagcagcacaucuccgagagcaucaacaacaucguggaccacgccaucaaguccaaggaccacgcgaccuucaacuuccugcagugguacgucgccgagcagcacgaggaggaggugcuguucaaggacauccucgacaagaucgagcugaucgggaacgagaaccacggccuguaccucgccgaccaguacgugaaggggaucgccaagagccgcaaguccuga

SEQ ID NO: 11873 - RNA, 4140 nt, Artificial Sequence
  SARS-CoV-2/Wuhan/WIV05/2019__EPI_ISL_402128 spike protein CDS gc (1-1211)(F970C_G999C) Ferritin construct
auguucguguuccugguccuccugccccuggugagcucccagugcgugaaccucaccacccgcacgcagcugccgcccgccuacaccaacagcuucacccggggcgucuacuaccccgacaagguguuccgcuccagcgugcugcacuccacccaggaccucuuccugcccuucuucagcaacgucacgugguuccacgccauccacguguccgggaccaacggcaccaagcgguucgacaacccggugcugcccuucaacgacggggucuacuucgcgagcaccgagaaguccaacaucauccgcggcuggaucuucgggacgacccucgacagcaagacccagucccugcugaucgugaacaacgccaccaacguggucaucaaggugugcgaguuccaguucugcaacgaccccuuccucggcguguacuaccacaagaacaacaagagcuggauggaguccgaguuccgggucuacagcuccgccaacaacugcacguucgaguacgugagccagcccuuccugauggaccuggagggcaagcaggggaacuucaagaaccuccgcgaguucguguucaagaacaucgacggcuacuucaagaucuacuccaagcacaccccgaucaaccugguccgggaccugccccagggguucagcgcccucgagccccugguggaccugcccaucggcaucaacaucacccgcuuccagacccuccuggcccugcaccgguccuaccucacgccgggggacagcagcuccggcuggaccgcgggcgccgccgccuacuacgugggguaccugcagccccgcaccuuccugcucaaguacaacgagaacggcaccaucacggacgcggucgacugcgcccuggacccccugagcgagaccaagugcacccucaaguccuucaccguggagaaggggaucuaccagacgagcaacuuccgggugcagcccaccgaguccaucguccgcuucccgaacaucaccaaccugugccccuucggcgagguguucaacgccacccgguucgccagcgucuacgccuggaaccgcaagcggaucuccaacugcguggcggacuacagcgugcuguacaacuccgccagcuucuccacguucaagugcuacggcgucagccccaccaagcucaacgaccugugcuucaccaacguguacgccgacuccuucgugauccgcggggacgagguccggcagaucgcccccggccagaccgggaagaucgccgacuacaacuacaagcugccggacgacuucacgggcugcgugaucgcguggaacagcaacaaccucgacuccaaggucgggggcaacuacaacuaccuguaccgccuguuccgcaagagcaaccucaagcccuucgagcgggacaucuccaccgagaucuaccaggccggcagcacccccugcaacgggguggagggcuucaacugcuacuucccccugcaguccuacggguuccagccgaccaacggcgugggguaccagcccuaccggguggucgugcugagcuucgagcuccugcacgcccccgccacggugugcggccccaagaaguccaccaaccuggucaagaacaagugcgugaacuucaacuucaacggccucaccgggaccggcgugcugaccgagagcaacaagaaguuccugccguuccagcaguucgggcgcgacaucgccgacacgaccgacgcgguccgcgacccccagacccuggagauccucgacaucacccccugcagcuucggcgggguguccgugaucacgccgggcaccaacaccagcaaccaggucgccgugcuguaccaggacgugaacugcaccgagguccccguggccauccacgccgaccagcugacgcccaccuggcggguguacuccaccggcagcaacgucuuccagacccgcgccgggugccucaucggcgcggagcacgugaacaacuccuacgagugcgacauccccaucggggccggcaucugcgccagcuaccagacgcagaccaacuccccgcggcgcgcccggagcguggcgucccagagcaucaucgccuacaccaugucccugggcgccgagaacagcgucgccuacuccaacaacagcaucgccauccccaccaacuucacgaucuccgugaccaccgagauccugcccgugagcaugaccaagacgagcgucgacugcaccauguacaucugcggggacuccaccgagugcagcaaccuccugcugcaguacggcuccuucugcacccagcucaaccgcgcgcugacggggaucgccguggagcaggacaagaacacccaggagguguucgcccaggucaagcagaucuacaagacgcccccgaucaaggacuucggcggguucaacuucagccagauccugcccgaccccuccaagcccagcaagcgguccuucaucgaggaccuccuguucaacaaggugacccuggccgacgccggcuucaucaagcaguacggcgacugccucggggacaucgcggcccgcgaccugaucugcgcccagaaguucaacggccugaccgugcucccgccccugcugaccgacgagaugaucgcccaguacaccagcgcccuccuggcggggaccaucacguccggcuggaccuucggggccggcgccgcccugcagauccccuucgcgaugcagauggccuaccgguucaacggcaucggggucacccagaacgugcucuacgagaaccagaagcugaucgccaaccaguucaacagcgccaucggcaagauccaggacucccugagcuccaccgccagcgcgcucgggaagcugcaggacguggucaaccagaacgcccaggcccugaacacgcucgugaagcagcuguccagcaacugcggcgccaucuccagcgugcugaacgacauccucucccgccuggacaaggucgaggccgaggugcagaucgaccggcugaucaccugucgccuccagagccugcagaccuacgugacccagcagcugauccgggcggccgagauccgcgccagcgccaaccucgccgcgaccaagauguccgagugcguccugggccagagcaagcggguggacuucugcggcaagggguaccaccugauguccuucccccagagcgccccgcacggcguggucuuccuccacgugacguacguccccgcccaggagaagaacuucaccaccgcccccgcgaucugccacgacgggaaggcccacuucccccgcgagggcguguucguguccaacgggacccacugguucgucacgcagcggaacuucuacgagccgcagaucaucaccaccgacaacaccuucgugagcggcaacugcgacguggucaucggcaucgugaacaacacgguguacgacccccugcagcccgagcuggacuccuucaaggaggagcucgacaaguacuucaagaaccacaccagccccgacgucgaccugggggacaucuccggcaucaacgccagcguggugaacauccagaaggagaucgaccgccugaacgaggucgccaagaaccucaacgagucccugaucgaccugcaggagcucgggaaguacgagcaguacaucaagggcgggggcgggagcgacaucaucaagcuccugaacgagcaggucaacaaggagaugcaguccagcaaccuguacauguccaugagcuccuggugcuacacccacagccucgacggcgccgggcuguuccuguucgaccacgccgcggaggaguacgagcacgccaagaagcucaucaucuuccugaacgagaacaacgugcccgugcagcugaccuccaucagcgccccggagcacaaguucgagggccucacgcagaucuuccagaaggccuacgagcacgagcagcacaucuccgagagcaucaacaacaucguggaccacgccaucaaguccaaggaccacgcgaccuucaacuuccugcagugguacgucgccgagcagcacgaggaggaggugcuguucaaggacauccucgacaagaucgagcugaucgggaacgagaaccacggccuguaccucgccgaccaguacgugaaggggaucgccaagagccgcaaguccuga

SEQ ID NO: 11874 - RNA, 4140 nt, Artificial Sequence
  SARS-CoV-2/Wuhan/WIV05/2019__EPI_ISL_402128 spike protein CDS gc (1-1211)(A972C_R995C) Ferritin construct
auguucguguuccugguccuccugccccuggugagcucccagugcgugaaccucaccacccgcacgcagcugccgcccgccuacaccaacagcuucacccggggcgucuacuaccccgacaagguguuccgcuccagcgugcugcacuccacccaggaccucuuccugcccuucuucagcaacgucacgugguuccacgccauccacguguccgggaccaacggcaccaagcgguucgacaacccggugcugcccuucaacgacggggucuacuucgcgagcaccgagaaguccaacaucauccgcggcuggaucuucgggacgacccucgacagcaagacccagucccugcugaucgugaacaacgccaccaacguggucaucaaggugugcgaguuccaguucugcaacgaccccuuccucggcguguacuaccacaagaacaacaagagcuggauggaguccgaguuccgggucuacagcuccgccaacaacugcacguucgaguacgugagccagcccuuccugauggaccuggagggcaagcaggggaacuucaagaaccuccgcgaguucguguucaagaacaucgacggcuacuucaagaucuacuccaagcacaccccgaucaaccugguccgggaccugccccagggguucagcgcccucgagccccugguggaccugcccaucggcaucaacaucacccgcuuccagacccuccuggcccugcaccgguccuaccucacgccgggggacagcagcuccggcuggaccgcgggcgccgccgccuacuacgugggguaccugcagccccgcaccuuccugcucaaguacaacgagaacggcaccaucacggacgcggucgacugcgcccuggacccccugagcgagaccaagugcacccucaaguccuucaccguggagaaggggaucuaccagacgagcaacuuccgggugcagcccaccgaguccaucguccgcuucccgaacaucaccaaccugugccccuucggcgagguguucaacgccacccgguucgccagcgucuacgccuggaaccgcaagcggaucuccaacugcguggcggacuacagcgugcuguacaacuccgccagcuucuccacguucaagugcuacggcgucagccccaccaagcucaacgaccugugcuucaccaacguguacgccgacuccuucgugauccgcggggacgagguccggcagaucgcccccggccagaccgggaagaucgccgacuacaacuacaagcugccggacgacuucacgggcugcgugaucgcguggaacagcaacaaccucgacuccaaggucgggggcaacuacaacuaccuguaccgccuguuccgcaagagcaaccucaagcccuucgagcgggacaucuccaccgagaucuaccaggccggcagcacccccugcaacgggguggagggcuucaacugcuacuucccccugcaguccuacggguuccagccgaccaacggcgugggguaccagcccuaccggguggucgugcugagcuucgagcuccugcacgcccccgccacggugugcggccccaagaaguccaccaaccuggucaagaacaagugcgugaacuucaacuucaacggccucaccgggaccggcgugcugaccgagagcaacaagaaguuccugccguuccagcaguucgggcgcgacaucgccgacacgaccgacgcgguccgcgacccccagacccuggagauccucgacaucacccccugcagcuucggcgggguguccgugaucacgccgggcaccaacaccagcaaccaggucgccgugcuguaccaggacgugaacugcaccgagguccccguggccauccacgccgaccagcugacgcccaccuggcggguguacuccaccggcagcaacgucuuccagacccgcgccgggugccucaucggcgcggagcacgugaacaacuccuacgagugcgacauccccaucggggccggcaucugcgccagcuaccagacgcagaccaacuccccgcggcgcgcccggagcguggcgucccagagcaucaucgccuacaccaugucccugggcgccgagaacagcgucgccuacuccaacaacagcaucgccauccccaccaacuucacgaucuccgugaccaccgagauccugcccgugagcaugaccaagacgagcgucgacugcaccauguacaucugcggggacuccaccgagugcagcaaccuccugcugcaguacggcuccuucugcacccagcucaaccgcgcgcugacggggaucgccguggagcaggacaagaacacccaggagguguucgcccaggucaagcagaucuacaagacgcccccgaucaaggacuucggcggguucaacuucagccagauccugcccgaccccuccaagcccagcaagcgguccuucaucgaggaccuccuguucaacaaggugacccuggccgacgccggcuucaucaagcaguacggcgacugccucggggacaucgcggcccgcgaccugaucugcgcccagaaguucaacggccugaccgugcucccgccccugcugaccgacgagaugaucgcccaguacaccagcgcccuccuggcggggaccaucacguccggcuggaccuucggggccggcgccgcccugcagauccccuucgcgaugcagauggccuaccgguucaacggcaucggggucacccagaacgugcucuacgagaaccagaagcugaucgccaaccaguucaacagcgccaucggcaagauccaggacucccugagcuccaccgccagcgcgcucgggaagcugcaggacguggucaaccagaacgcccaggcccugaacacgcucgugaagcagcuguccagcaacuucggcugcaucuccagcgugcugaacgacauccucucccgccuggacaaggucgaggccgaggugcagaucgacugccugaucaccgggcgccuccagagccugcagaccuacgugacccagcagcugauccgggcggccgagauccgcgccagcgccaaccucgccgcgaccaagauguccgagugcguccugggccagagcaagcggguggacuucugcggcaagggguaccaccugauguccuucccccagagcgccccgcacggcguggucuuccuccacgugacguacguccccgcccaggagaagaacuucaccaccgcccccgcgaucugccacgacgggaaggcccacuucccccgcgagggcguguucguguccaacgggacccacugguucgucacgcagcggaacuucuacgagccgcagaucaucaccaccgacaacaccuucgugagcggcaacugcgacguggucaucggcaucgugaacaacacgguguacgacccccugcagcccgagcuggacuccuucaaggaggagcucgacaaguacuucaagaaccacaccagccccgacgucgaccugggggacaucuccggcaucaacgccagcguggugaacauccagaaggagaucgaccgccugaacgaggucgccaagaaccucaacgagucccugaucgaccugcaggagcucgggaaguacgagcaguacaucaagggcgggggcgggagcgacaucaucaagcuccugaacgagcaggucaacaaggagaugcaguccagcaaccuguacauguccaugagcuccuggugcuacacccacagccucgacggcgccgggcuguuccuguucgaccacgccgcggaggaguacgagcacgccaagaagcucaucaucuuccugaacgagaacaacgugcccgugcagcugaccuccaucagcgccccggagcacaaguucgagggccucacgcagaucuuccagaaggccuacgagcacgagcagcacaucuccgagagcaucaacaacaucguggaccacgccaucaaguccaaggaccacgcgaccuucaacuuccugcagugguacgucgccgagcagcacgaggaggaggugcuguucaaggacauccucgacaagaucgagcugaucgggaacgagaaccacggccuguaccucgccgaccaguacgugaaggggaucgccaagagccgcaaguccuga

SEQ ID NO: 11875 - RNA, 4140 nt, Artificial Sequence
  SARS-CoV-2/Wuhan/WIV05/2019__EPI_ISL_402128 spike protein CDS gc (1-1211)(A890C_V1040C) Ferritin construct
auguucguguuccugguccuccugccccuggugagcucccagugcgugaaccucaccacccgcacgcagcugccgcccgccuacaccaacagcuucacccggggcgucuacuaccccgacaagguguuccgcuccagcgugcugcacuccacccaggaccucuuccugcccuucuucagcaacgucacgugguuccacgccauccacguguccgggaccaacggcaccaagcgguucgacaacccggugcugcccuucaacgacggggucuacuucgcgagcaccgagaaguccaacaucauccgcggcuggaucuucgggacgacccucgacagcaagacccagucccugcugaucgugaacaacgccaccaacguggucaucaaggugugcgaguuccaguucugcaacgaccccuuccucggcguguacuaccacaagaacaacaagagcuggauggaguccgaguuccgggucuacagcuccgccaacaacugcacguucgaguacgugagccagcccuuccugauggaccuggagggcaagcaggggaacuucaagaaccuccgcgaguucguguucaagaacaucgacggcuacuucaagaucuacuccaagcacaccccgaucaaccugguccgggaccugccccagggguucagcgcccucgagccccugguggaccugcccaucggcaucaacaucacccgcuuccagacccuccuggcccugcaccgguccuaccucacgccgggggacagcagcuccggcuggaccgcgggcgccgccgccuacuacgugggguaccugcagccccgcaccuuccugcucaaguacaacgagaacggcaccaucacggacgcggucgacugcgcccuggacccccugagcgagaccaagugcacccucaaguccuucaccguggagaaggggaucuaccagacgagcaacuuccgggugcagcccaccgaguccaucguccgcuucccgaacaucaccaaccugugccccuucggcgagguguucaacgccacccgguucgccagcgucuacgccuggaaccgcaagcggaucuccaacugcguggcggacuacagcgugcuguacaacuccgccagcuucuccacguucaagugcuacggcgucagccccaccaagcucaacgaccugugcuucaccaacguguacgccgacuccuucgugauccgcggggacgagguccggcagaucgcccccggccagaccgggaagaucgccgacuacaacuacaagcugccggacgacuucacgggcugcgugaucgcguggaacagcaacaaccucgacuccaaggucgggggcaacuacaacuaccuguaccgccuguuccgcaagagcaaccucaagcccuucgagcgggacaucuccaccgagaucuaccaggccggcagcacccccugcaacgggguggagggcuucaacugcuacuucccccugcaguccuacggguuccagccgaccaacggcgugggguaccagcccuaccggguggucgugcugagcuucgagcuccugcacgcccccgccacggugugcggccccaagaaguccaccaaccuggucaagaacaagugcgugaacuucaacuucaacggccucaccgggaccggcgugcugaccgagagcaacaagaaguuccugccguuccagcaguucgggcgcgacaucgccgacacgaccgacgcgguccgcgacccccagacccuggagauccucgacaucacccccugcagcuucggcgggguguccgugaucacgccgggcaccaacaccagcaaccaggucgccgugcuguaccaggacgugaacugcaccgagguccccguggccauccacgccgaccagcugacgcccaccuggcggguguacuccaccggcagcaacgucuuccagacccgcgccgggugccucaucggcgcggagcacgugaacaacuccuacgagugcgacauccccaucggggccggcaucugcgccagcuaccagacgcagaccaacuccccgcggcgcgcccggagcguggcgucccagagcaucaucgccuacaccaugucccugggcgccgagaacagcgucgccuacuccaacaacagcaucgccauccccaccaacuucacgaucuccgugaccaccgagauccugcccgugagcaugaccaagacgagcgucgacugcaccauguacaucugcggggacuccaccgagugcagcaaccuccugcugcaguacggcuccuucugcacccagcucaaccgcgcgcugacggggaucgccguggagcaggacaagaacacccaggagguguucgcccaggucaagcagaucuacaagacgcccccgaucaaggacuucggcggguucaacuucagccagauccugcccgaccccuccaagcccagcaagcgguccuucaucgaggaccuccuguucaacaaggugacccuggccgacgccggcuucaucaagcaguacggcgacugccucggggacaucgcggcccgcgaccugaucugcgcccagaaguucaacggccugaccgugcucccgccccugcugaccgacgagaugaucgcccaguacaccagcgcccuccuggcggggaccaucacguccggcuggaccuucgggugcggcgccgcccugcagauccccuucgcgaugcagauggccuaccgguucaacggcaucggggucacccagaacgugcucuacgagaaccagaagcugaucgccaaccaguucaacagcgccaucggcaagauccaggacucccugagcuccaccgccagcgcgcucgggaagcugcaggacguggucaaccagaacgcccaggcccugaacacgcucgugaagcagcuguccagcaacuucggcgccaucuccagcgugcugaacgacauccucucccgccuggacaaggucgaggccgaggugcagaucgaccggcugaucaccgggcgccuccagagccugcagaccuacgugacccagcagcugauccgggcggccgagauccgcgccagcgccaaccucgccgcgaccaagauguccgagugcguccugggccagagcaagcggugcgacuucugcggcaagggguaccaccugauguccuucccccagagcgccccgcacggcguggucuuccuccacgugacguacguccccgcccaggagaagaacuucaccaccgcccccgcgaucugccacgacgggaaggcccacuucccccgcgagggcguguucguguccaacgggacccacugguucgucacgcagcggaacuucuacgagccgcagaucaucaccaccgacaacaccuucgugagcggcaacugcgacguggucaucggcaucgugaacaacacgguguacgacccccugcagcccgagcuggacuccuucaaggaggagcucgacaaguacuucaagaaccacaccagccccgacgucgaccugggggacaucuccggcaucaacgccagcguggugaacauccagaaggagaucgaccgccugaacgaggucgccaagaaccucaacgagucccugaucgaccugcaggagcucgggaaguacgagcaguacaucaagggcgggggcgggagcgacaucaucaagcuccugaacgagcaggucaacaaggagaugcaguccagcaaccuguacauguccaugagcuccuggugcuacacccacagccucgacggcgccgggcuguuccuguucgaccacgccgcggaggaguacgagcacgccaagaagcucaucaucuuccugaacgagaacaacgugcccgugcagcugaccuccaucagcgccccggagcacaaguucgagggccucacgcagaucuuccagaaggccuacgagcacgagcagcacaucuccgagagcaucaacaacaucguggaccacgccaucaaguccaaggaccacgcgaccuucaacuuccugcagugguacgucgccgagcagcacgaggaggaggugcuguucaaggacauccucgacaagaucgagcugaucgggaacgagaaccacggccuguaccucgccgaccaguacgugaaggggaucgccaagagccgcaaguccuga

SEQ ID NO: 11876 - RNA, 4140 nt, Artificial Sequence
  SARS-CoV-2/Wuhan/WIV05/2019__EPI_ISL_402128 spike protein CDS gc (1-1211)(T874C_S1055C) Ferritin construct
auguucguguuccugguccuccugccccuggugagcucccagugcgugaaccucaccacccgcacgcagcugccgcccgccuacaccaacagcuucacccggggcgucuacuaccccgacaagguguuccgcuccagcgugcugcacuccacccaggaccucuuccugcccuucuucagcaacgucacgugguuccacgccauccacguguccgggaccaacggcaccaagcgguucgacaacccggugcugcccuucaacgacggggucuacuucgcgagcaccgagaaguccaacaucauccgcggcuggaucuucgggacgacccucgacagcaagacccagucccugcugaucgugaacaacgccaccaacguggucaucaaggugugcgaguuccaguucugcaacgaccccuuccucggcguguacuaccacaagaacaacaagagcuggauggaguccgaguuccgggucuacagcuccgccaacaacugcacguucgaguacgugagccagcccuuccugauggaccuggagggcaagcaggggaacuucaagaaccuccgcgaguucguguucaagaacaucgacggcuacuucaagaucuacuccaagcacaccccgaucaaccugguccgggaccugccccagggguucagcgcccucgagccccugguggaccugcccaucggcaucaacaucacccgcuuccagacccuccuggcccugcaccgguccuaccucacgccgggggacagcagcuccggcuggaccgcgggcgccgccgccuacuacgugggguaccugcagccccgcaccuuccugcucaaguacaacgagaacggcaccaucacggacgcggucgacugcgcccuggacccccugagcgagaccaagugcacccucaaguccuucaccguggagaaggggaucuaccagacgagcaacuuccgggugcagcccaccgaguccaucguccgcuucccgaacaucaccaaccugugccccuucggcgagguguucaacgccacccgguucgccagcgucuacgccuggaaccgcaagcggaucuccaacugcguggcggacuacagcgugcuguacaacuccgccagcuucuccacguucaagugcuacggcgucagccccaccaagcucaacgaccugugcuucaccaacguguacgccgacuccuucgugauccgcggggacgagguccggcagaucgcccccggccagaccgggaagaucgccgacuacaacuacaagcugccggacgacuucacgggcugcgugaucgcguggaacagcaacaaccucgacuccaaggucgggggcaacuacaacuaccuguaccgccuguuccgcaagagcaaccucaagcccuucgagcgggacaucuccaccgagaucuaccaggccggcagcacccccugcaacgggguggagggcuucaacugcuacuucccccugcaguccuacggguuccagccgaccaacggcgugggguaccagcccuaccggguggucgugcugagcuucgagcuccugcacgcccccgccacggugugcggccccaagaaguccaccaaccuggucaagaacaagugcgugaacuucaacuucaacggccucaccgggaccggcgugcugaccgagagcaacaagaaguuccugccguuccagcaguucgggcgcgacaucgccgacacgaccgacgcgguccgcgacccccagacccuggagauccucgacaucacccccugcagcuucggcgggguguccgugaucacgccgggcaccaacaccagcaaccaggucgccgugcuguaccaggacgugaacugcaccgagguccccguggccauccacgccgaccagcugacgcccaccuggcggguguacuccaccggcagcaacgucuuccagacccgcgccgggugccucaucggcgcggagcacgugaacaacuccuacgagugcgacauccccaucggggccggcaucugcgccagcuaccagacgcagaccaacuccccgcggcgcgcccggagcguggcgucccagagcaucaucgccuacaccaugucccugggcgccgagaacagcgucgccuacuccaacaacagcaucgccauccccaccaacuucacgaucuccgugaccaccgagauccugcccgugagcaugaccaagacgagcgucgacugcaccauguacaucugcggggacuccaccgagugcagcaaccuccugcugcaguacggcuccuucugcacccagcucaaccgcgcgcugacggggaucgccguggagcaggacaagaacacccaggagguguucgcccaggucaagcagaucuacaagacgcccccgaucaaggacuucggcggguucaacuucagccagauccugcccgaccccuccaagcccagcaagcgguccuucaucgaggaccuccuguucaacaaggugacccuggccgacgccggcuucaucaagcaguacggcgacugccucggggacaucgcggcccgcgaccugaucugcgcccagaaguucaacggccugaccgugcucccgccccugcugaccgacgagaugaucgcccaguacugcagcgcccuccuggcggggaccaucacguccggcuggaccuucggggccggcgccgcccugcagauccccuucgcgaugcagauggccuaccgguucaacggcaucggggucacccagaacgugcucuacgagaaccagaagcugaucgccaaccaguucaacagcgccaucggcaagauccaggacucccugagcuccaccgccagcgcgcucgggaagcugcaggacguggucaaccagaacgcccaggcccugaacacgcucgugaagcagcuguccagcaacuucggcgccaucuccagcgugcugaacgacauccucucccgccuggacaaggucgaggccgaggugcagaucgaccggcugaucaccgggcgccuccagagccugcagaccuacgugacccagcagcugauccgggcggccgagauccgcgccagcgccaaccucgccgcgaccaagauguccgagugcguccugggccagagcaagcggguggacuucugcggcaagggguaccaccugauguccuucccccagugcgccccgcacggcguggucuuccuccacgugacguacguccccgcccaggagaagaacuucaccaccgcccccgcgaucugccacgacgggaaggcccacuucccccgcgagggcguguucguguccaacgggacccacugguucgucacgcagcggaacuucuacgagccgcagaucaucaccaccgacaacaccuucgugagcggcaacugcgacguggucaucggcaucgugaacaacacgguguacgacccccugcagcccgagcuggacuccuucaaggaggagcucgacaaguacuucaagaaccacaccagccccgacgucgaccugggggacaucuccggcaucaacgccagcguggugaacauccagaaggagaucgaccgccugaacgaggucgccaagaaccucaacgagucccugaucgaccugcaggagcucgggaaguacgagcaguacaucaagggcgggggcgggagcgacaucaucaagcuccugaacgagcaggucaacaaggagaugcaguccagcaaccuguacauguccaugagcuccuggugcuacacccacagccucgacggcgccgggcuguuccuguucgaccacgccgcggaggaguacgagcacgccaagaagcucaucaucuuccugaacgagaacaacgugcccgugcagcugaccuccaucagcgccccggagcacaaguucgagggccucacgcagaucuuccagaaggccuacgagcacgagcagcacaucuccgagagcaucaacaacaucguggaccacgccaucaaguccaaggaccacgcgaccuucaacuuccugcagugguacgucgccgagcagcacgaggaggaggugcuguucaaggacauccucgacaagaucgagcugaucgggaacgagaaccacggccuguaccucgccgaccaguacgugaaggggaucgccaagagccgcaaguccuga

SEQ ID NO: 11877 - RNA, 3726 nt, Artificial Sequence
  SARS-CoV-2/Wuhan/WIV05/2019__EPI_ISL_402128 spike protein CDS gc (1-1211) Foldon construct
auguucguguuccugguccuccugccccuggugagcucccagugcgugaaccucaccacccgcacgcagcugccgcccgccuacaccaacagcuucacccggggcgucuacuaccccgacaagguguuccgcuccagcgugcugcacuccacccaggaccucuuccugcccuucuucagcaacgucacgugguuccacgccauccacguguccgggaccaacggcaccaagcgguucgacaacccggugcugcccuucaacgacggggucuacuucgcgagcaccgagaaguccaacaucauccgcggcuggaucuucgggacgacccucgacagcaagacccagucccugcugaucgugaacaacgccaccaacguggucaucaaggugugcgaguuccaguucugcaacgaccccuuccucggcguguacuaccacaagaacaacaagagcuggauggaguccgaguuccgggucuacagcuccgccaacaacugcacguucgaguacgugagccagcccuuccugauggaccuggagggcaagcaggggaacuucaagaaccuccgcgaguucguguucaagaacaucgacggcuacuucaagaucuacuccaagcacaccccgaucaaccugguccgggaccugccccagggguucagcgcccucgagccccugguggaccugcccaucggcaucaacaucacccgcuuccagacccuccuggcccugcaccgguccuaccucacgccgggggacagcagcuccggcuggaccgcgggcgccgccgccuacuacgugggguaccugcagccccgcaccuuccugcucaaguacaacgagaacggcaccaucacggacgcggucgacugcgcccuggacccccugagcgagaccaagugcacccucaaguccuucaccguggagaaggggaucuaccagacgagcaacuuccgggugcagcccaccgaguccaucguccgcuucccgaacaucaccaaccugugccccuucggcgagguguucaacgccacccgguucgccagcgucuacgccuggaaccgcaagcggaucuccaacugcguggcggacuacagcgugcuguacaacuccgccagcuucuccacguucaagugcuacggcgucagccccaccaagcucaacgaccugugcuucaccaacguguacgccgacuccuucgugauccgcggggacgagguccggcagaucgcccccggccagaccgggaagaucgccgacuacaacuacaagcugccggacgacuucacgggcugcgugaucgcguggaacagcaacaaccucgacuccaaggucgggggcaacuacaacuaccuguaccgccuguuccgcaagagcaaccucaagcccuucgagcgggacaucuccaccgagaucuaccaggccggcagcacccccugcaacgggguggagggcuucaacugcuacuucccccugcaguccuacggguuccagccgaccaacggcgugggguaccagcccuaccggguggucgugcugagcuucgagcuccugcacgcccccgccacggugugcggccccaagaaguccaccaaccuggucaagaacaagugcgugaacuucaacuucaacggccucaccgggaccggcgugcugaccgagagcaacaagaaguuccugccguuccagcaguucgggcgcgacaucgccgacacgaccgacgcgguccgcgacccccagacccuggagauccucgacaucacccccugcagcuucggcgggguguccgugaucacgccgggcaccaacaccagcaaccaggucgccgugcuguaccaggacgugaacugcaccgagguccccguggccauccacgccgaccagcugacgcccaccuggcggguguacuccaccggcagcaacgucuuccagacccgcgccgggugccucaucggcgcggagcacgugaacaacuccuacgagugcgacauccccaucggggccggcaucugcgccagcuaccagacgcagaccaacuccccgcggcgcgcccggagcguggcgucccagagcaucaucgccuacaccaugucccugggcgccgagaacagcgucgccuacuccaacaacagcaucgccauccccaccaacuucacgaucuccgugaccaccgagauccugcccgugagcaugaccaagacgagcgucgacugcaccauguacaucugcggggacuccaccgagugcagcaaccuccugcugcaguacggcuccuucugcacccagcucaaccgcgcgcugacggggaucgccguggagcaggacaagaacacccaggagguguucgcccaggucaagcagaucuacaagacgcccccgaucaaggacuucggcggguucaacuucagccagauccugcccgaccccuccaagcccagcaagcgguccuucaucgaggaccuccuguucaacaaggugacccuggccgacgccggcuucaucaagcaguacggcgacugccucggggacaucgcggcccgcgaccugaucugcgcccagaaguucaacggccugaccgugcucccgccccugcugaccgacgagaugaucgcccaguacaccagcgcccuccuggcggggaccaucacguccggcuggaccuucggggccggcgccgcccugcagauccccuucgcgaugcagauggccuaccgguucaacggcaucggggucacccagaacgugcucuacgagaaccagaagcugaucgccaaccaguucaacagcgccaucggcaagauccaggacucccugagcuccaccgccagcgcgcucgggaagcugcaggacguggucaaccagaacgcccaggcccugaacacgcucgugaagcagcuguccagcaacuucggcgccaucuccagcgugcugaacgacauccucucccgccuggacaaggucgaggccgaggugcagaucgaccggcugaucaccgggcgccuccagagccugcagaccuacgugacccagcagcugauccgggcggccgagauccgcgccagcgccaaccucgccgcgaccaagauguccgagugcguccugggccagagcaagcggguggacuucugcggcaagggguaccaccugauguccuucccccagagcgccccgcacggcguggucuuccuccacgugacguacguccccgcccaggagaagaacuucaccaccgcccccgcgaucugccacgacgggaaggcccacuucccccgcgagggcguguucguguccaacgggacccacugguucgucacgcagcggaacuucuacgagccgcagaucaucaccaccgacaacaccuucgugagcggcaacugcgacguggucaucggcaucgugaacaacacgguguacgacccccugcagcccgagcuggacuccuucaaggaggagcucgacaaguacuucaagaaccacaccagccccgacgucgaccugggggacaucuccggcaucaacgccagcguggugaacauccagaaggagaucgaccgccugaacgaggucgccaagaaccucaacgagucccugaucgaccugcaggagcucgggaaguacgagcaguacaucaagggcgggagcggcuacauccccgaggccccgcgcgacgggcaggccuacgugcggaaggacggcgaguggguccugcucagcaccuuccuguga

SEQ ID NO: 11878 - RNA, 3726 nt, Artificial Sequence
  SARS-CoV-2/Wuhan/WIV05/2019__EPI_ISL_402128 spike protein CDS gc (1-1211)(K986P_V987P) Foldon construct
auguucguguuccugguccuccugccccuggugagcucccagugcgugaaccucaccacccgcacgcagcugccgcccgccuacaccaacagcuucacccggggcgucuacuaccccgacaagguguuccgcuccagcgugcugcacuccacccaggaccucuuccugcccuucuucagcaacgucacgugguuccacgccauccacguguccgggaccaacggcaccaagcgguucgacaacccggugcugcccuucaacgacggggucuacuucgcgagcaccgagaaguccaacaucauccgcggcuggaucuucgggacgacccucgacagcaagacccagucccugcugaucgugaacaacgccaccaacguggucaucaaggugugcgaguuccaguucugcaacgaccccuuccucggcguguacuaccacaagaacaacaagagcuggauggaguccgaguuccgggucuacagcuccgccaacaacugcacguucgaguacgugagccagcccuuccugauggaccuggagggcaagcaggggaacuucaagaaccuccgcgaguucguguucaagaacaucgacggcuacuucaagaucuacuccaagcacaccccgaucaaccugguccgggaccugccccagggguucagcgcccucgagccccugguggaccugcccaucggcaucaacaucacccgcuuccagacccuccuggcccugcaccgguccuaccucacgccgggggacagcagcuccggcuggaccgcgggcgccgccgccuacuacgugggguaccugcagccccgcaccuuccugcucaaguacaacgagaacggcaccaucacggacgcggucgacugcgcccuggacccccugagcgagaccaagugcacccucaaguccuucaccguggagaaggggaucuaccagacgagcaacuuccgggugcagcccaccgaguccaucguccgcuucccgaacaucaccaaccugugccccuucggcgagguguucaacgccacccgguucgccagcgucuacgccuggaaccgcaagcggaucuccaacugcguggcggacuacagcgugcuguacaacuccgccagcuucuccacguucaagugcuacggcgucagccccaccaagcucaacgaccugugcuucaccaacguguacgccgacuccuucgugauccgcggggacgagguccggcagaucgcccccggccagaccgggaagaucgccgacuacaacuacaagcugccggacgacuucacgggcugcgugaucgcguggaacagcaacaaccucgacuccaaggucgggggcaacuacaacuaccuguaccgccuguuccgcaagagcaaccucaagcccuucgagcgggacaucuccaccgagaucuaccaggccggcagcacccccugcaacgggguggagggcuucaacugcuacuucccccugcaguccuacggguuccagccgaccaacggcgugggguaccagcccuaccggguggucgugcugagcuucgagcuccugcacgcccccgccacggugugcggccccaagaaguccaccaaccuggucaagaacaagugcgugaacuucaacuucaacggccucaccgggaccggcgugcugaccgagagcaacaagaaguuccugccguuccagcaguucgggcgcgacaucgccgacacgaccgacgcgguccgcgacccccagacccuggagauccucgacaucacccccugcagcuucggcgggguguccgugaucacgccgggcaccaacaccagcaaccaggucgccgugcuguaccaggacgugaacugcaccgagguccccguggccauccacgccgaccagcugacgcccaccuggcggguguacuccaccggcagcaacgucuuccagacccgcgccgggugccucaucggcgcggagcacgugaacaacuccuacgagugcgacauccccaucggggccggcaucugcgccagcuaccagacgcagaccaacuccccgcggcgcgcccggagcguggcgucccagagcaucaucgccuacaccaugucccugggcgccgagaacagcgucgccuacuccaacaacagcaucgccauccccaccaacuucacgaucuccgugaccaccgagauccugcccgugagcaugaccaagacgagcgucgacugcaccauguacaucugcggggacuccaccgagugcagcaaccuccugcugcaguacggcuccuucugcacccagcucaaccgcgcgcugacggggaucgccguggagcaggacaagaacacccaggagguguucgcccaggucaagcagaucuacaagacgcccccgaucaaggacuucggcggguucaacuucagccagauccugcccgaccccuccaagcccagcaagcgguccuucaucgaggaccuccuguucaacaaggugacccuggccgacgccggcuucaucaagcaguacggcgacugccucggggacaucgcggcccgcgaccugaucugcgcccagaaguucaacggccugaccgugcucccgccccugcugaccgacgagaugaucgcccaguacaccagcgcccuccuggcggggaccaucacguccggcuggaccuucggggccggcgccgcccugcagauccccuucgcgaugcagauggccuaccgguucaacggcaucggggucacccagaacgugcucuacgagaaccagaagcugaucgccaaccaguucaacagcgccaucggcaagauccaggacucccugagcuccaccgccagcgcgcucgggaagcugcaggacguggucaaccagaacgcccaggcccugaacacgcucgugaagcagcuguccagcaacuucggcgccaucuccagcgugcugaacgacauccucucccgccuggacccgcccgaggccgaggugcagaucgaccggcugaucaccgggcgccuccagagccugcagaccuacgugacccagcagcugauccgggcggccgagauccgcgccagcgccaaccucgccgcgaccaagauguccgagugcguccugggccagagcaagcggguggacuucugcggcaagggguaccaccugauguccuucccccagagcgccccgcacggcguggucuuccuccacgugacguacguccccgcccaggagaagaacuucaccaccgcccccgcgaucugccacgacgggaaggcccacuucccccgcgagggcguguucguguccaacgggacccacugguucgucacgcagcggaacuucuacgagccgcagaucaucaccaccgacaacaccuucgugagcggcaacugcgacguggucaucggcaucgugaacaacacgguguacgacccccugcagcccgagcuggacuccuucaaggaggagcucgacaaguacuucaagaaccacaccagccccgacgucgaccugggggacaucuccggcaucaacgccagcguggugaacauccagaaggagaucgaccgccugaacgaggucgccaagaaccucaacgagucccugaucgaccugcaggagcucgggaaguacgagcaguacaucaagggcgggagcggcuacauccccgaggccccgcgcgacgggcaggccuacgugcggaaggacggcgaguggguccugcucagcaccuuccuguga

SEQ ID NO: 11879 - RNA, 3726 nt, Artificial Sequence
  SARS-CoV-2/Wuhan/WIV05/2019__EPI_ISL_402128 spike protein CDS gc (1-1211)(K986P_V987P_T887WN_A1020W) Foldon construct
auguucguguuccugguccuccugccccuggugagcucccagugcgugaaccucaccacccgcacgcagcugccgcccgccuacaccaacagcuucacccggggcgucuacuaccccgacaagguguuccgcuccagcgugcugcacuccacccaggaccucuuccugcccuucuucagcaacgucacgugguuccacgccauccacguguccgggaccaacggcaccaagcgguucgacaacccggugcugcccuucaacgacggggucuacuucgcgagcaccgagaaguccaacaucauccgcggcuggaucuucgggacgacccucgacagcaagacccagucccugcugaucgugaacaacgccaccaacguggucaucaaggugugcgaguuccaguucugcaacgaccccuuccucggcguguacuaccacaagaacaacaagagcuggauggaguccgaguuccgggucuacagcuccgccaacaacugcacguucgaguacgugagccagcccuuccugauggaccuggagggcaagcaggggaacuucaagaaccuccgcgaguucguguucaagaacaucgacggcuacuucaagaucuacuccaagcacaccccgaucaaccugguccgggaccugccccagggguucagcgcccucgagccccugguggaccugcccaucggcaucaacaucacccgcuuccagacccuccuggcccugcaccgguccuaccucacgccgggggacagcagcuccggcuggaccgcgggcgccgccgccuacuacgugggguaccugcagccccgcaccuuccugcucaaguacaacgagaacggcaccaucacggacgcggucgacugcgcccuggacccccugagcgagaccaagugcacccucaaguccuucaccguggagaaggggaucuaccagacgagcaacuuccgggugcagcccaccgaguccaucguccgcuucccgaacaucaccaaccugugccccuucggcgagguguucaacgccacccgguucgccagcgucuacgccuggaaccgcaagcggaucuccaacugcguggcggacuacagcgugcuguacaacuccgccagcuucuccacguucaagugcuacggcgucagccccaccaagcucaacgaccugugcuucaccaacguguacgccgacuccuucgugauccgcggggacgagguccggcagaucgcccccggccagaccgggaagaucgccgacuacaacuacaagcugccggacgacuucacgggcugcgugaucgcguggaacagcaacaaccucgacuccaaggucgggggcaacuacaacuaccuguaccgccuguuccgcaagagcaaccucaagcccuucgagcgggacaucuccaccgagaucuaccaggccggcagcacccccugcaacgggguggagggcuucaacugcuacuucccccugcaguccuacggguuccagccgaccaacggcgugggguaccagcccuaccggguggucgugcugagcuucgagcuccugcacgcccccgccacggugugcggccccaagaaguccaccaaccuggucaagaacaagugcgugaacuucaacuucaacggccucaccgggaccggcgugcugaccgagagcaacaagaaguuccugccguuccagcaguucgggcgcgacaucgccgacacgaccgacgcgguccgcgacccccagacccuggagauccucgacaucacccccugcagcuucggcgggguguccgugaucacgccgggcaccaacaccagcaaccaggucgccgugcuguaccaggacgugaacugcaccgagguccccguggccauccacgccgaccagcugacgcccaccuggcggguguacuccaccggcagcaacgucuuccagacccgcgccgggugccucaucggcgcggagcacgugaacaacuccuacgagugcgacauccccaucggggccggcaucugcgccagcuaccagacgcagaccaacuccccgcggcgcgcccggagcguggcgucccagagcaucaucgccuacaccaugucccugggcgccgagaacagcgucgccuacuccaacaacagcaucgccauccccaccaacuucacgaucuccgugaccaccgagauccugcccgugagcaugaccaagacgagcgucgacugcaccauguacaucugcggggacuccaccgagugcagcaaccuccugcugcaguacggcuccuucugcacccagcucaaccgcgcgcugacggggaucgccguggagcaggacaagaacacccaggagguguucgcccaggucaagcagaucuacaagacgcccccgaucaaggacuucggcggguucaacuucagccagauccugcccgaccccuccaagcccagcaagcgguccuucaucgaggaccuccuguucaacaaggugacccuggccgacgccggcuucaucaagcaguacggcgacugccucggggacaucgcggcccgcgaccugaucugcgcccagaaguucaacggccugaccgugcucccgccccugcugaccgacgagaugaucgcccaguacaccagcgcccuccuggcggggaccaucacguccggcuggugguucggggccggcgccgcccugcagauccccuucgcgaugcagauggccuaccgguucaacggcaucggggucacccagaacgugcucuacgagaaccagaagcugaucgccaaccaguucaacagcgccaucggcaagauccaggacucccugagcuccaccgccagcgcgcucgggaagcugcaggacguggucaaccagaacgcccaggcccugaacacgcucgugaagcagcuguccagcaacuucggcgccaucuccagcgugcugaacgacauccucucccgccuggacccgcccgaggccgaggugcagaucgaccggcugaucaccgggcgccuccagagccugcagaccuacgugacccagcagcugauccgggcggccgagauccgcuggagcgccaaccucgccgcgaccaagauguccgagugcguccugggccagagcaagcggguggacuucugcggcaagggguaccaccugauguccuucccccagagcgccccgcacggcguggucuuccuccacgugacguacguccccgcccaggagaagaacuucaccaccgcccccgcgaucugccacgacgggaaggcccacuucccccgcgagggcguguucguguccaacgggacccacugguucgucacgcagcggaacuucuacgagccgcagaucaucaccaccgacaacaccuucgugagcggcaacugcgacguggucaucggcaucgugaacaacacgguguacgacccccugcagcccgagcuggacuccuucaaggaggagcucgacaaguacuucaagaaccacaccagccccgacgucgaccugggggacaucuccggcaucaacgccagcguggugaacauccagaaggagaucgaccgccugaacgaggucgccaagaaccucaacgagucccugaucgaccugcaggagcucgggaaguacgagcaguacaucaagggcgggagcggcuacauccccgaggccccgcgcgacgggcaggccuacgugcggaaggacggcgaguggguccugcucagcaccuuccuguga

SEQ ID NO: 11880 - RNA, 3726 nt, Artificial Sequence
  SARS-CoV-2/Wuhan/WIV05/2019__EPI_ISL_402128 spike protein CDS gc (1-1211)(K986P_V987P_P1069F) Foldon construct
auguucguguuccugguccuccugccccuggugagcucccagugcgugaaccucaccacccgcacgcagcugccgcccgccuacaccaacagcuucacccggggcgucuacuaccccgacaagguguuccgcuccagcgugcugcacuccacccaggaccucuuccugcccuucuucagcaacgucacgugguuccacgccauccacguguccgggaccaacggcaccaagcgguucgacaacccggugcugcccuucaacgacggggucuacuucgcgagcaccgagaaguccaacaucauccgcggcuggaucuucgggacgacccucgacagcaagacccagucccugcugaucgugaacaacgccaccaacguggucaucaaggugugcgaguuccaguucugcaacgaccccuuccucggcguguacuaccacaagaacaacaagagcuggauggaguccgaguuccgggucuacagcuccgccaacaacugcacguucgaguacgugagccagcccuuccugauggaccuggagggcaagcaggggaacuucaagaaccuccgcgaguucguguucaagaacaucgacggcuacuucaagaucuacuccaagcacaccccgaucaaccugguccgggaccugccccagggguucagcgcccucgagccccugguggaccugcccaucggcaucaacaucacccgcuuccagacccuccuggcccugcaccgguccuaccucacgccgggggacagcagcuccggcuggaccgcgggcgccgccgccuacuacgugggguaccugcagccccgcaccuuccugcucaaguacaacgagaacggcaccaucacggacgcggucgacugcgcccuggacccccugagcgagaccaagugcacccucaaguccuucaccguggagaaggggaucuaccagacgagcaacuuccgggugcagcccaccgaguccaucguccgcuucccgaacaucaccaaccugugccccuucggcgagguguucaacgccacccgguucgccagcgucuacgccuggaaccgcaagcggaucuccaacugcguggcggacuacagcgugcuguacaacuccgccagcuucuccacguucaagugcuacggcgucagccccaccaagcucaacgaccugugcuucaccaacguguacgccgacuccuucgugauccgcggggacgagguccggcagaucgcccccggccagaccgggaagaucgccgacuacaacuacaagcugccggacgacuucacgggcugcgugaucgcguggaacagcaacaaccucgacuccaaggucgggggcaacuacaacuaccuguaccgccuguuccgcaagagcaaccucaagcccuucgagcgggacaucuccaccgagaucuaccaggccggcagcacccccugcaacgggguggagggcuucaacugcuacuucccccugcaguccuacggguuccagccgaccaacggcgugggguaccagcccuaccggguggucgugcugagcuucgagcuccugcacgcccccgccacggugugcggccccaagaaguccaccaaccuggucaagaacaagugcgugaacuucaacuucaacggccucaccgggaccggcgugcugaccgagagcaacaagaaguuccugccguuccagcaguucgggcgcgacaucgccgacacgaccgacgcgguccgcgacccccagacccuggagauccucgacaucacccccugcagcuucggcgggguguccgugaucacgccgggcaccaacaccagcaaccaggucgccgugcuguaccaggacgugaacugcaccgagguccccguggccauccacgccgaccagcugacgcccaccuggcggguguacuccaccggcagcaacgucuuccagacccgcgccgggugccucaucggcgcggagcacgugaacaacuccuacgagugcgacauccccaucggggccggcaucugcgccagcuaccagacgcagaccaacuccccgcggcgcgcccggagcguggcgucccagagcaucaucgccuacaccaugucccugggcgccgagaacagcgucgccuacuccaacaacagcaucgccauccccaccaacuucacgaucuccgugaccaccgagauccugcccgugagcaugaccaagacgagcgucgacugcaccauguacaucugcggggacuccaccgagugcagcaaccuccugcugcaguacggcuccuucugcacccagcucaaccgcgcgcugacggggaucgccguggagcaggacaagaacacccaggagguguucgcccaggucaagcagaucuacaagacgcccccgaucaaggacuucggcggguucaacuucagccagauccugcccgaccccuccaagcccagcaagcgguccuucaucgaggaccuccuguucaacaaggugacccuggccgacgccggcuucaucaagcaguacggcgacugccucggggacaucgcggcccgcgaccugaucugcgcccagaaguucaacggccugaccgugcucccgccccugcugaccgacgagaugaucgcccaguacaccagcgcccuccuggcggggaccaucacguccggcuggaccuucggggccggcgccgcccugcagauccccuucgcgaugcagauggccuaccgguucaacggcaucggggucacccagaacgugcucuacgagaaccagaagcugaucgccaaccaguucaacagcgccaucggcaagauccaggacucccugagcuccaccgccagcgcgcucgggaagcugcaggacguggucaaccagaacgcccaggcccugaacacgcucgugaagcagcuguccagcaacuucggcgccaucuccagcgugcugaacgacauccucucccgccuggacccgcccgaggccgaggugcagaucgaccggcugaucaccgggcgccuccagagccugcagaccuacgugacccagcagcugauccgggcggccgagauccgcgccagcgccaaccucgccgcgaccaagauguccgagugcguccugggccagagcaagcggguggacuucugcggcaagggguaccaccugauguccuucccccagagcgccccgcacggcguggucuuccuccacgugacguacgucuucgcccaggagaagaacuucaccaccgcccccgcgaucugccacgacgggaaggcccacuucccccgcgagggcguguucguguccaacgggacccacugguucgucacgcagcggaacuucuacgagccgcagaucaucaccaccgacaacaccuucgugagcggcaacugcgacguggucaucggcaucgugaacaacacgguguacgacccccugcagcccgagcuggacuccuucaaggaggagcucgacaaguacuucaagaaccacaccagccccgacgucgaccugggggacaucuccggcaucaacgccagcguggugaacauccagaaggagaucgaccgccugaacgaggucgccaagaaccucaacgagucccugaucgaccugcaggagcucgggaaguacgagcaguacaucaagggcgggagcggcuacauccccgaggccccgcgcgacgggcaggccuacgugcggaaggacggcgaguggguccugcucagcaccuuccuguga

SEQ ID NO: 11881 - RNA, 3726 nt, Artificial Sequence
  SARS-CoV-2/Wuhan/WIV05/2019__EPI_ISL_402128 spike protein CDS gc (1-1211)(K986P_V987P_ H1048Q_H1064N_ H1083N_H1101N) Foldon construct
auguucguguuccugguccuccugccccuggugagcucccagugcgugaaccucaccacccgcacgcagcugccgcccgccuacaccaacagcuucacccggggcgucuacuaccccgacaagguguuccgcuccagcgugcugcacuccacccaggaccucuuccugcccuucuucagcaacgucacgugguuccacgccauccacguguccgggaccaacggcaccaagcgguucgacaacccggugcugcccuucaacgacggggucuacuucgcgagcaccgagaaguccaacaucauccgcggcuggaucuucgggacgacccucgacagcaagacccagucccugcugaucgugaacaacgccaccaacguggucaucaaggugugcgaguuccaguucugcaacgaccccuuccucggcguguacuaccacaagaacaacaagagcuggauggaguccgaguuccgggucuacagcuccgccaacaacugcacguucgaguacgugagccagcccuuccugauggaccuggagggcaagcaggggaacuucaagaaccuccgcgaguucguguucaagaacaucgacggcuacuucaagaucuacuccaagcacaccccgaucaaccugguccgggaccugccccagggguucagcgcccucgagccccugguggaccugcccaucggcaucaacaucacccgcuuccagacccuccuggcccugcaccgguccuaccucacgccgggggacagcagcuccggcuggaccgcgggcgccgccgccuacuacgugggguaccugcagccccgcaccuuccugcucaaguacaacgagaacggcaccaucacggacgcggucgacugcgcccuggacccccugagcgagaccaagugcacccucaaguccuucaccguggagaaggggaucuaccagacgagcaacuuccgggugcagcccaccgaguccaucguccgcuucccgaacaucaccaaccugugccccuucggcgagguguucaacgccacccgguucgccagcgucuacgccuggaaccgcaagcggaucuccaacugcguggcggacuacagcgugcuguacaacuccgccagcuucuccacguucaagugcuacggcgucagccccaccaagcucaacgaccugugcuucaccaacguguacgccgacuccuucgugauccgcggggacgagguccggcagaucgcccccggccagaccgggaagaucgccgacuacaacuacaagcugccggacgacuucacgggcugcgugaucgcguggaacagcaacaaccucgacuccaaggucgggggcaacuacaacuaccuguaccgccuguuccgcaagagcaaccucaagcccuucgagcgggacaucuccaccgagaucuaccaggccggcagcacccccugcaacgggguggagggcuucaacugcuacuucccccugcaguccuacggguuccagccgaccaacggcgugggguaccagcccuaccggguggucgugcugagcuucgagcuccugcacgcccccgccacggugugcggccccaagaaguccaccaaccuggucaagaacaagugcgugaacuucaacuucaacggccucaccgggaccggcgugcugaccgagagcaacaagaaguuccugccguuccagcaguucgggcgcgacaucgccgacacgaccgacgcgguccgcgacccccagacccuggagauccucgacaucacccccugcagcuucggcgggguguccgugaucacgccgggcaccaacaccagcaaccaggucgccgugcuguaccaggacgugaacugcaccgagguccccguggccauccacgccgaccagcugacgcccaccuggcggguguacuccaccggcagcaacgucuuccagacccgcgccgggugccucaucggcgcggagcacgugaacaacuccuacgagugcgacauccccaucggggccggcaucugcgccagcuaccagacgcagaccaacuccccgcggcgcgcccggagcguggcgucccagagcaucaucgccuacaccaugucccugggcgccgagaacagcgucgccuacuccaacaacagcaucgccauccccaccaacuucacgaucuccgugaccaccgagauccugcccgugagcaugaccaagacgagcgucgacugcaccauguacaucugcggggacuccaccgagugcagcaaccuccugcugcaguacggcuccuucugcacccagcucaaccgcgcgcugacggggaucgccguggagcaggacaagaacacccaggagguguucgcccaggucaagcagaucuacaagacgcccccgaucaaggacuucggcggguucaacuucagccagauccugcccgaccccuccaagcccagcaagcgguccuucaucgaggaccuccuguucaacaaggugacccuggccgacgccggcuucaucaagcaguacggcgacugccucggggacaucgcggcccgcgaccugaucugcgcccagaaguucaacggccugaccgugcucccgccccugcugaccgacgagaugaucgcccaguacaccagcgcccuccuggcggggaccaucacguccggcuggaccuucggggccggcgccgcccugcagauccccuucgcgaugcagauggccuaccgguucaacggcaucggggucacccagaacgugcucuacgagaaccagaagcugaucgccaaccaguucaacagcgccaucggcaagauccaggacucccugagcuccaccgccagcgcgcucgggaagcugcaggacguggucaaccagaacgcccaggcccugaacacgcucgugaagcagcuguccagcaacuucggcgccaucuccagcgugcugaacgacauccucucccgccuggacccgcccgaggccgaggugcagaucgaccggcugaucaccgggcgccuccagagccugcagaccuacgugacccagcagcugauccgggcggccgagauccgcgccagcgccaaccucgccgcgaccaagauguccgagugcguccugggccagagcaagcggguggacuucugcggcaagggguaccagcugauguccuucccccagagcgccccgcacggcguggucuuccucaacgugacguacguccccgcccaggagaagaacuucaccaccgcccccgcgaucugcaacgacgggaaggcccacuucccccgcgagggcguguucguguccaacgggaccaacugguucgucacgcagcggaacuucuacgagccgcagaucaucaccaccgacaacaccuucgugagcggcaacugcgacguggucaucggcaucgugaacaacacgguguacgacccccugcagcccgagcuggacuccuucaaggaggagcucgacaaguacuucaagaaccacaccagccccgacgucgaccugggggacaucuccggcaucaacgccagcguggugaacauccagaaggagaucgaccgccugaacgaggucgccaagaaccucaacgagucccugaucgaccugcaggagcucgggaaguacgagcaguacaucaagggcgggagcggcuacauccccgaggccccgcgcgacgggcaggccuacgugcggaaggacggcgaguggguccugcucagcaccuuccuguga

SEQ ID NO: 11882 - RNA, 3726 nt, Artificial Sequence
  SARS-CoV-2/Wuhan/WIV05/2019__EPI_ISL_402128 spike protein CDS gc (1-1211)(I712C_T1077C) Foldon construct
auguucguguuccugguccuccugccccuggugagcucccagugcgugaaccucaccacccgcacgcagcugccgcccgccuacaccaacagcuucacccggggcgucuacuaccccgacaagguguuccgcuccagcgugcugcacuccacccaggaccucuuccugcccuucuucagcaacgucacgugguuccacgccauccacguguccgggaccaacggcaccaagcgguucgacaacccggugcugcccuucaacgacggggucuacuucgcgagcaccgagaaguccaacaucauccgcggcuggaucuucgggacgacccucgacagcaagacccagucccugcugaucgugaacaacgccaccaacguggucaucaaggugugcgaguuccaguucugcaacgaccccuuccucggcguguacuaccacaagaacaacaagagcuggauggaguccgaguuccgggucuacagcuccgccaacaacugcacguucgaguacgugagccagcccuuccugauggaccuggagggcaagcaggggaacuucaagaaccuccgcgaguucguguucaagaacaucgacggcuacuucaagaucuacuccaagcacaccccgaucaaccugguccgggaccugccccagggguucagcgcccucgagccccugguggaccugcccaucggcaucaacaucacccgcuuccagacccuccuggcccugcaccgguccuaccucacgccgggggacagcagcuccggcuggaccgcgggcgccgccgccuacuacgugggguaccugcagccccgcaccuuccugcucaaguacaacgagaacggcaccaucacggacgcggucgacugcgcccuggacccccugagcgagaccaagugcacccucaaguccuucaccguggagaaggggaucuaccagacgagcaacuuccgggugcagcccaccgaguccaucguccgcuucccgaacaucaccaaccugugccccuucggcgagguguucaacgccacccgguucgccagcgucuacgccuggaaccgcaagcggaucuccaacugcguggcggacuacagcgugcuguacaacuccgccagcuucuccacguucaagugcuacggcgucagccccaccaagcucaacgaccugugcuucaccaacguguacgccgacuccuucgugauccgcggggacgagguccggcagaucgcccccggccagaccgggaagaucgccgacuacaacuacaagcugccggacgacuucacgggcugcgugaucgcguggaacagcaacaaccucgacuccaaggucgggggcaacuacaacuaccuguaccgccuguuccgcaagagcaaccucaagcccuucgagcgggacaucuccaccgagaucuaccaggccggcagcacccccugcaacgggguggagggcuucaacugcuacuucccccugcaguccuacggguuccagccgaccaacggcgugggguaccagcccuaccggguggucgugcugagcuucgagcuccugcacgcccccgccacggugugcggccccaagaaguccaccaaccuggucaagaacaagugcgugaacuucaacuucaacggccucaccgggaccggcgugcugaccgagagcaacaagaaguuccugccguuccagcaguucgggcgcgacaucgccgacacgaccgacgcgguccgcgacccccagacccuggagauccucgacaucacccccugcagcuucggcgggguguccgugaucacgccgggcaccaacaccagcaaccaggucgccgugcuguaccaggacgugaacugcaccgagguccccguggccauccacgccgaccagcugacgcccaccuggcggguguacuccaccggcagcaacgucuuccagacccgcgccgggugccucaucggcgcggagcacgugaacaacuccuacgagugcgacauccccaucggggccggcaucugcgccagcuaccagacgcagaccaacuccccgcggcgcgcccggagcguggcgucccagagcaucaucgccuacaccaugucccugggcgccgagaacagcgucgccuacuccaacaacagcugcgccauccccaccaacuucacgaucuccgugaccaccgagauccugcccgugagcaugaccaagacgagcgucgacugcaccauguacaucugcggggacuccaccgagugcagcaaccuccugcugcaguacggcuccuucugcacccagcucaaccgcgcgcugacggggaucgccguggagcaggacaagaacacccaggagguguucgcccaggucaagcagaucuacaagacgcccccgaucaaggacuucggcggguucaacuucagccagauccugcccgaccccuccaagcccagcaagcgguccuucaucgaggaccuccuguucaacaaggugacccuggccgacgccggcuucaucaagcaguacggcgacugccucggggacaucgcggcccgcgaccugaucugcgcccagaaguucaacggccugaccgugcucccgccccugcugaccgacgagaugaucgcccaguacaccagcgcccuccuggcggggaccaucacguccggcuggaccuucggggccggcgccgcccugcagauccccuucgcgaugcagauggccuaccgguucaacggcaucggggucacccagaacgugcucuacgagaaccagaagcugaucgccaaccaguucaacagcgccaucggcaagauccaggacucccugagcuccaccgccagcgcgcucgggaagcugcaggacguggucaaccagaacgcccaggcccugaacacgcucgugaagcagcuguccagcaacuucggcgccaucuccagcgugcugaacgacauccucucccgccuggacaaggucgaggccgaggugcagaucgaccggcugaucaccgggcgccuccagagccugcagaccuacgugacccagcagcugauccgggcggccgagauccgcgccagcgccaaccucgccgcgaccaagauguccgagugcguccugggccagagcaagcggguggacuucugcggcaagggguaccaccugauguccuucccccagagcgccccgcacggcguggucuuccuccacgugacguacguccccgcccaggagaagaacuucaccugcgcccccgcgaucugccacgacgggaaggcccacuucccccgcgagggcguguucguguccaacgggacccacugguucgucacgcagcggaacuucuacgagccgcagaucaucaccaccgacaacaccuucgugagcggcaacugcgacguggucaucggcaucgugaacaacacgguguacgacccccugcagcccgagcuggacuccuucaaggaggagcucgacaaguacuucaagaaccacaccagccccgacgucgaccugggggacaucuccggcaucaacgccagcguggugaacauccagaaggagaucgaccgccugaacgaggucgccaagaaccucaacgagucccugaucgaccugcaggagcucgggaaguacgagcaguacaucaagggcgggagcggcuacauccccgaggccccgcgcgacgggcaggccuacgugcggaaggacggcgaguggguccugcucagcaccuuccuguga

SEQ ID NO: 11883 - RNA, 3726 nt, Artificial Sequence
  SARS-CoV-2/Wuhan/WIV05/2019__EPI_ISL_402128 spike protein CDS gc (1-1211)(I714C_Y1110C) Foldon construct
auguucguguuccugguccuccugccccuggugagcucccagugcgugaaccucaccacccgcacgcagcugccgcccgccuacaccaacagcuucacccggggcgucuacuaccccgacaagguguuccgcuccagcgugcugcacuccacccaggaccucuuccugcccuucuucagcaacgucacgugguuccacgccauccacguguccgggaccaacggcaccaagcgguucgacaacccggugcugcccuucaacgacggggucuacuucgcgagcaccgagaaguccaacaucauccgcggcuggaucuucgggacgacccucgacagcaagacccagucccugcugaucgugaacaacgccaccaacguggucaucaaggugugcgaguuccaguucugcaacgaccccuuccucggcguguacuaccacaagaacaacaagagcuggauggaguccgaguuccgggucuacagcuccgccaacaacugcacguucgaguacgugagccagcccuuccugauggaccuggagggcaagcaggggaacuucaagaaccuccgcgaguucguguucaagaacaucgacggcuacuucaagaucuacuccaagcacaccccgaucaaccugguccgggaccugccccagggguucagcgcccucgagccccugguggaccugcccaucggcaucaacaucacccgcuuccagacccuccuggcccugcaccgguccuaccucacgccgggggacagcagcuccggcuggaccgcgggcgccgccgccuacuacgugggguaccugcagccccgcaccuuccugcucaaguacaacgagaacggcaccaucacggacgcggucgacugcgcccuggacccccugagcgagaccaagugcacccucaaguccuucaccguggagaaggggaucuaccagacgagcaacuuccgggugcagcccaccgaguccaucguccgcuucccgaacaucaccaaccugugccccuucggcgagguguucaacgccacccgguucgccagcgucuacgccuggaaccgcaagcggaucuccaacugcguggcggacuacagcgugcuguacaacuccgccagcuucuccacguucaagugcuacggcgucagccccaccaagcucaacgaccugugcuucaccaacguguacgccgacuccuucgugauccgcggggacgagguccggcagaucgcccccggccagaccgggaagaucgccgacuacaacuacaagcugccggacgacuucacgggcugcgugaucgcguggaacagcaacaaccucgacuccaaggucgggggcaacuacaacuaccuguaccgccuguuccgcaagagcaaccucaagcccuucgagcgggacaucuccaccgagaucuaccaggccggcagcacccccugcaacgggguggagggcuucaacugcuacuucccccugcaguccuacggguuccagccgaccaacggcgugggguaccagcccuaccggguggucgugcugagcuucgagcuccugcacgcccccgccacggugugcggccccaagaaguccaccaaccuggucaagaacaagugcgugaacuucaacuucaacggccucaccgggaccggcgugcugaccgagagcaacaagaaguuccugccguuccagcaguucgggcgcgacaucgccgacacgaccgacgcgguccgcgacccccagacccuggagauccucgacaucacccccugcagcuucggcgggguguccgugaucacgccgggcaccaacaccagcaaccaggucgccgugcuguaccaggacgugaacugcaccgagguccccguggccauccacgccgaccagcugacgcccaccuggcggguguacuccaccggcagcaacgucuuccagacccgcgccgggugccucaucggcgcggagcacgugaacaacuccuacgagugcgacauccccaucggggccggcaucugcgccagcuaccagacgcagaccaacuccccgcggcgcgcccggagcguggcgucccagagcaucaucgccuacaccaugucccugggcgccgagaacagcgucgccuacuccaacaacagcaucgccugccccaccaacuucacgaucuccgugaccaccgagauccugcccgugagcaugaccaagacgagcgucgacugcaccauguacaucugcggggacuccaccgagugcagcaaccuccugcugcaguacggcuccuucugcacccagcucaaccgcgcgcugacggggaucgccguggagcaggacaagaacacccaggagguguucgcccaggucaagcagaucuacaagacgcccccgaucaaggacuucggcggguucaacuucagccagauccugcccgaccccuccaagcccagcaagcgguccuucaucgaggaccuccuguucaacaaggugacccuggccgacgccggcuucaucaagcaguacggcgacugccucggggacaucgcggcccgcgaccugaucugcgcccagaaguucaacggccugaccgugcucccgccccugcugaccgacgagaugaucgcccaguacaccagcgcccuccuggcggggaccaucacguccggcuggaccuucggggccggcgccgcccugcagauccccuucgcgaugcagauggccuaccgguucaacggcaucggggucacccagaacgugcucuacgagaaccagaagcugaucgccaaccaguucaacagcgccaucggcaagauccaggacucccugagcuccaccgccagcgcgcucgggaagcugcaggacguggucaaccagaacgcccaggcccugaacacgcucgugaagcagcuguccagcaacuucggcgccaucuccagcgugcugaacgacauccucucccgccuggacaaggucgaggccgaggugcagaucgaccggcugaucaccgggcgccuccagagccugcagaccuacgugacccagcagcugauccgggcggccgagauccgcgccagcgccaaccucgccgcgaccaagauguccgagugcguccugggccagagcaagcggguggacuucugcggcaagggguaccaccugauguccuucccccagagcgccccgcacggcguggucuuccuccacgugacguacguccccgcccaggagaagaacuucaccaccgcccccgcgaucugccacgacgggaaggcccacuucccccgcgagggcguguucguguccaacgggacccacugguucgucacgcagcggaacuucugcgagccgcagaucaucaccaccgacaacaccuucgugagcggcaacugcgacguggucaucggcaucgugaacaacacgguguacgacccccugcagcccgagcuggacuccuucaaggaggagcucgacaaguacuucaagaaccacaccagccccgacgucgaccugggggacaucuccggcaucaacgccagcguggugaacauccagaaggagaucgaccgccugaacgaggucgccaagaaccucaacgagucccugaucgaccugcaggagcucgggaaguacgagcaguacaucaagggcgggagcggcuacauccccgaggccccgcgcgacgggcaggccuacgugcggaaggacggcgaguggguccugcucagcaccuuccuguga

SEQ ID NO: 11884 - RNA, 3726 nt, Artificial Sequence
  SARS-CoV-2/Wuhan/WIV05/2019__EPI_ISL_402128 spike protein CDS gc (1-1211)(P715C_P1069C) Foldon construct
auguucguguuccugguccuccugccccuggugagcucccagugcgugaaccucaccacccgcacgcagcugccgcccgccuacaccaacagcuucacccggggcgucuacuaccccgacaagguguuccgcuccagcgugcugcacuccacccaggaccucuuccugcccuucuucagcaacgucacgugguuccacgccauccacguguccgggaccaacggcaccaagcgguucgacaacccggugcugcccuucaacgacggggucuacuucgcgagcaccgagaaguccaacaucauccgcggcuggaucuucgggacgacccucgacagcaagacccagucccugcugaucgugaacaacgccaccaacguggucaucaaggugugcgaguuccaguucugcaacgaccccuuccucggcguguacuaccacaagaacaacaagagcuggauggaguccgaguuccgggucuacagcuccgccaacaacugcacguucgaguacgugagccagcccuuccugauggaccuggagggcaagcaggggaacuucaagaaccuccgcgaguucguguucaagaacaucgacggcuacuucaagaucuacuccaagcacaccccgaucaaccugguccgggaccugccccagggguucagcgcccucgagccccugguggaccugcccaucggcaucaacaucacccgcuuccagacccuccuggcccugcaccgguccuaccucacgccgggggacagcagcuccggcuggaccgcgggcgccgccgccuacuacgugggguaccugcagccccgcaccuuccugcucaaguacaacgagaacggcaccaucacggacgcggucgacugcgcccuggacccccugagcgagaccaagugcacccucaaguccuucaccguggagaaggggaucuaccagacgagcaacuuccgggugcagcccaccgaguccaucguccgcuucccgaacaucaccaaccugugccccuucggcgagguguucaacgccacccgguucgccagcgucuacgccuggaaccgcaagcggaucuccaacugcguggcggacuacagcgugcuguacaacuccgccagcuucuccacguucaagugcuacggcgucagccccaccaagcucaacgaccugugcuucaccaacguguacgccgacuccuucgugauccgcggggacgagguccggcagaucgcccccggccagaccgggaagaucgccgacuacaacuacaagcugccggacgacuucacgggcugcgugaucgcguggaacagcaacaaccucgacuccaaggucgggggcaacuacaacuaccuguaccgccuguuccgcaagagcaaccucaagcccuucgagcgggacaucuccaccgagaucuaccaggccggcagcacccccugcaacgggguggagggcuucaacugcuacuucccccugcaguccuacggguuccagccgaccaacggcgugggguaccagcccuaccggguggucgugcugagcuucgagcuccugcacgcccccgccacggugugcggccccaagaaguccaccaaccuggucaagaacaagugcgugaacuucaacuucaacggccucaccgggaccggcgugcugaccgagagcaacaagaaguuccugccguuccagcaguucgggcgcgacaucgccgacacgaccgacgcgguccgcgacccccagacccuggagauccucgacaucacccccugcagcuucggcgggguguccgugaucacgccgggcaccaacaccagcaaccaggucgccgugcuguaccaggacgugaacugcaccgagguccccguggccauccacgccgaccagcugacgcccaccuggcggguguacuccaccggcagcaacgucuuccagacccgcgccgggugccucaucggcgcggagcacgugaacaacuccuacgagugcgacauccccaucggggccggcaucugcgccagcuaccagacgcagaccaacuccccgcggcgcgcccggagcguggcgucccagagcaucaucgccuacaccaugucccugggcgccgagaacagcgucgccuacuccaacaacagcaucgccaucugcaccaacuucacgaucuccgugaccaccgagauccugcccgugagcaugaccaagacgagcgucgacugcaccauguacaucugcggggacuccaccgagugcagcaaccuccugcugcaguacggcuccuucugcacccagcucaaccgcgcgcugacggggaucgccguggagcaggacaagaacacccaggagguguucgcccaggucaagcagaucuacaagacgcccccgaucaaggacuucggcggguucaacuucagccagauccugcccgaccccuccaagcccagcaagcgguccuucaucgaggaccuccuguucaacaaggugacccuggccgacgccggcuucaucaagcaguacggcgacugccucggggacaucgcggcccgcgaccugaucugcgcccagaaguucaacggccugaccgugcucccgccccugcugaccgacgagaugaucgcccaguacaccagcgcccuccuggcggggaccaucacguccggcuggaccuucggggccggcgccgcccugcagauccccuucgcgaugcagauggccuaccgguucaacggcaucggggucacccagaacgugcucuacgagaaccagaagcugaucgccaaccaguucaacagcgccaucggcaagauccaggacucccugagcuccaccgccagcgcgcucgggaagcugcaggacguggucaaccagaacgcccaggcccugaacacgcucgugaagcagcuguccagcaacuucggcgccaucuccagcgugcugaacgacauccucucccgccuggacaaggucgaggccgaggugcagaucgaccggcugaucaccgggcgccuccagagccugcagaccuacgugacccagcagcugauccgggcggccgagauccgcgccagcgccaaccucgccgcgaccaagauguccgagugcguccugggccagagcaagcggguggacuucugcggcaagggguaccaccugauguccuucccccagagcgccccgcacggcguggucuuccuccacgugacguacgucugcgcccaggagaagaacuucaccaccgcccccgcgaucugccacgacgggaaggcccacuucccccgcgagggcguguucguguccaacgggacccacugguucgucacgcagcggaacuucuacgagccgcagaucaucaccaccgacaacaccuucgugagcggcaacugcgacguggucaucggcaucgugaacaacacgguguacgacccccugcagcccgagcuggacuccuucaaggaggagcucgacaaguacuucaagaaccacaccagccccgacgucgaccugggggacaucuccggcaucaacgccagcguggugaacauccagaaggagaucgaccgccugaacgaggucgccaagaaccucaacgagucccugaucgaccugcaggagcucgggaaguacgagcaguacaucaagggcgggagcggcuacauccccgaggccccgcgcgacgggcaggccuacgugcggaaggacggcgaguggguccugcucagcaccuuccuguga

SEQ ID NO: 11885 - RNA, 3726 nt, Artificial Sequence
  SARS-CoV-2/Wuhan/WIV05/2019__EPI_ISL_402128 spike protein CDS gc (1-1211)(G889C_L1034C) Foldon construct
auguucguguuccugguccuccugccccuggugagcucccagugcgugaaccucaccacccgcacgcagcugccgcccgccuacaccaacagcuucacccggggcgucuacuaccccgacaagguguuccgcuccagcgugcugcacuccacccaggaccucuuccugcccuucuucagcaacgucacgugguuccacgccauccacguguccgggaccaacggcaccaagcgguucgacaacccggugcugcccuucaacgacggggucuacuucgcgagcaccgagaaguccaacaucauccgcggcuggaucuucgggacgacccucgacagcaagacccagucccugcugaucgugaacaacgccaccaacguggucaucaaggugugcgaguuccaguucugcaacgaccccuuccucggcguguacuaccacaagaacaacaagagcuggauggaguccgaguuccgggucuacagcuccgccaacaacugcacguucgaguacgugagccagcccuuccugauggaccuggagggcaagcaggggaacuucaagaaccuccgcgaguucguguucaagaacaucgacggcuacuucaagaucuacuccaagcacaccccgaucaaccugguccgggaccugccccagggguucagcgcccucgagccccugguggaccugcccaucggcaucaacaucacccgcuuccagacccuccuggcccugcaccgguccuaccucacgccgggggacagcagcuccggcuggaccgcgggcgccgccgccuacuacgugggguaccugcagccccgcaccuuccugcucaaguacaacgagaacggcaccaucacggacgcggucgacugcgcccuggacccccugagcgagaccaagugcacccucaaguccuucaccguggagaaggggaucuaccagacgagcaacuuccgggugcagcccaccgaguccaucguccgcuucccgaacaucaccaaccugugccccuucggcgagguguucaacgccacccgguucgccagcgucuacgccuggaaccgcaagcggaucuccaacugcguggcggacuacagcgugcuguacaacuccgccagcuucuccacguucaagugcuacggcgucagccccaccaagcucaacgaccugugcuucaccaacguguacgccgacuccuucgugauccgcggggacgagguccggcagaucgcccccggccagaccgggaagaucgccgacuacaacuacaagcugccggacgacuucacgggcugcgugaucgcguggaacagcaacaaccucgacuccaaggucgggggcaacuacaacuaccuguaccgccuguuccgcaagagcaaccucaagcccuucgagcgggacaucuccaccgagaucuaccaggccggcagcacccccugcaacgggguggagggcuucaacugcuacuucccccugcaguccuacggguuccagccgaccaacggcgugggguaccagcccuaccggguggucgugcugagcuucgagcuccugcacgcccccgccacggugugcggccccaagaaguccaccaaccuggucaagaacaagugcgugaacuucaacuucaacggccucaccgggaccggcgugcugaccgagagcaacaagaaguuccugccguuccagcaguucgggcgcgacaucgccgacacgaccgacgcgguccgcgacccccagacccuggagauccucgacaucacccccugcagcuucggcgggguguccgugaucacgccgggcaccaacaccagcaaccaggucgccgugcuguaccaggacgugaacugcaccgagguccccguggccauccacgccgaccagcugacgcccaccuggcggguguacuccaccggcagcaacgucuuccagacccgcgccgggugccucaucggcgcggagcacgugaacaacuccuacgagugcgacauccccaucggggccggcaucugcgccagcuaccagacgcagaccaacuccccgcggcgcgcccggagcguggcgucccagagcaucaucgccuacaccaugucccugggcgccgagaacagcgucgccuacuccaacaacagcaucgccauccccaccaacuucacgaucuccgugaccaccgagauccugcccgugagcaugaccaagacgagcgucgacugcaccauguacaucugcggggacuccaccgagugcagcaaccuccugcugcaguacggcuccuucugcacccagcucaaccgcgcgcugacggggaucgccguggagcaggacaagaacacccaggagguguucgcccaggucaagcagaucuacaagacgcccccgaucaaggacuucggcggguucaacuucagccagauccugcccgaccccuccaagcccagcaagcgguccuucaucgaggaccuccuguucaacaaggugacccuggccgacgccggcuucaucaagcaguacggcgacugccucggggacaucgcggcccgcgaccugaucugcgcccagaaguucaacggccugaccgugcucccgccccugcugaccgacgagaugaucgcccaguacaccagcgcccuccuggcggggaccaucacguccggcuggaccuucugcgccggcgccgcccugcagauccccuucgcgaugcagauggccuaccgguucaacggcaucggggucacccagaacgugcucuacgagaaccagaagcugaucgccaaccaguucaacagcgccaucggcaagauccaggacucccugagcuccaccgccagcgcgcucgggaagcugcaggacguggucaaccagaacgcccaggcccugaacacgcucgugaagcagcuguccagcaacuucggcgccaucuccagcgugcugaacgacauccucucccgccuggacaaggucgaggccgaggugcagaucgaccggcugaucaccgggcgccuccagagccugcagaccuacgugacccagcagcugauccgggcggccgagauccgcgccagcgccaaccucgccgcgaccaagauguccgagugcgucugcggccagagcaagcggguggacuucugcggcaagggguaccaccugauguccuucccccagagcgccccgcacggcguggucuuccuccacgugacguacguccccgcccaggagaagaacuucaccaccgcccccgcgaucugccacgacgggaaggcccacuucccccgcgagggcguguucguguccaacgggacccacugguucgucacgcagcggaacuucuacgagccgcagaucaucaccaccgacaacaccuucgugagcggcaacugcgacguggucaucggcaucgugaacaacacgguguacgacccccugcagcccgagcuggacuccuucaaggaggagcucgacaaguacuucaagaaccacaccagccccgacgucgaccugggggacaucuccggcaucaacgccagcguggugaacauccagaaggagaucgaccgccugaacgaggucgccaagaaccucaacgagucccugaucgaccugcaggagcucgggaaguacgagcaguacaucaagggcgggagcggcuacauccccgaggccccgcgcgacgggcaggccuacgugcggaaggacggcgaguggguccugcucagcaccuuccuguga

SEQ ID NO: 11886 - RNA, 3726 nt, Artificial Sequence
  SARS-CoV-2/Wuhan/WIV05/2019__EPI_ISL_402128 spike protein CDS gc (1-1211)(I909C_Y1047C) Foldon construct
auguucguguuccugguccuccugccccuggugagcucccagugcgugaaccucaccacccgcacgcagcugccgcccgccuacaccaacagcuucacccggggcgucuacuaccccgacaagguguuccgcuccagcgugcugcacuccacccaggaccucuuccugcccuucuucagcaacgucacgugguuccacgccauccacguguccgggaccaacggcaccaagcgguucgacaacccggugcugcccuucaacgacggggucuacuucgcgagcaccgagaaguccaacaucauccgcggcuggaucuucgggacgacccucgacagcaagacccagucccugcugaucgugaacaacgccaccaacguggucaucaaggugugcgaguuccaguucugcaacgaccccuuccucggcguguacuaccacaagaacaacaagagcuggauggaguccgaguuccgggucuacagcuccgccaacaacugcacguucgaguacgugagccagcccuuccugauggaccuggagggcaagcaggggaacuucaagaaccuccgcgaguucguguucaagaacaucgacggcuacuucaagaucuacuccaagcacaccccgaucaaccugguccgggaccugccccagggguucagcgcccucgagccccugguggaccugcccaucggcaucaacaucacccgcuuccagacccuccuggcccugcaccgguccuaccucacgccgggggacagcagcuccggcuggaccgcgggcgccgccgccuacuacgugggguaccugcagccccgcaccuuccugcucaaguacaacgagaacggcaccaucacggacgcggucgacugcgcccuggacccccugagcgagaccaagugcacccucaaguccuucaccguggagaaggggaucuaccagacgagcaacuuccgggugcagcccaccgaguccaucguccgcuucccgaacaucaccaaccugugccccuucggcgagguguucaacgccacccgguucgccagcgucuacgccuggaaccgcaagcggaucuccaacugcguggcggacuacagcgugcuguacaacuccgccagcuucuccacguucaagugcuacggcgucagccccaccaagcucaacgaccugugcuucaccaacguguacgccgacuccuucgugauccgcggggacgagguccggcagaucgcccccggccagaccgggaagaucgccgacuacaacuacaagcugccggacgacuucacgggcugcgugaucgcguggaacagcaacaaccucgacuccaaggucgggggcaacuacaacuaccuguaccgccuguuccgcaagagcaaccucaagcccuucgagcgggacaucuccaccgagaucuaccaggccggcagcacccccugcaacgggguggagggcuucaacugcuacuucccccugcaguccuacggguuccagccgaccaacggcgugggguaccagcccuaccggguggucgugcugagcuucgagcuccugcacgcccccgccacggugugcggccccaagaaguccaccaaccuggucaagaacaagugcgugaacuucaacuucaacggccucaccgggaccggcgugcugaccgagagcaacaagaaguuccugccguuccagcaguucgggcgcgacaucgccgacacgaccgacgcgguccgcgacccccagacccuggagauccucgacaucacccccugcagcuucggcgggguguccgugaucacgccgggcaccaacaccagcaaccaggucgccgugcuguaccaggacgugaacugcaccgagguccccguggccauccacgccgaccagcugacgcccaccuggcggguguacuccaccggcagcaacgucuuccagacccgcgccgggugccucaucggcgcggagcacgugaacaacuccuacgagugcgacauccccaucggggccggcaucugcgccagcuaccagacgcagaccaacuccccgcggcgcgcccggagcguggcgucccagagcaucaucgccuacaccaugucccugggcgccgagaacagcgucgccuacuccaacaacagcaucgccauccccaccaacuucacgaucuccgugaccaccgagauccugcccgugagcaugaccaagacgagcgucgacugcaccauguacaucugcggggacuccaccgagugcagcaaccuccugcugcaguacggcuccuucugcacccagcucaaccgcgcgcugacggggaucgccguggagcaggacaagaacacccaggagguguucgcccaggucaagcagaucuacaagacgcccccgaucaaggacuucggcggguucaacuucagccagauccugcccgaccccuccaagcccagcaagcgguccuucaucgaggaccuccuguucaacaaggugacccuggccgacgccggcuucaucaagcaguacggcgacugccucggggacaucgcggcccgcgaccugaucugcgcccagaaguucaacggccugaccgugcucccgccccugcugaccgacgagaugaucgcccaguacaccagcgcccuccuggcggggaccaucacguccggcuggaccuucggggccggcgccgcccugcagauccccuucgcgaugcagauggccuaccgguucaacggcugcggggucacccagaacgugcucuacgagaaccagaagcugaucgccaaccaguucaacagcgccaucggcaagauccaggacucccugagcuccaccgccagcgcgcucgggaagcugcaggacguggucaaccagaacgcccaggcccugaacacgcucgugaagcagcuguccagcaacuucggcgccaucuccagcgugcugaacgacauccucucccgccuggacaaggucgaggccgaggugcagaucgaccggcugaucaccgggcgccuccagagccugcagaccuacgugacccagcagcugauccgggcggccgagauccgcgccagcgccaaccucgccgcgaccaagauguccgagugcguccugggccagagcaagcggguggacuucugcggcaaggggugccaccugauguccuucccccagagcgccccgcacggcguggucuuccuccacgugacguacguccccgcccaggagaagaacuucaccaccgcccccgcgaucugccacgacgggaaggcccacuucccccgcgagggcguguucguguccaacgggacccacugguucgucacgcagcggaacuucuacgagccgcagaucaucaccaccgacaacaccuucgugagcggcaacugcgacguggucaucggcaucgugaacaacacgguguacgacccccugcagcccgagcuggacuccuucaaggaggagcucgacaaguacuucaagaaccacaccagccccgacgucgaccugggggacaucuccggcaucaacgccagcguggugaacauccagaaggagaucgaccgccugaacgaggucgccaagaaccucaacgagucccugaucgaccugcaggagcucgggaaguacgagcaguacaucaagggcgggagcggcuacauccccgaggccccgcgcgacgggcaggccuacgugcggaaggacggcgaguggguccugcucagcaccuuccuguga

SEQ ID NO: 11887 - RNA, 3726 nt, Artificial Sequence
  SARS-CoV-2/Wuhan/WIV05/2019__EPI_ISL_402128 spike protein CDS gc (1-1211)(Q965C_S1003C) Foldon construct
auguucguguuccugguccuccugccccuggugagcucccagugcgugaaccucaccacccgcacgcagcugccgcccgccuacaccaacagcuucacccggggcgucuacuaccccgacaagguguuccgcuccagcgugcugcacuccacccaggaccucuuccugcccuucuucagcaacgucacgugguuccacgccauccacguguccgggaccaacggcaccaagcgguucgacaacccggugcugcccuucaacgacggggucuacuucgcgagcaccgagaaguccaacaucauccgcggcuggaucuucgggacgacccucgacagcaagacccagucccugcugaucgugaacaacgccaccaacguggucaucaaggugugcgaguuccaguucugcaacgaccccuuccucggcguguacuaccacaagaacaacaagagcuggauggaguccgaguuccgggucuacagcuccgccaacaacugcacguucgaguacgugagccagcccuuccugauggaccuggagggcaagcaggggaacuucaagaaccuccgcgaguucguguucaagaacaucgacggcuacuucaagaucuacuccaagcacaccccgaucaaccugguccgggaccugccccagggguucagcgcccucgagccccugguggaccugcccaucggcaucaacaucacccgcuuccagacccuccuggcccugcaccgguccuaccucacgccgggggacagcagcuccggcuggaccgcgggcgccgccgccuacuacgugggguaccugcagccccgcaccuuccugcucaaguacaacgagaacggcaccaucacggacgcggucgacugcgcccuggacccccugagcgagaccaagugcacccucaaguccuucaccguggagaaggggaucuaccagacgagcaacuuccgggugcagcccaccgaguccaucguccgcuucccgaacaucaccaaccugugccccuucggcgagguguucaacgccacccgguucgccagcgucuacgccuggaaccgcaagcggaucuccaacugcguggcggacuacagcgugcuguacaacuccgccagcuucuccacguucaagugcuacggcgucagccccaccaagcucaacgaccugugcuucaccaacguguacgccgacuccuucgugauccgcggggacgagguccggcagaucgcccccggccagaccgggaagaucgccgacuacaacuacaagcugccggacgacuucacgggcugcgugaucgcguggaacagcaacaaccucgacuccaaggucgggggcaacuacaacuaccuguaccgccuguuccgcaagagcaaccucaagcccuucgagcgggacaucuccaccgagaucuaccaggccggcagcacccccugcaacgggguggagggcuucaacugcuacuucccccugcaguccuacggguuccagccgaccaacggcgugggguaccagcccuaccggguggucgugcugagcuucgagcuccugcacgcccccgccacggugugcggccccaagaaguccaccaaccuggucaagaacaagugcgugaacuucaacuucaacggccucaccgggaccggcgugcugaccgagagcaacaagaaguuccugccguuccagcaguucgggcgcgacaucgccgacacgaccgacgcgguccgcgacccccagacccuggagauccucgacaucacccccugcagcuucggcgggguguccgugaucacgccgggcaccaacaccagcaaccaggucgccgugcuguaccaggacgugaacugcaccgagguccccguggccauccacgccgaccagcugacgcccaccuggcggguguacuccaccggcagcaacgucuuccagacccgcgccgggugccucaucggcgcggagcacgugaacaacuccuacgagugcgacauccccaucggggccggcaucugcgccagcuaccagacgcagaccaacuccccgcggcgcgcccggagcguggcgucccagagcaucaucgccuacaccaugucccugggcgccgagaacagcgucgccuacuccaacaacagcaucgccauccccaccaacuucacgaucuccgugaccaccgagauccugcccgugagcaugaccaagacgagcgucgacugcaccauguacaucugcggggacuccaccgagugcagcaaccuccugcugcaguacggcuccuucugcacccagcucaaccgcgcgcugacggggaucgccguggagcaggacaagaacacccaggagguguucgcccaggucaagcagaucuacaagacgcccccgaucaaggacuucggcggguucaacuucagccagauccugcccgaccccuccaagcccagcaagcgguccuucaucgaggaccuccuguucaacaaggugacccuggccgacgccggcuucaucaagcaguacggcgacugccucggggacaucgcggcccgcgaccugaucugcgcccagaaguucaacggccugaccgugcucccgccccugcugaccgacgagaugaucgcccaguacaccagcgcccuccuggcggggaccaucacguccggcuggaccuucggggccggcgccgcccugcagauccccuucgcgaugcagauggccuaccgguucaacggcaucggggucacccagaacgugcucuacgagaaccagaagcugaucgccaaccaguucaacagcgccaucggcaagauccaggacucccugagcuccaccgccagcgcgcucgggaagcugcaggacguggucaaccagaacgcccaggcccugaacacgcucgugaagugccuguccagcaacuucggcgccaucuccagcgugcugaacgacauccucucccgccuggacaaggucgaggccgaggugcagaucgaccggcugaucaccgggcgccuccagugccugcagaccuacgugacccagcagcugauccgggcggccgagauccgcgccagcgccaaccucgccgcgaccaagauguccgagugcguccugggccagagcaagcggguggacuucugcggcaagggguaccaccugauguccuucccccagagcgccccgcacggcguggucuuccuccacgugacguacguccccgcccaggagaagaacuucaccaccgcccccgcgaucugccacgacgggaaggcccacuucccccgcgagggcguguucguguccaacgggacccacugguucgucacgcagcggaacuucuacgagccgcagaucaucaccaccgacaacaccuucgugagcggcaacugcgacguggucaucggcaucgugaacaacacgguguacgacccccugcagcccgagcuggacuccuucaaggaggagcucgacaaguacuucaagaaccacaccagccccgacgucgaccugggggacaucuccggcaucaacgccagcguggugaacauccagaaggagaucgaccgccugaacgaggucgccaagaaccucaacgagucccugaucgaccugcaggagcucgggaaguacgagcaguacaucaagggcgggagcggcuacauccccgaggccccgcgcgacgggcaggccuacgugcggaaggacggcgaguggguccugcucagcaccuuccuguga

SEQ ID NO: 11888 - RNA, 3726 nt, Artificial Sequence
  SARS-CoV-2/Wuhan/WIV05/2019__EPI_ISL_402128 spike protein CDS gc (1-1211)(F970C_G999C) Foldon construct
auguucguguuccugguccuccugccccuggugagcucccagugcgugaaccucaccacccgcacgcagcugccgcccgccuacaccaacagcuucacccggggcgucuacuaccccgacaagguguuccgcuccagcgugcugcacuccacccaggaccucuuccugcccuucuucagcaacgucacgugguuccacgccauccacguguccgggaccaacggcaccaagcgguucgacaacccggugcugcccuucaacgacggggucuacuucgcgagcaccgagaaguccaacaucauccgcggcuggaucuucgggacgacccucgacagcaagacccagucccugcugaucgugaacaacgccaccaacguggucaucaaggugugcgaguuccaguucugcaacgaccccuuccucggcguguacuaccacaagaacaacaagagcuggauggaguccgaguuccgggucuacagcuccgccaacaacugcacguucgaguacgugagccagcccuuccugauggaccuggagggcaagcaggggaacuucaagaaccuccgcgaguucguguucaagaacaucgacggcuacuucaagaucuacuccaagcacaccccgaucaaccugguccgggaccugccccagggguucagcgcccucgagccccugguggaccugcccaucggcaucaacaucacccgcuuccagacccuccuggcccugcaccgguccuaccucacgccgggggacagcagcuccggcuggaccgcgggcgccgccgccuacuacgugggguaccugcagccccgcaccuuccugcucaaguacaacgagaacggcaccaucacggacgcggucgacugcgcccuggacccccugagcgagaccaagugcacccucaaguccuucaccguggagaaggggaucuaccagacgagcaacuuccgggugcagcccaccgaguccaucguccgcuucccgaacaucaccaaccugugccccuucggcgagguguucaacgccacccgguucgccagcgucuacgccuggaaccgcaagcggaucuccaacugcguggcggacuacagcgugcuguacaacuccgccagcuucuccacguucaagugcuacggcgucagccccaccaagcucaacgaccugugcuucaccaacguguacgccgacuccuucgugauccgcggggacgagguccggcagaucgcccccggccagaccgggaagaucgccgacuacaacuacaagcugccggacgacuucacgggcugcgugaucgcguggaacagcaacaaccucgacuccaaggucgggggcaacuacaacuaccuguaccgccuguuccgcaagagcaaccucaagcccuucgagcgggacaucuccaccgagaucuaccaggccggcagcacccccugcaacgggguggagggcuucaacugcuacuucccccugcaguccuacggguuccagccgaccaacggcgugggguaccagcccuaccggguggucgugcugagcuucgagcuccugcacgcccccgccacggugugcggccccaagaaguccaccaaccuggucaagaacaagugcgugaacuucaacuucaacggccucaccgggaccggcgugcugaccgagagcaacaagaaguuccugccguuccagcaguucgggcgcgacaucgccgacacgaccgacgcgguccgcgacccccagacccuggagauccucgacaucacccccugcagcuucggcgggguguccgugaucacgccgggcaccaacaccagcaaccaggucgccgugcuguaccaggacgugaacugcaccgagguccccguggccauccacgccgaccagcugacgcccaccuggcggguguacuccaccggcagcaacgucuuccagacccgcgccgggugccucaucggcgcggagcacgugaacaacuccuacgagugcgacauccccaucggggccggcaucugcgccagcuaccagacgcagaccaacuccccgcggcgcgcccggagcguggcgucccagagcaucaucgccuacaccaugucccugggcgccgagaacagcgucgccuacuccaacaacagcaucgccauccccaccaacuucacgaucuccgugaccaccgagauccugcccgugagcaugaccaagacgagcgucgacugcaccauguacaucugcggggacuccaccgagugcagcaaccuccugcugcaguacggcuccuucugcacccagcucaaccgcgcgcugacggggaucgccguggagcaggacaagaacacccaggagguguucgcccaggucaagcagaucuacaagacgcccccgaucaaggacuucggcggguucaacuucagccagauccugcccgaccccuccaagcccagcaagcgguccuucaucgaggaccuccuguucaacaaggugacccuggccgacgccggcuucaucaagcaguacggcgacugccucggggacaucgcggcccgcgaccugaucugcgcccagaaguucaacggccugaccgugcucccgccccugcugaccgacgagaugaucgcccaguacaccagcgcccuccuggcggggaccaucacguccggcuggaccuucggggccggcgccgcccugcagauccccuucgcgaugcagauggccuaccgguucaacggcaucggggucacccagaacgugcucuacgagaaccagaagcugaucgccaaccaguucaacagcgccaucggcaagauccaggacucccugagcuccaccgccagcgcgcucgggaagcugcaggacguggucaaccagaacgcccaggcccugaacacgcucgugaagcagcuguccagcaacugcggcgccaucuccagcgugcugaacgacauccucucccgccuggacaaggucgaggccgaggugcagaucgaccggcugaucaccugucgccuccagagccugcagaccuacgugacccagcagcugauccgggcggccgagauccgcgccagcgccaaccucgccgcgaccaagauguccgagugcguccugggccagagcaagcggguggacuucugcggcaagggguaccaccugauguccuucccccagagcgccccgcacggcguggucuuccuccacgugacguacguccccgcccaggagaagaacuucaccaccgcccccgcgaucugccacgacgggaaggcccacuucccccgcgagggcguguucguguccaacgggacccacugguucgucacgcagcggaacuucuacgagccgcagaucaucaccaccgacaacaccuucgugagcggcaacugcgacguggucaucggcaucgugaacaacacgguguacgacccccugcagcccgagcuggacuccuucaaggaggagcucgacaaguacuucaagaaccacaccagccccgacgucgaccugggggacaucuccggcaucaacgccagcguggugaacauccagaaggagaucgaccgccugaacgaggucgccaagaaccucaacgagucccugaucgaccugcaggagcucgggaaguacgagcaguacaucaagggcgggagcggcuacauccccgaggccccgcgcgacgggcaggccuacgugcggaaggacggcgaguggguccugcucagcaccuuccuguga

SEQ ID NO: 11889 - RNA, 3726 nt, Artificial Sequence
  SARS-CoV-2/Wuhan/WIV05/2019__EPI_ISL_402128 spike protein CDS gc (1-1211)(A972C_R995C) Foldon construct
auguucguguuccugguccuccugccccuggugagcucccagugcgugaaccucaccacccgcacgcagcugccgcccgccuacaccaacagcuucacccggggcgucuacuaccccgacaagguguuccgcuccagcgugcugcacuccacccaggaccucuuccugcccuucuucagcaacgucacgugguuccacgccauccacguguccgggaccaacggcaccaagcgguucgacaacccggugcugcccuucaacgacggggucuacuucgcgagcaccgagaaguccaacaucauccgcggcuggaucuucgggacgacccucgacagcaagacccagucccugcugaucgugaacaacgccaccaacguggucaucaaggugugcgaguuccaguucugcaacgaccccuuccucggcguguacuaccacaagaacaacaagagcuggauggaguccgaguuccgggucuacagcuccgccaacaacugcacguucgaguacgugagccagcccuuccugauggaccuggagggcaagcaggggaacuucaagaaccuccgcgaguucguguucaagaacaucgacggcuacuucaagaucuacuccaagcacaccccgaucaaccugguccgggaccugccccagggguucagcgcccucgagccccugguggaccugcccaucggcaucaacaucacccgcuuccagacccuccuggcccugcaccgguccuaccucacgccgggggacagcagcuccggcuggaccgcgggcgccgccgccuacuacgugggguaccugcagccccgcaccuuccugcucaaguacaacgagaacggcaccaucacggacgcggucgacugcgcccuggacccccugagcgagaccaagugcacccucaaguccuucaccguggagaaggggaucuaccagacgagcaacuuccgggugcagcccaccgaguccaucguccgcuucccgaacaucaccaaccugugccccuucggcgagguguucaacgccacccgguucgccagcgucuacgccuggaaccgcaagcggaucuccaacugcguggcggacuacagcgugcuguacaacuccgccagcuucuccacguucaagugcuacggcgucagccccaccaagcucaacgaccugugcuucaccaacguguacgccgacuccuucgugauccgcggggacgagguccggcagaucgcccccggccagaccgggaagaucgccgacuacaacuacaagcugccggacgacuucacgggcugcgugaucgcguggaacagcaacaaccucgacuccaaggucgggggcaacuacaacuaccuguaccgccuguuccgcaagagcaaccucaagcccuucgagcgggacaucuccaccgagaucuaccaggccggcagcacccccugcaacgggguggagggcuucaacugcuacuucccccugcaguccuacggguuccagccgaccaacggcgugggguaccagcccuaccggguggucgugcugagcuucgagcuccugcacgcccccgccacggugugcggccccaagaaguccaccaaccuggucaagaacaagugcgugaacuucaacuucaacggccucaccgggaccggcgugcugaccgagagcaacaagaaguuccugccguuccagcaguucgggcgcgacaucgccgacacgaccgacgcgguccgcgacccccagacccuggagauccucgacaucacccccugcagcuucggcgggguguccgugaucacgccgggcaccaacaccagcaaccaggucgccgugcuguaccaggacgugaacugcaccgagguccccguggccauccacgccgaccagcugacgcccaccuggcggguguacuccaccggcagcaacgucuuccagacccgcgccgggugccucaucggcgcggagcacgugaacaacuccuacgagugcgacauccccaucggggccggcaucugcgccagcuaccagacgcagaccaacuccccgcggcgcgcccggagcguggcgucccagagcaucaucgccuacaccaugucccugggcgccgagaacagcgucgccuacuccaacaacagcaucgccauccccaccaacuucacgaucuccgugaccaccgagauccugcccgugagcaugaccaagacgagcgucgacugcaccauguacaucugcggggacuccaccgagugcagcaaccuccugcugcaguacggcuccuucugcacccagcucaaccgcgcgcugacggggaucgccguggagcaggacaagaacacccaggagguguucgcccaggucaagcagaucuacaagacgcccccgaucaaggacuucggcggguucaacuucagccagauccugcccgaccccuccaagcccagcaagcgguccuucaucgaggaccuccuguucaacaaggugacccuggccgacgccggcuucaucaagcaguacggcgacugccucggggacaucgcggcccgcgaccugaucugcgcccagaaguucaacggccugaccgugcucccgccccugcugaccgacgagaugaucgcccaguacaccagcgcccuccuggcggggaccaucacguccggcuggaccuucggggccggcgccgcccugcagauccccuucgcgaugcagauggccuaccgguucaacggcaucggggucacccagaacgugcucuacgagaaccagaagcugaucgccaaccaguucaacagcgccaucggcaagauccaggacucccugagcuccaccgccagcgcgcucgggaagcugcaggacguggucaaccagaacgcccaggcccugaacacgcucgugaagcagcuguccagcaacuucggcugcaucuccagcgugcugaacgacauccucucccgccuggacaaggucgaggccgaggugcagaucgacugccugaucaccgggcgccuccagagccugcagaccuacgugacccagcagcugauccgggcggccgagauccgcgccagcgccaaccucgccgcgaccaagauguccgagugcguccugggccagagcaagcggguggacuucugcggcaagggguaccaccugauguccuucccccagagcgccccgcacggcguggucuuccuccacgugacguacguccccgcccaggagaagaacuucaccaccgcccccgcgaucugccacgacgggaaggcccacuucccccgcgagggcguguucguguccaacgggacccacugguucgucacgcagcggaacuucuacgagccgcagaucaucaccaccgacaacaccuucgugagcggcaacugcgacguggucaucggcaucgugaacaacacgguguacgacccccugcagcccgagcuggacuccuucaaggaggagcucgacaaguacuucaagaaccacaccagccccgacgucgaccugggggacaucuccggcaucaacgccagcguggugaacauccagaaggagaucgaccgccugaacgaggucgccaagaaccucaacgagucccugaucgaccugcaggagcucgggaaguacgagcaguacaucaagggcgggagcggcuacauccccgaggccccgcgcgacgggcaggccuacgugcggaaggacggcgaguggguccugcucagcaccuuccuguga

SEQ ID NO: 11890 - RNA, 3726 nt, Artificial Sequence
  SARS-CoV-2/Wuhan/WIV05/2019__EPI_ISL_402128 spike protein CDS gc (1-1211)(A890C_V1040C) Foldon construct
auguucguguuccugguccuccugccccuggugagcucccagugcgugaaccucaccacccgcacgcagcugccgcccgccuacaccaacagcuucacccggggcgucuacuaccccgacaagguguuccgcuccagcgugcugcacuccacccaggaccucuuccugcccuucuucagcaacgucacgugguuccacgccauccacguguccgggaccaacggcaccaagcgguucgacaacccggugcugcccuucaacgacggggucuacuucgcgagcaccgagaaguccaacaucauccgcggcuggaucuucgggacgacccucgacagcaagacccagucccugcugaucgugaacaacgccaccaacguggucaucaaggugugcgaguuccaguucugcaacgaccccuuccucggcguguacuaccacaagaacaacaagagcuggauggaguccgaguuccgggucuacagcuccgccaacaacugcacguucgaguacgugagccagcccuuccugauggaccuggagggcaagcaggggaacuucaagaaccuccgcgaguucguguucaagaacaucgacggcuacuucaagaucuacuccaagcacaccccgaucaaccugguccgggaccugccccagggguucagcgcccucgagccccugguggaccugcccaucggcaucaacaucacccgcuuccagacccuccuggcccugcaccgguccuaccucacgccgggggacagcagcuccggcuggaccgcgggcgccgccgccuacuacgugggguaccugcagccccgcaccuuccugcucaaguacaacgagaacggcaccaucacggacgcggucgacugcgcccuggacccccugagcgagaccaagugcacccucaaguccuucaccguggagaaggggaucuaccagacgagcaacuuccgggugcagcccaccgaguccaucguccgcuucccgaacaucaccaaccugugccccuucggcgagguguucaacgccacccgguucgccagcgucuacgccuggaaccgcaagcggaucuccaacugcguggcggacuacagcgugcuguacaacuccgccagcuucuccacguucaagugcuacggcgucagccccaccaagcucaacgaccugugcuucaccaacguguacgccgacuccuucgugauccgcggggacgagguccggcagaucgcccccggccagaccgggaagaucgccgacuacaacuacaagcugccggacgacuucacgggcugcgugaucgcguggaacagcaacaaccucgacuccaaggucgggggcaacuacaacuaccuguaccgccuguuccgcaagagcaaccucaagcccuucgagcgggacaucuccaccgagaucuaccaggccggcagcacccccugcaacgggguggagggcuucaacugcuacuucccccugcaguccuacggguuccagccgaccaacggcgugggguaccagcccuaccggguggucgugcugagcuucgagcuccugcacgcccccgccacggugugcggccccaagaaguccaccaaccuggucaagaacaagugcgugaacuucaacuucaacggccucaccgggaccggcgugcugaccgagagcaacaagaaguuccugccguuccagcaguucgggcgcgacaucgccgacacgaccgacgcgguccgcgacccccagacccuggagauccucgacaucacccccugcagcuucggcgggguguccgugaucacgccgggcaccaacaccagcaaccaggucgccgugcuguaccaggacgugaacugcaccgagguccccguggccauccacgccgaccagcugacgcccaccuggcggguguacuccaccggcagcaacgucuuccagacccgcgccgggugccucaucggcgcggagcacgugaacaacuccuacgagugcgacauccccaucggggccggcaucugcgccagcuaccagacgcagaccaacuccccgcggcgcgcccggagcguggcgucccagagcaucaucgccuacaccaugucccugggcgccgagaacagcgucgccuacuccaacaacagcaucgccauccccaccaacuucacgaucuccgugaccaccgagauccugcccgugagcaugaccaagacgagcgucgacugcaccauguacaucugcggggacuccaccgagugcagcaaccuccugcugcaguacggcuccuucugcacccagcucaaccgcgcgcugacggggaucgccguggagcaggacaagaacacccaggagguguucgcccaggucaagcagaucuacaagacgcccccgaucaaggacuucggcggguucaacuucagccagauccugcccgaccccuccaagcccagcaagcgguccuucaucgaggaccuccuguucaacaaggugacccuggccgacgccggcuucaucaagcaguacggcgacugccucggggacaucgcggcccgcgaccugaucugcgcccagaaguucaacggccugaccgugcucccgccccugcugaccgacgagaugaucgcccaguacaccagcgcccuccuggcggggaccaucacguccggcuggaccuucgggugcggcgccgcccugcagauccccuucgcgaugcagauggccuaccgguucaacggcaucggggucacccagaacgugcucuacgagaaccagaagcugaucgccaaccaguucaacagcgccaucggcaagauccaggacucccugagcuccaccgccagcgcgcucgggaagcugcaggacguggucaaccagaacgcccaggcccugaacacgcucgugaagcagcuguccagcaacuucggcgccaucuccagcgugcugaacgacauccucucccgccuggacaaggucgaggccgaggugcagaucgaccggcugaucaccgggcgccuccagagccugcagaccuacgugacccagcagcugauccgggcggccgagauccgcgccagcgccaaccucgccgcgaccaagauguccgagugcguccugggccagagcaagcggugcgacuucugcggcaagggguaccaccugauguccuucccccagagcgccccgcacggcguggucuuccuccacgugacguacguccccgcccaggagaagaacuucaccaccgcccccgcgaucugccacgacgggaaggcccacuucccccgcgagggcguguucguguccaacgggacccacugguucgucacgcagcggaacuucuacgagccgcagaucaucaccaccgacaacaccuucgugagcggcaacugcgacguggucaucggcaucgugaacaacacgguguacgacccccugcagcccgagcuggacuccuucaaggaggagcucgacaaguacuucaagaaccacaccagccccgacgucgaccugggggacaucuccggcaucaacgccagcguggugaacauccagaaggagaucgaccgccugaacgaggucgccaagaaccucaacgagucccugaucgaccugcaggagcucgggaaguacgagcaguacaucaagggcgggagcggcuacauccccgaggccccgcgcgacgggcaggccuacgugcggaaggacggcgaguggguccugcucagcaccuuccuguga

SEQ ID NO: 11891 - RNA, 3726 nt, Artificial Sequence
  SARS-CoV-2/Wuhan/WIV05/2019__EPI_ISL_402128 spike protein CDS gc (1-1211)(T874C_S1055C) Foldon construct
auguucguguuccugguccuccugccccuggugagcucccagugcgugaaccucaccacccgcacgcagcugccgcccgccuacaccaacagcuucacccggggcgucuacuaccccgacaagguguuccgcuccagcgugcugcacuccacccaggaccucuuccugcccuucuucagcaacgucacgugguuccacgccauccacguguccgggaccaacggcaccaagcgguucgacaacccggugcugcccuucaacgacggggucuacuucgcgagcaccgagaaguccaacaucauccgcggcuggaucuucgggacgacccucgacagcaagacccagucccugcugaucgugaacaacgccaccaacguggucaucaaggugugcgaguuccaguucugcaacgaccccuuccucggcguguacuaccacaagaacaacaagagcuggauggaguccgaguuccgggucuacagcuccgccaacaacugcacguucgaguacgugagccagcccuuccugauggaccuggagggcaagcaggggaacuucaagaaccuccgcgaguucguguucaagaacaucgacggcuacuucaagaucuacuccaagcacaccccgaucaaccugguccgggaccugccccagggguucagcgcccucgagccccugguggaccugcccaucggcaucaacaucacccgcuuccagacccuccuggcccugcaccgguccuaccucacgccgggggacagcagcuccggcuggaccgcgggcgccgccgccuacuacgugggguaccugcagccccgcaccuuccugcucaaguacaacgagaacggcaccaucacggacgcggucgacugcgcccuggacccccugagcgagaccaagugcacccucaaguccuucaccguggagaaggggaucuaccagacgagcaacuuccgggugcagcccaccgaguccaucguccgcuucccgaacaucaccaaccugugccccuucggcgagguguucaacgccacccgguucgccagcgucuacgccuggaaccgcaagcggaucuccaacugcguggcggacuacagcgugcuguacaacuccgccagcuucuccacguucaagugcuacggcgucagccccaccaagcucaacgaccugugcuucaccaacguguacgccgacuccuucgugauccgcggggacgagguccggcagaucgcccccggccagaccgggaagaucgccgacuacaacuacaagcugccggacgacuucacgggcugcgugaucgcguggaacagcaacaaccucgacuccaaggucgggggcaacuacaacuaccuguaccgccuguuccgcaagagcaaccucaagcccuucgagcgggacaucuccaccgagaucuaccaggccggcagcacccccugcaacgggguggagggcuucaacugcuacuucccccugcaguccuacggguuccagccgaccaacggcgugggguaccagcccuaccggguggucgugcugagcuucgagcuccugcacgcccccgccacggugugcggccccaagaaguccaccaaccuggucaagaacaagugcgugaacuucaacuucaacggccucaccgggaccggcgugcugaccgagagcaacaagaaguuccugccguuccagcaguucgggcgcgacaucgccgacacgaccgacgcgguccgcgacccccagacccuggagauccucgacaucacccccugcagcuucggcgggguguccgugaucacgccgggcaccaacaccagcaaccaggucgccgugcuguaccaggacgugaacugcaccgagguccccguggccauccacgccgaccagcugacgcccaccuggcggguguacuccaccggcagcaacgucuuccagacccgcgccgggugccucaucggcgcggagcacgugaacaacuccuacgagugcgacauccccaucggggccggcaucugcgccagcuaccagacgcagaccaacuccccgcggcgcgcccggagcguggcgucccagagcaucaucgccuacaccaugucccugggcgccgagaacagcgucgccuacuccaacaacagcaucgccauccccaccaacuucacgaucuccgugaccaccgagauccugcccgugagcaugaccaagacgagcgucgacugcaccauguacaucugcggggacuccaccgagugcagcaaccuccugcugcaguacggcuccuucugcacccagcucaaccgcgcgcugacggggaucgccguggagcaggacaagaacacccaggagguguucgcccaggucaagcagaucuacaagacgcccccgaucaaggacuucggcggguucaacuucagccagauccugcccgaccccuccaagcccagcaagcgguccuucaucgaggaccuccuguucaacaaggugacccuggccgacgccggcuucaucaagcaguacggcgacugccucggggacaucgcggcccgcgaccugaucugcgcccagaaguucaacggccugaccgugcucccgccccugcugaccgacgagaugaucgcccaguacugcagcgcccuccuggcggggaccaucacguccggcuggaccuucggggccggcgccgcccugcagauccccuucgcgaugcagauggccuaccgguucaacggcaucggggucacccagaacgugcucuacgagaaccagaagcugaucgccaaccaguucaacagcgccaucggcaagauccaggacucccugagcuccaccgccagcgcgcucgggaagcugcaggacguggucaaccagaacgcccaggcccugaacacgcucgugaagcagcuguccagcaacuucggcgccaucuccagcgugcugaacgacauccucucccgccuggacaaggucgaggccgaggugcagaucgaccggcugaucaccgggcgccuccagagccugcagaccuacgugacccagcagcugauccgggcggccgagauccgcgccagcgccaaccucgccgcgaccaagauguccgagugcguccugggccagagcaagcggguggacuucugcggcaagggguaccaccugauguccuucccccagugcgccccgcacggcguggucuuccuccacgugacguacguccccgcccaggagaagaacuucaccaccgcccccgcgaucugccacgacgggaaggcccacuucccccgcgagggcguguucguguccaacgggacccacugguucgucacgcagcggaacuucuacgagccgcagaucaucaccaccgacaacaccuucgugagcggcaacugcgacguggucaucggcaucgugaacaacacgguguacgacccccugcagcccgagcuggacuccuucaaggaggagcucgacaaguacuucaagaaccacaccagccccgacgucgaccugggggacaucuccggcaucaacgccagcguggugaacauccagaaggagaucgaccgccugaacgaggucgccaagaaccucaacgagucccugaucgaccugcaggagcucgggaaguacgagcaguacaucaagggcgggagcggcuacauccccgaggccccgcgcgacgggcaggccuacgugcggaaggacggcgaguggguccugcucagcaccuuccuguga

SEQ ID NO: 11892 - RNA, 4098 nt, Artificial Sequence
  SARS-CoV-2/Wuhan/WIV05/2019__EPI_ISL_402128 spike protein CDS gc (1-1211) WhcAg construct
auguucguguuccugguccuccugccccuggugagcucccagugcgugaaccucaccacccgcacgcagcugccgcccgccuacaccaacagcuucacccggggcgucuacuaccccgacaagguguuccgcuccagcgugcugcacuccacccaggaccucuuccugcccuucuucagcaacgucacgugguuccacgccauccacguguccgggaccaacggcaccaagcgguucgacaacccggugcugcccuucaacgacggggucuacuucgcgagcaccgagaaguccaacaucauccgcggcuggaucuucgggacgacccucgacagcaagacccagucccugcugaucgugaacaacgccaccaacguggucaucaaggugugcgaguuccaguucugcaacgaccccuuccucggcguguacuaccacaagaacaacaagagcuggauggaguccgaguuccgggucuacagcuccgccaacaacugcacguucgaguacgugagccagcccuuccugauggaccuggagggcaagcaggggaacuucaagaaccuccgcgaguucguguucaagaacaucgacggcuacuucaagaucuacuccaagcacaccccgaucaaccugguccgggaccugccccagggguucagcgcccucgagccccugguggaccugcccaucggcaucaacaucacccgcuuccagacccuccuggcccugcaccgguccuaccucacgccgggggacagcagcuccggcuggaccgcgggcgccgccgccuacuacgugggguaccugcagccccgcaccuuccugcucaaguacaacgagaacggcaccaucacggacgcggucgacugcgcccuggacccccugagcgagaccaagugcacccucaaguccuucaccguggagaaggggaucuaccagacgagcaacuuccgggugcagcccaccgaguccaucguccgcuucccgaacaucaccaaccugugccccuucggcgagguguucaacgccacccgguucgccagcgucuacgccuggaaccgcaagcggaucuccaacugcguggcggacuacagcgugcuguacaacuccgccagcuucuccacguucaagugcuacggcgucagccccaccaagcucaacgaccugugcuucaccaacguguacgccgacuccuucgugauccgcggggacgagguccggcagaucgcccccggccagaccgggaagaucgccgacuacaacuacaagcugccggacgacuucacgggcugcgugaucgcguggaacagcaacaaccucgacuccaaggucgggggcaacuacaacuaccuguaccgccuguuccgcaagagcaaccucaagcccuucgagcgggacaucuccaccgagaucuaccaggccggcagcacccccugcaacgggguggagggcuucaacugcuacuucccccugcaguccuacggguuccagccgaccaacggcgugggguaccagcccuaccggguggucgugcugagcuucgagcuccugcacgcccccgccacggugugcggccccaagaaguccaccaaccuggucaagaacaagugcgugaacuucaacuucaacggccucaccgggaccggcgugcugaccgagagcaacaagaaguuccugccguuccagcaguucgggcgcgacaucgccgacacgaccgacgcgguccgcgacccccagacccuggagauccucgacaucacccccugcagcuucggcgggguguccgugaucacgccgggcaccaacaccagcaaccaggucgccgugcuguaccaggacgugaacugcaccgagguccccguggccauccacgccgaccagcugacgcccaccuggcggguguacuccaccggcagcaacgucuuccagacccgcgccgggugccucaucggcgcggagcacgugaacaacuccuacgagugcgacauccccaucggggccggcaucugcgccagcuaccagacgcagaccaacuccccgcggcgcgcccggagcguggcgucccagagcaucaucgccuacaccaugucccugggcgccgagaacagcgucgccuacuccaacaacagcaucgccauccccaccaacuucacgaucuccgugaccaccgagauccugcccgugagcaugaccaagacgagcgucgacugcaccauguacaucugcggggacuccaccgagugcagcaaccuccugcugcaguacggcuccuucugcacccagcucaaccgcgcgcugacggggaucgccguggagcaggacaagaacacccaggagguguucgcccaggucaagcagaucuacaagacgcccccgaucaaggacuucggcggguucaacuucagccagauccugcccgaccccuccaagcccagcaagcgguccuucaucgaggaccuccuguucaacaaggugacccuggccgacgccggcuucaucaagcaguacggcgacugccucggggacaucgcggcccgcgaccugaucugcgcccagaaguucaacggccugaccgugcucccgccccugcugaccgacgagaugaucgcccaguacaccagcgcccuccuggcggggaccaucacguccggcuggaccuucggggccggcgccgcccugcagauccccuucgcgaugcagauggccuaccgguucaacggcaucggggucacccagaacgugcucuacgagaaccagaagcugaucgccaaccaguucaacagcgccaucggcaagauccaggacucccugagcuccaccgccagcgcgcucgggaagcugcaggacguggucaaccagaacgcccaggcccugaacacgcucgugaagcagcuguccagcaacuucggcgccaucuccagcgugcugaacgacauccucucccgccuggacaaggucgaggccgaggugcagaucgaccggcugaucaccgggcgccuccagagccugcagaccuacgugacccagcagcugauccgggcggccgagauccgcgccagcgccaaccucgccgcgaccaagauguccgagugcguccugggccagagcaagcggguggacuucugcggcaagggguaccaccugauguccuucccccagagcgccccgcacggcguggucuuccuccacgugacguacguccccgcccaggagaagaacuucaccaccgcccccgcgaucugccacgacgggaaggcccacuucccccgcgagggcguguucguguccaacgggacccacugguucgucacgcagcggaacuucuacgagccgcagaucaucaccaccgacaacaccuucgugagcggcaacugcgacguggucaucggcaucgugaacaacacgguguacgacccccugcagcccgagcuggacuccuucaaggaggagcucgacaaguacuucaagaaccacaccagccccgacgucgaccugggggacaucuccggcaucaacgccagcguggugaacauccagaaggagaucgaccgccugaacgaggucgccaagaaccucaacgagucccugaucgaccugcaggagcucgggaaguacgagcaguacaucaagggcgggggcgggagcgacaucgaccccuacaaggaguucggcagcuccuaccagcugcucaacuuccugccccuggacuucuuccccgaccucaacgcccugguggacaccgccaccgcgcuguacgaggaggagcucacggggcgcgagcacugcagcccccaccacaccgccauccggcaggcccuggucugcugggacgagcugaccaagcucaucgccuggauguccagcaacaucaccuccgagcagguccgcacgaucaucgugaaccacgucaacgacaccuggggccugaaggugcggcagagccugugguuccaccucuccugccugaccuucgggcagcacaccgugcaggaguuccuggucagcuucggcguguggauccgcacgcccgccccguaccggccgcccaacgcgccgauccucuccacccugccggagcacaccgugaucugcuga

SEQ ID NO: 11893 - RNA, 4098 nt, Artificial Sequence
  SARS-CoV-2/Wuhan/WIV05/2019__EPI_ISL_402128 spike protein CDS gc (1-1211)(K986P_V987P) WhcAg construct
auguucguguuccugguccuccugccccuggugagcucccagugcgugaaccucaccacccgcacgcagcugccgcccgccuacaccaacagcuucacccggggcgucuacuaccccgacaagguguuccgcuccagcgugcugcacuccacccaggaccucuuccugcccuucuucagcaacgucacgugguuccacgccauccacguguccgggaccaacggcaccaagcgguucgacaacccggugcugcccuucaacgacggggucuacuucgcgagcaccgagaaguccaacaucauccgcggcuggaucuucgggacgacccucgacagcaagacccagucccugcugaucgugaacaacgccaccaacguggucaucaaggugugcgaguuccaguucugcaacgaccccuuccucggcguguacuaccacaagaacaacaagagcuggauggaguccgaguuccgggucuacagcuccgccaacaacugcacguucgaguacgugagccagcccuuccugauggaccuggagggcaagcaggggaacuucaagaaccuccgcgaguucguguucaagaacaucgacggcuacuucaagaucuacuccaagcacaccccgaucaaccugguccgggaccugccccagggguucagcgcccucgagccccugguggaccugcccaucggcaucaacaucacccgcuuccagacccuccuggcccugcaccgguccuaccucacgccgggggacagcagcuccggcuggaccgcgggcgccgccgccuacuacgugggguaccugcagccccgcaccuuccugcucaaguacaacgagaacggcaccaucacggacgcggucgacugcgcccuggacccccugagcgagaccaagugcacccucaaguccuucaccguggagaaggggaucuaccagacgagcaacuuccgggugcagcccaccgaguccaucguccgcuucccgaacaucaccaaccugugccccuucggcgagguguucaacgccacccgguucgccagcgucuacgccuggaaccgcaagcggaucuccaacugcguggcggacuacagcgugcuguacaacuccgccagcuucuccacguucaagugcuacggcgucagccccaccaagcucaacgaccugugcuucaccaacguguacgccgacuccuucgugauccgcggggacgagguccggcagaucgcccccggccagaccgggaagaucgccgacuacaacuacaagcugccggacgacuucacgggcugcgugaucgcguggaacagcaacaaccucgacuccaaggucgggggcaacuacaacuaccuguaccgccuguuccgcaagagcaaccucaagcccuucgagcgggacaucuccaccgagaucuaccaggccggcagcacccccugcaacgggguggagggcuucaacugcuacuucccccugcaguccuacggguuccagccgaccaacggcgugggguaccagcccuaccggguggucgugcugagcuucgagcuccugcacgcccccgccacggugugcggccccaagaaguccaccaaccuggucaagaacaagugcgugaacuucaacuucaacggccucaccgggaccggcgugcugaccgagagcaacaagaaguuccugccguuccagcaguucgggcgcgacaucgccgacacgaccgacgcgguccgcgacccccagacccuggagauccucgacaucacccccugcagcuucggcgggguguccgugaucacgccgggcaccaacaccagcaaccaggucgccgugcuguaccaggacgugaacugcaccgagguccccguggccauccacgccgaccagcugacgcccaccuggcggguguacuccaccggcagcaacgucuuccagacccgcgccgggugccucaucggcgcggagcacgugaacaacuccuacgagugcgacauccccaucggggccggcaucugcgccagcuaccagacgcagaccaacuccccgcggcgcgcccggagcguggcgucccagagcaucaucgccuacaccaugucccugggcgccgagaacagcgucgccuacuccaacaacagcaucgccauccccaccaacuucacgaucuccgugaccaccgagauccugcccgugagcaugaccaagacgagcgucgacugcaccauguacaucugcggggacuccaccgagugcagcaaccuccugcugcaguacggcuccuucugcacccagcucaaccgcgcgcugacggggaucgccguggagcaggacaagaacacccaggagguguucgcccaggucaagcagaucuacaagacgcccccgaucaaggacuucggcggguucaacuucagccagauccugcccgaccccuccaagcccagcaagcgguccuucaucgaggaccuccuguucaacaaggugacccuggccgacgccggcuucaucaagcaguacggcgacugccucggggacaucgcggcccgcgaccugaucugcgcccagaaguucaacggccugaccgugcucccgccccugcugaccgacgagaugaucgcccaguacaccagcgcccuccuggcggggaccaucacguccggcuggaccuucggggccggcgccgcccugcagauccccuucgcgaugcagauggccuaccgguucaacggcaucggggucacccagaacgugcucuacgagaaccagaagcugaucgccaaccaguucaacagcgccaucggcaagauccaggacucccugagcuccaccgccagcgcgcucgggaagcugcaggacguggucaaccagaacgcccaggcccugaacacgcucgugaagcagcuguccagcaacuucggcgccaucuccagcgugcugaacgacauccucucccgccuggacccgcccgaggccgaggugcagaucgaccggcugaucaccgggcgccuccagagccugcagaccuacgugacccagcagcugauccgggcggccgagauccgcgccagcgccaaccucgccgcgaccaagauguccgagugcguccugggccagagcaagcggguggacuucugcggcaagggguaccaccugauguccuucccccagagcgccccgcacggcguggucuuccuccacgugacguacguccccgcccaggagaagaacuucaccaccgcccccgcgaucugccacgacgggaaggcccacuucccccgcgagggcguguucguguccaacgggacccacugguucgucacgcagcggaacuucuacgagccgcagaucaucaccaccgacaacaccuucgugagcggcaacugcgacguggucaucggcaucgugaacaacacgguguacgacccccugcagcccgagcuggacuccuucaaggaggagcucgacaaguacuucaagaaccacaccagccccgacgucgaccugggggacaucuccggcaucaacgccagcguggugaacauccagaaggagaucgaccgccugaacgaggucgccaagaaccucaacgagucccugaucgaccugcaggagcucgggaaguacgagcaguacaucaagggcgggggcgggagcgacaucgaccccuacaaggaguucggcagcuccuaccagcugcucaacuuccugccccuggacuucuuccccgaccucaacgcccugguggacaccgccaccgcgcuguacgaggaggagcucacggggcgcgagcacugcagcccccaccacaccgccauccggcaggcccuggucugcugggacgagcugaccaagcucaucgccuggauguccagcaacaucaccuccgagcagguccgcacgaucaucgugaaccacgucaacgacaccuggggccugaaggugcggcagagccugugguuccaccucuccugccugaccuucgggcagcacaccgugcaggaguuccuggucagcuucggcguguggauccgcacgcccgccccguaccggccgcccaacgcgccgauccucuccacccugccggagcacaccgugaucugcuga

SEQ ID NO: 11894 - RNA, 4098 nt, Artificial Sequence
  SARS-CoV-2/Wuhan/WIV05/2019__EPI_ISL_402128 spike protein CDS gc (1-1211)(K986P_V987P_T887WN_A1020W) WhcAg construct
auguucguguuccugguccuccugccccuggugagcucccagugcgugaaccucaccacccgcacgcagcugccgcccgccuacaccaacagcuucacccggggcgucuacuaccccgacaagguguuccgcuccagcgugcugcacuccacccaggaccucuuccugcccuucuucagcaacgucacgugguuccacgccauccacguguccgggaccaacggcaccaagcgguucgacaacccggugcugcccuucaacgacggggucuacuucgcgagcaccgagaaguccaacaucauccgcggcuggaucuucgggacgacccucgacagcaagacccagucccugcugaucgugaacaacgccaccaacguggucaucaaggugugcgaguuccaguucugcaacgaccccuuccucggcguguacuaccacaagaacaacaagagcuggauggaguccgaguuccgggucuacagcuccgccaacaacugcacguucgaguacgugagccagcccuuccugauggaccuggagggcaagcaggggaacuucaagaaccuccgcgaguucguguucaagaacaucgacggcuacuucaagaucuacuccaagcacaccccgaucaaccugguccgggaccugccccagggguucagcgcccucgagccccugguggaccugcccaucggcaucaacaucacccgcuuccagacccuccuggcccugcaccgguccuaccucacgccgggggacagcagcuccggcuggaccgcgggcgccgccgccuacuacgugggguaccugcagccccgcaccuuccugcucaaguacaacgagaacggcaccaucacggacgcggucgacugcgcccuggacccccugagcgagaccaagugcacccucaaguccuucaccguggagaaggggaucuaccagacgagcaacuuccgggugcagcccaccgaguccaucguccgcuucccgaacaucaccaaccugugccccuucggcgagguguucaacgccacccgguucgccagcgucuacgccuggaaccgcaagcggaucuccaacugcguggcggacuacagcgugcuguacaacuccgccagcuucuccacguucaagugcuacggcgucagccccaccaagcucaacgaccugugcuucaccaacguguacgccgacuccuucgugauccgcggggacgagguccggcagaucgcccccggccagaccgggaagaucgccgacuacaacuacaagcugccggacgacuucacgggcugcgugaucgcguggaacagcaacaaccucgacuccaaggucgggggcaacuacaacuaccuguaccgccuguuccgcaagagcaaccucaagcccuucgagcgggacaucuccaccgagaucuaccaggccggcagcacccccugcaacgggguggagggcuucaacugcuacuucccccugcaguccuacggguuccagccgaccaacggcgugggguaccagcccuaccggguggucgugcugagcuucgagcuccugcacgcccccgccacggugugcggccccaagaaguccaccaaccuggucaagaacaagugcgugaacuucaacuucaacggccucaccgggaccggcgugcugaccgagagcaacaagaaguuccugccguuccagcaguucgggcgcgacaucgccgacacgaccgacgcgguccgcgacccccagacccuggagauccucgacaucacccccugcagcuucggcgggguguccgugaucacgccgggcaccaacaccagcaaccaggucgccgugcuguaccaggacgugaacugcaccgagguccccguggccauccacgccgaccagcugacgcccaccuggcggguguacuccaccggcagcaacgucuuccagacccgcgccgggugccucaucggcgcggagcacgugaacaacuccuacgagugcgacauccccaucggggccggcaucugcgccagcuaccagacgcagaccaacuccccgcggcgcgcccggagcguggcgucccagagcaucaucgccuacaccaugucccugggcgccgagaacagcgucgccuacuccaacaacagcaucgccauccccaccaacuucacgaucuccgugaccaccgagauccugcccgugagcaugaccaagacgagcgucgacugcaccauguacaucugcggggacuccaccgagugcagcaaccuccugcugcaguacggcuccuucugcacccagcucaaccgcgcgcugacggggaucgccguggagcaggacaagaacacccaggagguguucgcccaggucaagcagaucuacaagacgcccccgaucaaggacuucggcggguucaacuucagccagauccugcccgaccccuccaagcccagcaagcgguccuucaucgaggaccuccuguucaacaaggugacccuggccgacgccggcuucaucaagcaguacggcgacugccucggggacaucgcggcccgcgaccugaucugcgcccagaaguucaacggccugaccgugcucccgccccugcugaccgacgagaugaucgcccaguacaccagcgcccuccuggcggggaccaucacguccggcuggugguucggggccggcgccgcccugcagauccccuucgcgaugcagauggccuaccgguucaacggcaucggggucacccagaacgugcucuacgagaaccagaagcugaucgccaaccaguucaacagcgccaucggcaagauccaggacucccugagcuccaccgccagcgcgcucgggaagcugcaggacguggucaaccagaacgcccaggcccugaacacgcucgugaagcagcuguccagcaacuucggcgccaucuccagcgugcugaacgacauccucucccgccuggacccgcccgaggccgaggugcagaucgaccggcugaucaccgggcgccuccagagccugcagaccuacgugacccagcagcugauccgggcggccgagauccgcuggagcgccaaccucgccgcgaccaagauguccgagugcguccugggccagagcaagcggguggacuucugcggcaagggguaccaccugauguccuucccccagagcgccccgcacggcguggucuuccuccacgugacguacguccccgcccaggagaagaacuucaccaccgcccccgcgaucugccacgacgggaaggcccacuucccccgcgagggcguguucguguccaacgggacccacugguucgucacgcagcggaacuucuacgagccgcagaucaucaccaccgacaacaccuucgugagcggcaacugcgacguggucaucggcaucgugaacaacacgguguacgacccccugcagcccgagcuggacuccuucaaggaggagcucgacaaguacuucaagaaccacaccagccccgacgucgaccugggggacaucuccggcaucaacgccagcguggugaacauccagaaggagaucgaccgccugaacgaggucgccaagaaccucaacgagucccugaucgaccugcaggagcucgggaaguacgagcaguacaucaagggcgggggcgggagcgacaucgaccccuacaaggaguucggcagcuccuaccagcugcucaacuuccugccccuggacuucuuccccgaccucaacgcccugguggacaccgccaccgcgcuguacgaggaggagcucacggggcgcgagcacugcagcccccaccacaccgccauccggcaggcccuggucugcugggacgagcugaccaagcucaucgccuggauguccagcaacaucaccuccgagcagguccgcacgaucaucgugaaccacgucaacgacaccuggggccugaaggugcggcagagccugugguuccaccucuccugccugaccuucgggcagcacaccgugcaggaguuccuggucagcuucggcguguggauccgcacgcccgccccguaccggccgcccaacgcgccgauccucuccacccugccggagcacaccgugaucugcuga

SEQ ID NO: 11895 - RNA, 4098 nt, Artificial Sequence
  SARS-CoV-2/Wuhan/WIV05/2019__EPI_ISL_402128 spike protein CDS gc (1-1211)(K986P_V987P_P1069F) WhcAg construct
auguucguguuccugguccuccugccccuggugagcucccagugcgugaaccucaccacccgcacgcagcugccgcccgccuacaccaacagcuucacccggggcgucuacuaccccgacaagguguuccgcuccagcgugcugcacuccacccaggaccucuuccugcccuucuucagcaacgucacgugguuccacgccauccacguguccgggaccaacggcaccaagcgguucgacaacccggugcugcccuucaacgacggggucuacuucgcgagcaccgagaaguccaacaucauccgcggcuggaucuucgggacgacccucgacagcaagacccagucccugcugaucgugaacaacgccaccaacguggucaucaaggugugcgaguuccaguucugcaacgaccccuuccucggcguguacuaccacaagaacaacaagagcuggauggaguccgaguuccgggucuacagcuccgccaacaacugcacguucgaguacgugagccagcccuuccugauggaccuggagggcaagcaggggaacuucaagaaccuccgcgaguucguguucaagaacaucgacggcuacuucaagaucuacuccaagcacaccccgaucaaccugguccgggaccugccccagggguucagcgcccucgagccccugguggaccugcccaucggcaucaacaucacccgcuuccagacccuccuggcccugcaccgguccuaccucacgccgggggacagcagcuccggcuggaccgcgggcgccgccgccuacuacgugggguaccugcagccccgcaccuuccugcucaaguacaacgagaacggcaccaucacggacgcggucgacugcgcccuggacccccugagcgagaccaagugcacccucaaguccuucaccguggagaaggggaucuaccagacgagcaacuuccgggugcagcccaccgaguccaucguccgcuucccgaacaucaccaaccugugccccuucggcgagguguucaacgccacccgguucgccagcgucuacgccuggaaccgcaagcggaucuccaacugcguggcggacuacagcgugcuguacaacuccgccagcuucuccacguucaagugcuacggcgucagccccaccaagcucaacgaccugugcuucaccaacguguacgccgacuccuucgugauccgcggggacgagguccggcagaucgcccccggccagaccgggaagaucgccgacuacaacuacaagcugccggacgacuucacgggcugcgugaucgcguggaacagcaacaaccucgacuccaaggucgggggcaacuacaacuaccuguaccgccuguuccgcaagagcaaccucaagcccuucgagcgggacaucuccaccgagaucuaccaggccggcagcacccccugcaacgggguggagggcuucaacugcuacuucccccugcaguccuacggguuccagccgaccaacggcgugggguaccagcccuaccggguggucgugcugagcuucgagcuccugcacgcccccgccacggugugcggccccaagaaguccaccaaccuggucaagaacaagugcgugaacuucaacuucaacggccucaccgggaccggcgugcugaccgagagcaacaagaaguuccugccguuccagcaguucgggcgcgacaucgccgacacgaccgacgcgguccgcgacccccagacccuggagauccucgacaucacccccugcagcuucggcgggguguccgugaucacgccgggcaccaacaccagcaaccaggucgccgugcuguaccaggacgugaacugcaccgagguccccguggccauccacgccgaccagcugacgcccaccuggcggguguacuccaccggcagcaacgucuuccagacccgcgccgggugccucaucggcgcggagcacgugaacaacuccuacgagugcgacauccccaucggggccggcaucugcgccagcuaccagacgcagaccaacuccccgcggcgcgcccggagcguggcgucccagagcaucaucgccuacaccaugucccugggcgccgagaacagcgucgccuacuccaacaacagcaucgccauccccaccaacuucacgaucuccgugaccaccgagauccugcccgugagcaugaccaagacgagcgucgacugcaccauguacaucugcggggacuccaccgagugcagcaaccuccugcugcaguacggcuccuucugcacccagcucaaccgcgcgcugacggggaucgccguggagcaggacaagaacacccaggagguguucgcccaggucaagcagaucuacaagacgcccccgaucaaggacuucggcggguucaacuucagccagauccugcccgaccccuccaagcccagcaagcgguccuucaucgaggaccuccuguucaacaaggugacccuggccgacgccggcuucaucaagcaguacggcgacugccucggggacaucgcggcccgcgaccugaucugcgcccagaaguucaacggccugaccgugcucccgccccugcugaccgacgagaugaucgcccaguacaccagcgcccuccuggcggggaccaucacguccggcuggaccuucggggccggcgccgcccugcagauccccuucgcgaugcagauggccuaccgguucaacggcaucggggucacccagaacgugcucuacgagaaccagaagcugaucgccaaccaguucaacagcgccaucggcaagauccaggacucccugagcuccaccgccagcgcgcucgggaagcugcaggacguggucaaccagaacgcccaggcccugaacacgcucgugaagcagcuguccagcaacuucggcgccaucuccagcgugcugaacgacauccucucccgccuggacccgcccgaggccgaggugcagaucgaccggcugaucaccgggcgccuccagagccugcagaccuacgugacccagcagcugauccgggcggccgagauccgcgccagcgccaaccucgccgcgaccaagauguccgagugcguccugggccagagcaagcggguggacuucugcggcaagggguaccaccugauguccuucccccagagcgccccgcacggcguggucuuccuccacgugacguacgucuucgcccaggagaagaacuucaccaccgcccccgcgaucugccacgacgggaaggcccacuucccccgcgagggcguguucguguccaacgggacccacugguucgucacgcagcggaacuucuacgagccgcagaucaucaccaccgacaacaccuucgugagcggcaacugcgacguggucaucggcaucgugaacaacacgguguacgacccccugcagcccgagcuggacuccuucaaggaggagcucgacaaguacuucaagaaccacaccagccccgacgucgaccugggggacaucuccggcaucaacgccagcguggugaacauccagaaggagaucgaccgccugaacgaggucgccaagaaccucaacgagucccugaucgaccugcaggagcucgggaaguacgagcaguacaucaagggcgggggcgggagcgacaucgaccccuacaaggaguucggcagcuccuaccagcugcucaacuuccugccccuggacuucuuccccgaccucaacgcccugguggacaccgccaccgcgcuguacgaggaggagcucacggggcgcgagcacugcagcccccaccacaccgccauccggcaggcccuggucugcugggacgagcugaccaagcucaucgccuggauguccagcaacaucaccuccgagcagguccgcacgaucaucgugaaccacgucaacgacaccuggggccugaaggugcggcagagccugugguuccaccucuccugccugaccuucgggcagcacaccgugcaggaguuccuggucagcuucggcguguggauccgcacgcccgccccguaccggccgcccaacgcgccgauccucuccacccugccggagcacaccgugaucugcuga

SEQ ID NO: 11896 - RNA, 4098 nt, Artificial Sequence
  SARS-CoV-2/Wuhan/WIV05/2019__EPI_ISL_402128 spike protein CDS gc (1-1211)(K986P_V987P_ H1048Q_H1064N_ H1083N_H1101N) WhcAg construct
auguucguguuccugguccuccugccccuggugagcucccagugcgugaaccucaccacccgcacgcagcugccgcccgccuacaccaacagcuucacccggggcgucuacuaccccgacaagguguuccgcuccagcgugcugcacuccacccaggaccucuuccugcccuucuucagcaacgucacgugguuccacgccauccacguguccgggaccaacggcaccaagcgguucgacaacccggugcugcccuucaacgacggggucuacuucgcgagcaccgagaaguccaacaucauccgcggcuggaucuucgggacgacccucgacagcaagacccagucccugcugaucgugaacaacgccaccaacguggucaucaaggugugcgaguuccaguucugcaacgaccccuuccucggcguguacuaccacaagaacaacaagagcuggauggaguccgaguuccgggucuacagcuccgccaacaacugcacguucgaguacgugagccagcccuuccugauggaccuggagggcaagcaggggaacuucaagaaccuccgcgaguucguguucaagaacaucgacggcuacuucaagaucuacuccaagcacaccccgaucaaccugguccgggaccugccccagggguucagcgcccucgagccccugguggaccugcccaucggcaucaacaucacccgcuuccagacccuccuggcccugcaccgguccuaccucacgccgggggacagcagcuccggcuggaccgcgggcgccgccgccuacuacgugggguaccugcagccccgcaccuuccugcucaaguacaacgagaacggcaccaucacggacgcggucgacugcgcccuggacccccugagcgagaccaagugcacccucaaguccuucaccguggagaaggggaucuaccagacgagcaacuuccgggugcagcccaccgaguccaucguccgcuucccgaacaucaccaaccugugccccuucggcgagguguucaacgccacccgguucgccagcgucuacgccuggaaccgcaagcggaucuccaacugcguggcggacuacagcgugcuguacaacuccgccagcuucuccacguucaagugcuacggcgucagccccaccaagcucaacgaccugugcuucaccaacguguacgccgacuccuucgugauccgcggggacgagguccggcagaucgcccccggccagaccgggaagaucgccgacuacaacuacaagcugccggacgacuucacgggcugcgugaucgcguggaacagcaacaaccucgacuccaaggucgggggcaacuacaacuaccuguaccgccuguuccgcaagagcaaccucaagcccuucgagcgggacaucuccaccgagaucuaccaggccggcagcacccccugcaacgggguggagggcuucaacugcuacuucccccugcaguccuacggguuccagccgaccaacggcgugggguaccagcccuaccggguggucgugcugagcuucgagcuccugcacgcccccgccacggugugcggccccaagaaguccaccaaccuggucaagaacaagugcgugaacuucaacuucaacggccucaccgggaccggcgugcugaccgagagcaacaagaaguuccugccguuccagcaguucgggcgcgacaucgccgacacgaccgacgcgguccgcgacccccagacccuggagauccucgacaucacccccugcagcuucggcgggguguccgugaucacgccgggcaccaacaccagcaaccaggucgccgugcuguaccaggacgugaacugcaccgagguccccguggccauccacgccgaccagcugacgcccaccuggcggguguacuccaccggcagcaacgucuuccagacccgcgccgggugccucaucggcgcggagcacgugaacaacuccuacgagugcgacauccccaucggggccggcaucugcgccagcuaccagacgcagaccaacuccccgcggcgcgcccggagcguggcgucccagagcaucaucgccuacaccaugucccugggcgccgagaacagcgucgccuacuccaacaacagcaucgccauccccaccaacuucacgaucuccgugaccaccgagauccugcccgugagcaugaccaagacgagcgucgacugcaccauguacaucugcggggacuccaccgagugcagcaaccuccugcugcaguacggcuccuucugcacccagcucaaccgcgcgcugacggggaucgccguggagcaggacaagaacacccaggagguguucgcccaggucaagcagaucuacaagacgcccccgaucaaggacuucggcggguucaacuucagccagauccugcccgaccccuccaagcccagcaagcgguccuucaucgaggaccuccuguucaacaaggugacccuggccgacgccggcuucaucaagcaguacggcgacugccucggggacaucgcggcccgcgaccugaucugcgcccagaaguucaacggccugaccgugcucccgccccugcugaccgacgagaugaucgcccaguacaccagcgcccuccuggcggggaccaucacguccggcuggaccuucggggccggcgccgcccugcagauccccuucgcgaugcagauggccuaccgguucaacggcaucggggucacccagaacgugcucuacgagaaccagaagcugaucgccaaccaguucaacagcgccaucggcaagauccaggacucccugagcuccaccgccagcgcgcucgggaagcugcaggacguggucaaccagaacgcccaggcccugaacacgcucgugaagcagcuguccagcaacuucggcgccaucuccagcgugcugaacgacauccucucccgccuggacccgcccgaggccgaggugcagaucgaccggcugaucaccgggcgccuccagagccugcagaccuacgugacccagcagcugauccgggcggccgagauccgcgccagcgccaaccucgccgcgaccaagauguccgagugcguccugggccagagcaagcggguggacuucugcggcaagggguaccagcugauguccuucccccagagcgccccgcacggcguggucuuccucaacgugacguacguccccgcccaggagaagaacuucaccaccgcccccgcgaucugcaacgacgggaaggcccacuucccccgcgagggcguguucguguccaacgggaccaacugguucgucacgcagcggaacuucuacgagccgcagaucaucaccaccgacaacaccuucgugagcggcaacugcgacguggucaucggcaucgugaacaacacgguguacgacccccugcagcccgagcuggacuccuucaaggaggagcucgacaaguacuucaagaaccacaccagccccgacgucgaccugggggacaucuccggcaucaacgccagcguggugaacauccagaaggagaucgaccgccugaacgaggucgccaagaaccucaacgagucccugaucgaccugcaggagcucgggaaguacgagcaguacaucaagggcgggggcgggagcgacaucgaccccuacaaggaguucggcagcuccuaccagcugcucaacuuccugccccuggacuucuuccccgaccucaacgcccugguggacaccgccaccgcgcuguacgaggaggagcucacggggcgcgagcacugcagcccccaccacaccgccauccggcaggcccuggucugcugggacgagcugaccaagcucaucgccuggauguccagcaacaucaccuccgagcagguccgcacgaucaucgugaaccacgucaacgacaccuggggccugaaggugcggcagagccugugguuccaccucuccugccugaccuucgggcagcacaccgugcaggaguuccuggucagcuucggcguguggauccgcacgcccgccccguaccggccgcccaacgcgccgauccucuccacccugccggagcacaccgugaucugcuga

SEQ ID NO: 11897 - RNA, 4098 nt, Artificial Sequence
  SARS-CoV-2/Wuhan/WIV05/2019__EPI_ISL_402128 spike protein CDS gc (1-1211)(I712C_T1077C) WhcAg construct
auguucguguuccugguccuccugccccuggugagcucccagugcgugaaccucaccacccgcacgcagcugccgcccgccuacaccaacagcuucacccggggcgucuacuaccccgacaagguguuccgcuccagcgugcugcacuccacccaggaccucuuccugcccuucuucagcaacgucacgugguuccacgccauccacguguccgggaccaacggcaccaagcgguucgacaacccggugcugcccuucaacgacggggucuacuucgcgagcaccgagaaguccaacaucauccgcggcuggaucuucgggacgacccucgacagcaagacccagucccugcugaucgugaacaacgccaccaacguggucaucaaggugugcgaguuccaguucugcaacgaccccuuccucggcguguacuaccacaagaacaacaagagcuggauggaguccgaguuccgggucuacagcuccgccaacaacugcacguucgaguacgugagccagcccuuccugauggaccuggagggcaagcaggggaacuucaagaaccuccgcgaguucguguucaagaacaucgacggcuacuucaagaucuacuccaagcacaccccgaucaaccugguccgggaccugccccagggguucagcgcccucgagccccugguggaccugcccaucggcaucaacaucacccgcuuccagacccuccuggcccugcaccgguccuaccucacgccgggggacagcagcuccggcuggaccgcgggcgccgccgccuacuacgugggguaccugcagccccgcaccuuccugcucaaguacaacgagaacggcaccaucacggacgcggucgacugcgcccuggacccccugagcgagaccaagugcacccucaaguccuucaccguggagaaggggaucuaccagacgagcaacuuccgggugcagcccaccgaguccaucguccgcuucccgaacaucaccaaccugugccccuucggcgagguguucaacgccacccgguucgccagcgucuacgccuggaaccgcaagcggaucuccaacugcguggcggacuacagcgugcuguacaacuccgccagcuucuccacguucaagugcuacggcgucagccccaccaagcucaacgaccugugcuucaccaacguguacgccgacuccuucgugauccgcggggacgagguccggcagaucgcccccggccagaccgggaagaucgccgacuacaacuacaagcugccggacgacuucacgggcugcgugaucgcguggaacagcaacaaccucgacuccaaggucgggggcaacuacaacuaccuguaccgccuguuccgcaagagcaaccucaagcccuucgagcgggacaucuccaccgagaucuaccaggccggcagcacccccugcaacgggguggagggcuucaacugcuacuucccccugcaguccuacggguuccagccgaccaacggcgugggguaccagcccuaccggguggucgugcugagcuucgagcuccugcacgcccccgccacggugugcggccccaagaaguccaccaaccuggucaagaacaagugcgugaacuucaacuucaacggccucaccgggaccggcgugcugaccgagagcaacaagaaguuccugccguuccagcaguucgggcgcgacaucgccgacacgaccgacgcgguccgcgacccccagacccuggagauccucgacaucacccccugcagcuucggcgggguguccgugaucacgccgggcaccaacaccagcaaccaggucgccgugcuguaccaggacgugaacugcaccgagguccccguggccauccacgccgaccagcugacgcccaccuggcggguguacuccaccggcagcaacgucuuccagacccgcgccgggugccucaucggcgcggagcacgugaacaacuccuacgagugcgacauccccaucggggccggcaucugcgccagcuaccagacgcagaccaacuccccgcggcgcgcccggagcguggcgucccagagcaucaucgccuacaccaugucccugggcgccgagaacagcgucgccuacuccaacaacagcugcgccauccccaccaacuucacgaucuccgugaccaccgagauccugcccgugagcaugaccaagacgagcgucgacugcaccauguacaucugcggggacuccaccgagugcagcaaccuccugcugcaguacggcuccuucugcacccagcucaaccgcgcgcugacggggaucgccguggagcaggacaagaacacccaggagguguucgcccaggucaagcagaucuacaagacgcccccgaucaaggacuucggcggguucaacuucagccagauccugcccgaccccuccaagcccagcaagcgguccuucaucgaggaccuccuguucaacaaggugacccuggccgacgccggcuucaucaagcaguacggcgacugccucggggacaucgcggcccgcgaccugaucugcgcccagaaguucaacggccugaccgugcucccgccccugcugaccgacgagaugaucgcccaguacaccagcgcccuccuggcggggaccaucacguccggcuggaccuucggggccggcgccgcccugcagauccccuucgcgaugcagauggccuaccgguucaacggcaucggggucacccagaacgugcucuacgagaaccagaagcugaucgccaaccaguucaacagcgccaucggcaagauccaggacucccugagcuccaccgccagcgcgcucgggaagcugcaggacguggucaaccagaacgcccaggcccugaacacgcucgugaagcagcuguccagcaacuucggcgccaucuccagcgugcugaacgacauccucucccgccuggacaaggucgaggccgaggugcagaucgaccggcugaucaccgggcgccuccagagccugcagaccuacgugacccagcagcugauccgggcggccgagauccgcgccagcgccaaccucgccgcgaccaagauguccgagugcguccugggccagagcaagcggguggacuucugcggcaagggguaccaccugauguccuucccccagagcgccccgcacggcguggucuuccuccacgugacguacguccccgcccaggagaagaacuucaccugcgcccccgcgaucugccacgacgggaaggcccacuucccccgcgagggcguguucguguccaacgggacccacugguucgucacgcagcggaacuucuacgagccgcagaucaucaccaccgacaacaccuucgugagcggcaacugcgacguggucaucggcaucgugaacaacacgguguacgacccccugcagcccgagcuggacuccuucaaggaggagcucgacaaguacuucaagaaccacaccagccccgacgucgaccugggggacaucuccggcaucaacgccagcguggugaacauccagaaggagaucgaccgccugaacgaggucgccaagaaccucaacgagucccugaucgaccugcaggagcucgggaaguacgagcaguacaucaagggcgggggcgggagcgacaucgaccccuacaaggaguucggcagcuccuaccagcugcucaacuuccugccccuggacuucuuccccgaccucaacgcccugguggacaccgccaccgcgcuguacgaggaggagcucacggggcgcgagcacugcagcccccaccacaccgccauccggcaggcccuggucugcugggacgagcugaccaagcucaucgccuggauguccagcaacaucaccuccgagcagguccgcacgaucaucgugaaccacgucaacgacaccuggggccugaaggugcggcagagccugugguuccaccucuccugccugaccuucgggcagcacaccgugcaggaguuccuggucagcuucggcguguggauccgcacgcccgccccguaccggccgcccaacgcgccgauccucuccacccugccggagcacaccgugaucugcuga

SEQ ID NO: 11898 - RNA, 4098 nt, Artificial Sequence
  SARS-CoV-2/Wuhan/WIV05/2019__EPI_ISL_402128 spike protein CDS gc (1-1211)(I714C_Y1110C) WhcAg construct
auguucguguuccugguccuccugccccuggugagcucccagugcgugaaccucaccacccgcacgcagcugccgcccgccuacaccaacagcuucacccggggcgucuacuaccccgacaagguguuccgcuccagcgugcugcacuccacccaggaccucuuccugcccuucuucagcaacgucacgugguuccacgccauccacguguccgggaccaacggcaccaagcgguucgacaacccggugcugcccuucaacgacggggucuacuucgcgagcaccgagaaguccaacaucauccgcggcuggaucuucgggacgacccucgacagcaagacccagucccugcugaucgugaacaacgccaccaacguggucaucaaggugugcgaguuccaguucugcaacgaccccuuccucggcguguacuaccacaagaacaacaagagcuggauggaguccgaguuccgggucuacagcuccgccaacaacugcacguucgaguacgugagccagcccuuccugauggaccuggagggcaagcaggggaacuucaagaaccuccgcgaguucguguucaagaacaucgacggcuacuucaagaucuacuccaagcacaccccgaucaaccugguccgggaccugccccagggguucagcgcccucgagccccugguggaccugcccaucggcaucaacaucacccgcuuccagacccuccuggcccugcaccgguccuaccucacgccgggggacagcagcuccggcuggaccgcgggcgccgccgccuacuacgugggguaccugcagccccgcaccuuccugcucaaguacaacgagaacggcaccaucacggacgcggucgacugcgcccuggacccccugagcgagaccaagugcacccucaaguccuucaccguggagaaggggaucuaccagacgagcaacuuccgggugcagcccaccgaguccaucguccgcuucccgaacaucaccaaccugugccccuucggcgagguguucaacgccacccgguucgccagcgucuacgccuggaaccgcaagcggaucuccaacugcguggcggacuacagcgugcuguacaacuccgccagcuucuccacguucaagugcuacggcgucagccccaccaagcucaacgaccugugcuucaccaacguguacgccgacuccuucgugauccgcggggacgagguccggcagaucgcccccggccagaccgggaagaucgccgacuacaacuacaagcugccggacgacuucacgggcugcgugaucgcguggaacagcaacaaccucgacuccaaggucgggggcaacuacaacuaccuguaccgccuguuccgcaagagcaaccucaagcccuucgagcgggacaucuccaccgagaucuaccaggccggcagcacccccugcaacgggguggagggcuucaacugcuacuucccccugcaguccuacggguuccagccgaccaacggcgugggguaccagcccuaccggguggucgugcugagcuucgagcuccugcacgcccccgccacggugugcggccccaagaaguccaccaaccuggucaagaacaagugcgugaacuucaacuucaacggccucaccgggaccggcgugcugaccgagagcaacaagaaguuccugccguuccagcaguucgggcgcgacaucgccgacacgaccgacgcgguccgcgacccccagacccuggagauccucgacaucacccccugcagcuucggcgggguguccgugaucacgccgggcaccaacaccagcaaccaggucgccgugcuguaccaggacgugaacugcaccgagguccccguggccauccacgccgaccagcugacgcccaccuggcggguguacuccaccggcagcaacgucuuccagacccgcgccgggugccucaucggcgcggagcacgugaacaacuccuacgagugcgacauccccaucggggccggcaucugcgccagcuaccagacgcagaccaacuccccgcggcgcgcccggagcguggcgucccagagcaucaucgccuacaccaugucccugggcgccgagaacagcgucgccuacuccaacaacagcaucgccugccccaccaacuucacgaucuccgugaccaccgagauccugcccgugagcaugaccaagacgagcgucgacugcaccauguacaucugcggggacuccaccgagugcagcaaccuccugcugcaguacggcuccuucugcacccagcucaaccgcgcgcugacggggaucgccguggagcaggacaagaacacccaggagguguucgcccaggucaagcagaucuacaagacgcccccgaucaaggacuucggcggguucaacuucagccagauccugcccgaccccuccaagcccagcaagcgguccuucaucgaggaccuccuguucaacaaggugacccuggccgacgccggcuucaucaagcaguacggcgacugccucggggacaucgcggcccgcgaccugaucugcgcccagaaguucaacggccugaccgugcucccgccccugcugaccgacgagaugaucgcccaguacaccagcgcccuccuggcggggaccaucacguccggcuggaccuucggggccggcgccgcccugcagauccccuucgcgaugcagauggccuaccgguucaacggcaucggggucacccagaacgugcucuacgagaaccagaagcugaucgccaaccaguucaacagcgccaucggcaagauccaggacucccugagcuccaccgccagcgcgcucgggaagcugcaggacguggucaaccagaacgcccaggcccugaacacgcucgugaagcagcuguccagcaacuucggcgccaucuccagcgugcugaacgacauccucucccgccuggacaaggucgaggccgaggugcagaucgaccggcugaucaccgggcgccuccagagccugcagaccuacgugacccagcagcugauccgggcggccgagauccgcgccagcgccaaccucgccgcgaccaagauguccgagugcguccugggccagagcaagcggguggacuucugcggcaagggguaccaccugauguccuucccccagagcgccccgcacggcguggucuuccuccacgugacguacguccccgcccaggagaagaacuucaccaccgcccccgcgaucugccacgacgggaaggcccacuucccccgcgagggcguguucguguccaacgggacccacugguucgucacgcagcggaacuucugcgagccgcagaucaucaccaccgacaacaccuucgugagcggcaacugcgacguggucaucggcaucgugaacaacacgguguacgacccccugcagcccgagcuggacuccuucaaggaggagcucgacaaguacuucaagaaccacaccagccccgacgucgaccugggggacaucuccggcaucaacgccagcguggugaacauccagaaggagaucgaccgccugaacgaggucgccaagaaccucaacgagucccugaucgaccugcaggagcucgggaaguacgagcaguacaucaagggcgggggcgggagcgacaucgaccccuacaaggaguucggcagcuccuaccagcugcucaacuuccugccccuggacuucuuccccgaccucaacgcccugguggacaccgccaccgcgcuguacgaggaggagcucacggggcgcgagcacugcagcccccaccacaccgccauccggcaggcccuggucugcugggacgagcugaccaagcucaucgccuggauguccagcaacaucaccuccgagcagguccgcacgaucaucgugaaccacgucaacgacaccuggggccugaaggugcggcagagccugugguuccaccucuccugccugaccuucgggcagcacaccgugcaggaguuccuggucagcuucggcguguggauccgcacgcccgccccguaccggccgcccaacgcgccgauccucuccacccugccggagcacaccgugaucugcuga

SEQ ID NO: 11899 - RNA, 4098 nt, Artificial Sequence
  SARS-CoV-2/Wuhan/WIV05/2019__EPI_ISL_402128 spike protein CDS gc (1-1211)(P715C_P1069C) WhcAg construct
auguucguguuccugguccuccugccccuggugagcucccagugcgugaaccucaccacccgcacgcagcugccgcccgccuacaccaacagcuucacccggggcgucuacuaccccgacaagguguuccgcuccagcgugcugcacuccacccaggaccucuuccugcccuucuucagcaacgucacgugguuccacgccauccacguguccgggaccaacggcaccaagcgguucgacaacccggugcugcccuucaacgacggggucuacuucgcgagcaccgagaaguccaacaucauccgcggcuggaucuucgggacgacccucgacagcaagacccagucccugcugaucgugaacaacgccaccaacguggucaucaaggugugcgaguuccaguucugcaacgaccccuuccucggcguguacuaccacaagaacaacaagagcuggauggaguccgaguuccgggucuacagcuccgccaacaacugcacguucgaguacgugagccagcccuuccugauggaccuggagggcaagcaggggaacuucaagaaccuccgcgaguucguguucaagaacaucgacggcuacuucaagaucuacuccaagcacaccccgaucaaccugguccgggaccugccccagggguucagcgcccucgagccccugguggaccugcccaucggcaucaacaucacccgcuuccagacccuccuggcccugcaccgguccuaccucacgccgggggacagcagcuccggcuggaccgcgggcgccgccgccuacuacgugggguaccugcagccccgcaccuuccugcucaaguacaacgagaacggcaccaucacggacgcggucgacugcgcccuggacccccugagcgagaccaagugcacccucaaguccuucaccguggagaaggggaucuaccagacgagcaacuuccgggugcagcccaccgaguccaucguccgcuucccgaacaucaccaaccugugccccuucggcgagguguucaacgccacccgguucgccagcgucuacgccuggaaccgcaagcggaucuccaacugcguggcggacuacagcgugcuguacaacuccgccagcuucuccacguucaagugcuacggcgucagccccaccaagcucaacgaccugugcuucaccaacguguacgccgacuccuucgugauccgcggggacgagguccggcagaucgcccccggccagaccgggaagaucgccgacuacaacuacaagcugccggacgacuucacgggcugcgugaucgcguggaacagcaacaaccucgacuccaaggucgggggcaacuacaacuaccuguaccgccuguuccgcaagagcaaccucaagcccuucgagcgggacaucuccaccgagaucuaccaggccggcagcacccccugcaacgggguggagggcuucaacugcuacuucccccugcaguccuacggguuccagccgaccaacggcgugggguaccagcccuaccggguggucgugcugagcuucgagcuccugcacgcccccgccacggugugcggccccaagaaguccaccaaccuggucaagaacaagugcgugaacuucaacuucaacggccucaccgggaccggcgugcugaccgagagcaacaagaaguuccugccguuccagcaguucgggcgcgacaucgccgacacgaccgacgcgguccgcgacccccagacccuggagauccucgacaucacccccugcagcuucggcgggguguccgugaucacgccgggcaccaacaccagcaaccaggucgccgugcuguaccaggacgugaacugcaccgagguccccguggccauccacgccgaccagcugacgcccaccuggcggguguacuccaccggcagcaacgucuuccagacccgcgccgggugccucaucggcgcggagcacgugaacaacuccuacgagugcgacauccccaucggggccggcaucugcgccagcuaccagacgcagaccaacuccccgcggcgcgcccggagcguggcgucccagagcaucaucgccuacaccaugucccugggcgccgagaacagcgucgccuacuccaacaacagcaucgccaucugcaccaacuucacgaucuccgugaccaccgagauccugcccgugagcaugaccaagacgagcgucgacugcaccauguacaucugcggggacuccaccgagugcagcaaccuccugcugcaguacggcuccuucugcacccagcucaaccgcgcgcugacggggaucgccguggagcaggacaagaacacccaggagguguucgcccaggucaagcagaucuacaagacgcccccgaucaaggacuucggcggguucaacuucagccagauccugcccgaccccuccaagcccagcaagcgguccuucaucgaggaccuccuguucaacaaggugacccuggccgacgccggcuucaucaagcaguacggcgacugccucggggacaucgcggcccgcgaccugaucugcgcccagaaguucaacggccugaccgugcucccgccccugcugaccgacgagaugaucgcccaguacaccagcgcccuccuggcggggaccaucacguccggcuggaccuucggggccggcgccgcccugcagauccccuucgcgaugcagauggccuaccgguucaacggcaucggggucacccagaacgugcucuacgagaaccagaagcugaucgccaaccaguucaacagcgccaucggcaagauccaggacucccugagcuccaccgccagcgcgcucgggaagcugcaggacguggucaaccagaacgcccaggcccugaacacgcucgugaagcagcuguccagcaacuucggcgccaucuccagcgugcugaacgacauccucucccgccuggacaaggucgaggccgaggugcagaucgaccggcugaucaccgggcgccuccagagccugcagaccuacgugacccagcagcugauccgggcggccgagauccgcgccagcgccaaccucgccgcgaccaagauguccgagugcguccugggccagagcaagcggguggacuucugcggcaagggguaccaccugauguccuucccccagagcgccccgcacggcguggucuuccuccacgugacguacgucugcgcccaggagaagaacuucaccaccgcccccgcgaucugccacgacgggaaggcccacuucccccgcgagggcguguucguguccaacgggacccacugguucgucacgcagcggaacuucuacgagccgcagaucaucaccaccgacaacaccuucgugagcggcaacugcgacguggucaucggcaucgugaacaacacgguguacgacccccugcagcccgagcuggacuccuucaaggaggagcucgacaaguacuucaagaaccacaccagccccgacgucgaccugggggacaucuccggcaucaacgccagcguggugaacauccagaaggagaucgaccgccugaacgaggucgccaagaaccucaacgagucccugaucgaccugcaggagcucgggaaguacgagcaguacaucaagggcgggggcgggagcgacaucgaccccuacaaggaguucggcagcuccuaccagcugcucaacuuccugccccuggacuucuuccccgaccucaacgcccugguggacaccgccaccgcgcuguacgaggaggagcucacggggcgcgagcacugcagcccccaccacaccgccauccggcaggcccuggucugcugggacgagcugaccaagcucaucgccuggauguccagcaacaucaccuccgagcagguccgcacgaucaucgugaaccacgucaacgacaccuggggccugaaggugcggcagagccugugguuccaccucuccugccugaccuucgggcagcacaccgugcaggaguuccuggucagcuucggcguguggauccgcacgcccgccccguaccggccgcccaacgcgccgauccucuccacccugccggagcacaccgugaucugcuga

SEQ ID NO: 11900 - RNA, 4098 nt, Artificial Sequence
  SARS-CoV-2/Wuhan/WIV05/2019__EPI_ISL_402128 spike protein CDS gc (1-1211)(G889C_L1034C) WhcAg construct
auguucguguuccugguccuccugccccuggugagcucccagugcgugaaccucaccacccgcacgcagcugccgcccgccuacaccaacagcuucacccggggcgucuacuaccccgacaagguguuccgcuccagcgugcugcacuccacccaggaccucuuccugcccuucuucagcaacgucacgugguuccacgccauccacguguccgggaccaacggcaccaagcgguucgacaacccggugcugcccuucaacgacggggucuacuucgcgagcaccgagaaguccaacaucauccgcggcuggaucuucgggacgacccucgacagcaagacccagucccugcugaucgugaacaacgccaccaacguggucaucaaggugugcgaguuccaguucugcaacgaccccuuccucggcguguacuaccacaagaacaacaagagcuggauggaguccgaguuccgggucuacagcuccgccaacaacugcacguucgaguacgugagccagcccuuccugauggaccuggagggcaagcaggggaacuucaagaaccuccgcgaguucguguucaagaacaucgacggcuacuucaagaucuacuccaagcacaccccgaucaaccugguccgggaccugccccagggguucagcgcccucgagccccugguggaccugcccaucggcaucaacaucacccgcuuccagacccuccuggcccugcaccgguccuaccucacgccgggggacagcagcuccggcuggaccgcgggcgccgccgccuacuacgugggguaccugcagccccgcaccuuccugcucaaguacaacgagaacggcaccaucacggacgcggucgacugcgcccuggacccccugagcgagaccaagugcacccucaaguccuucaccguggagaaggggaucuaccagacgagcaacuuccgggugcagcccaccgaguccaucguccgcuucccgaacaucaccaaccugugccccuucggcgagguguucaacgccacccgguucgccagcgucuacgccuggaaccgcaagcggaucuccaacugcguggcggacuacagcgugcuguacaacuccgccagcuucuccacguucaagugcuacggcgucagccccaccaagcucaacgaccugugcuucaccaacguguacgccgacuccuucgugauccgcggggacgagguccggcagaucgcccccggccagaccgggaagaucgccgacuacaacuacaagcugccggacgacuucacgggcugcgugaucgcguggaacagcaacaaccucgacuccaaggucgggggcaacuacaacuaccuguaccgccuguuccgcaagagcaaccucaagcccuucgagcgggacaucuccaccgagaucuaccaggccggcagcacccccugcaacgggguggagggcuucaacugcuacuucccccugcaguccuacggguuccagccgaccaacggcgugggguaccagcccuaccggguggucgugcugagcuucgagcuccugcacgcccccgccacggugugcggccccaagaaguccaccaaccuggucaagaacaagugcgugaacuucaacuucaacggccucaccgggaccggcgugcugaccgagagcaacaagaaguuccugccguuccagcaguucgggcgcgacaucgccgacacgaccgacgcgguccgcgacccccagacccuggagauccucgacaucacccccugcagcuucggcgggguguccgugaucacgccgggcaccaacaccagcaaccaggucgccgugcuguaccaggacgugaacugcaccgagguccccguggccauccacgccgaccagcugacgcccaccuggcggguguacuccaccggcagcaacgucuuccagacccgcgccgggugccucaucggcgcggagcacgugaacaacuccuacgagugcgacauccccaucggggccggcaucugcgccagcuaccagacgcagaccaacuccccgcggcgcgcccggagcguggcgucccagagcaucaucgccuacaccaugucccugggcgccgagaacagcgucgccuacuccaacaacagcaucgccauccccaccaacuucacgaucuccgugaccaccgagauccugcccgugagcaugaccaagacgagcgucgacugcaccauguacaucugcggggacuccaccgagugcagcaaccuccugcugcaguacggcuccuucugcacccagcucaaccgcgcgcugacggggaucgccguggagcaggacaagaacacccaggagguguucgcccaggucaagcagaucuacaagacgcccccgaucaaggacuucggcggguucaacuucagccagauccugcccgaccccuccaagcccagcaagcgguccuucaucgaggaccuccuguucaacaaggugacccuggccgacgccggcuucaucaagcaguacggcgacugccucggggacaucgcggcccgcgaccugaucugcgcccagaaguucaacggccugaccgugcucccgccccugcugaccgacgagaugaucgcccaguacaccagcgcccuccuggcggggaccaucacguccggcuggaccuucugcgccggcgccgcccugcagauccccuucgcgaugcagauggccuaccgguucaacggcaucggggucacccagaacgugcucuacgagaaccagaagcugaucgccaaccaguucaacagcgccaucggcaagauccaggacucccugagcuccaccgccagcgcgcucgggaagcugcaggacguggucaaccagaacgcccaggcccugaacacgcucgugaagcagcuguccagcaacuucggcgccaucuccagcgugcugaacgacauccucucccgccuggacaaggucgaggccgaggugcagaucgaccggcugaucaccgggcgccuccagagccugcagaccuacgugacccagcagcugauccgggcggccgagauccgcgccagcgccaaccucgccgcgaccaagauguccgagugcgucugcggccagagcaagcggguggacuucugcggcaagggguaccaccugauguccuucccccagagcgccccgcacggcguggucuuccuccacgugacguacguccccgcccaggagaagaacuucaccaccgcccccgcgaucugccacgacgggaaggcccacuucccccgcgagggcguguucguguccaacgggacccacugguucgucacgcagcggaacuucuacgagccgcagaucaucaccaccgacaacaccuucgugagcggcaacugcgacguggucaucggcaucgugaacaacacgguguacgacccccugcagcccgagcuggacuccuucaaggaggagcucgacaaguacuucaagaaccacaccagccccgacgucgaccugggggacaucuccggcaucaacgccagcguggugaacauccagaaggagaucgaccgccugaacgaggucgccaagaaccucaacgagucccugaucgaccugcaggagcucgggaaguacgagcaguacaucaagggcgggggcgggagcgacaucgaccccuacaaggaguucggcagcuccuaccagcugcucaacuuccugccccuggacuucuuccccgaccucaacgcccugguggacaccgccaccgcgcuguacgaggaggagcucacggggcgcgagcacugcagcccccaccacaccgccauccggcaggcccuggucugcugggacgagcugaccaagcucaucgccuggauguccagcaacaucaccuccgagcagguccgcacgaucaucgugaaccacgucaacgacaccuggggccugaaggugcggcagagccugugguuccaccucuccugccugaccuucgggcagcacaccgugcaggaguuccuggucagcuucggcguguggauccgcacgcccgccccguaccggccgcccaacgcgccgauccucuccacccugccggagcacaccgugaucugcuga

SEQ ID NO: 11901 - RNA, 4098 nt, Artificial Sequence
  SARS-CoV-2/Wuhan/WIV05/2019__EPI_ISL_402128 spike protein CDS gc (1-1211)(I909C_Y1047C) WhcAg construct
auguucguguuccugguccuccugccccuggugagcucccagugcgugaaccucaccacccgcacgcagcugccgcccgccuacaccaacagcuucacccggggcgucuacuaccccgacaagguguuccgcuccagcgugcugcacuccacccaggaccucuuccugcccuucuucagcaacgucacgugguuccacgccauccacguguccgggaccaacggcaccaagcgguucgacaacccggugcugcccuucaacgacggggucuacuucgcgagcaccgagaaguccaacaucauccgcggcuggaucuucgggacgacccucgacagcaagacccagucccugcugaucgugaacaacgccaccaacguggucaucaaggugugcgaguuccaguucugcaacgaccccuuccucggcguguacuaccacaagaacaacaagagcuggauggaguccgaguuccgggucuacagcuccgccaacaacugcacguucgaguacgugagccagcccuuccugauggaccuggagggcaagcaggggaacuucaagaaccuccgcgaguucguguucaagaacaucgacggcuacuucaagaucuacuccaagcacaccccgaucaaccugguccgggaccugccccagggguucagcgcccucgagccccugguggaccugcccaucggcaucaacaucacccgcuuccagacccuccuggcccugcaccgguccuaccucacgccgggggacagcagcuccggcuggaccgcgggcgccgccgccuacuacgugggguaccugcagccccgcaccuuccugcucaaguacaacgagaacggcaccaucacggacgcggucgacugcgcccuggacccccugagcgagaccaagugcacccucaaguccuucaccguggagaaggggaucuaccagacgagcaacuuccgggugcagcccaccgaguccaucguccgcuucccgaacaucaccaaccugugccccuucggcgagguguucaacgccacccgguucgccagcgucuacgccuggaaccgcaagcggaucuccaacugcguggcggacuacagcgugcuguacaacuccgccagcuucuccacguucaagugcuacggcgucagccccaccaagcucaacgaccugugcuucaccaacguguacgccgacuccuucgugauccgcggggacgagguccggcagaucgcccccggccagaccgggaagaucgccgacuacaacuacaagcugccggacgacuucacgggcugcgugaucgcguggaacagcaacaaccucgacuccaaggucgggggcaacuacaacuaccuguaccgccuguuccgcaagagcaaccucaagcccuucgagcgggacaucuccaccgagaucuaccaggccggcagcacccccugcaacgggguggagggcuucaacugcuacuucccccugcaguccuacggguuccagccgaccaacggcgugggguaccagcccuaccggguggucgugcugagcuucgagcuccugcacgcccccgccacggugugcggccccaagaaguccaccaaccuggucaagaacaagugcgugaacuucaacuucaacggccucaccgggaccggcgugcugaccgagagcaacaagaaguuccugccguuccagcaguucgggcgcgacaucgccgacacgaccgacgcgguccgcgacccccagacccuggagauccucgacaucacccccugcagcuucggcgggguguccgugaucacgccgggcaccaacaccagcaaccaggucgccgugcuguaccaggacgugaacugcaccgagguccccguggccauccacgccgaccagcugacgcccaccuggcggguguacuccaccggcagcaacgucuuccagacccgcgccgggugccucaucggcgcggagcacgugaacaacuccuacgagugcgacauccccaucggggccggcaucugcgccagcuaccagacgcagaccaacuccccgcggcgcgcccggagcguggcgucccagagcaucaucgccuacaccaugucccugggcgccgagaacagcgucgccuacuccaacaacagcaucgccauccccaccaacuucacgaucuccgugaccaccgagauccugcccgugagcaugaccaagacgagcgucgacugcaccauguacaucugcggggacuccaccgagugcagcaaccuccugcugcaguacggcuccuucugcacccagcucaaccgcgcgcugacggggaucgccguggagcaggacaagaacacccaggagguguucgcccaggucaagcagaucuacaagacgcccccgaucaaggacuucggcggguucaacuucagccagauccugcccgaccccuccaagcccagcaagcgguccuucaucgaggaccuccuguucaacaaggugacccuggccgacgccggcuucaucaagcaguacggcgacugccucggggacaucgcggcccgcgaccugaucugcgcccagaaguucaacggccugaccgugcucccgccccugcugaccgacgagaugaucgcccaguacaccagcgcccuccuggcggggaccaucacguccggcuggaccuucggggccggcgccgcccugcagauccccuucgcgaugcagauggccuaccgguucaacggcugcggggucacccagaacgugcucuacgagaaccagaagcugaucgccaaccaguucaacagcgccaucggcaagauccaggacucccugagcuccaccgccagcgcgcucgggaagcugcaggacguggucaaccagaacgcccaggcccugaacacgcucgugaagcagcuguccagcaacuucggcgccaucuccagcgugcugaacgacauccucucccgccuggacaaggucgaggccgaggugcagaucgaccggcugaucaccgggcgccuccagagccugcagaccuacgugacccagcagcugauccgggcggccgagauccgcgccagcgccaaccucgccgcgaccaagauguccgagugcguccugggccagagcaagcggguggacuucugcggcaaggggugccaccugauguccuucccccagagcgccccgcacggcguggucuuccuccacgugacguacguccccgcccaggagaagaacuucaccaccgcccccgcgaucugccacgacgggaaggcccacuucccccgcgagggcguguucguguccaacgggacccacugguucgucacgcagcggaacuucuacgagccgcagaucaucaccaccgacaacaccuucgugagcggcaacugcgacguggucaucggcaucgugaacaacacgguguacgacccccugcagcccgagcuggacuccuucaaggaggagcucgacaaguacuucaagaaccacaccagccccgacgucgaccugggggacaucuccggcaucaacgccagcguggugaacauccagaaggagaucgaccgccugaacgaggucgccaagaaccucaacgagucccugaucgaccugcaggagcucgggaaguacgagcaguacaucaagggcgggggcgggagcgacaucgaccccuacaaggaguucggcagcuccuaccagcugcucaacuuccugccccuggacuucuuccccgaccucaacgcccugguggacaccgccaccgcgcuguacgaggaggagcucacggggcgcgagcacugcagcccccaccacaccgccauccggcaggcccuggucugcugggacgagcugaccaagcucaucgccuggauguccagcaacaucaccuccgagcagguccgcacgaucaucgugaaccacgucaacgacaccuggggccugaaggugcggcagagccugugguuccaccucuccugccugaccuucgggcagcacaccgugcaggaguuccuggucagcuucggcguguggauccgcacgcccgccccguaccggccgcccaacgcgccgauccucuccacccugccggagcacaccgugaucugcuga

SEQ ID NO: 11902 - RNA, 4098 nt, Artificial Sequence
  SARS-CoV-2/Wuhan/WIV05/2019__EPI_ISL_402128 spike protein CDS gc (1-1211)(Q965C_S1003C) WhcAg construct
auguucguguuccugguccuccugccccuggugagcucccagugcgugaaccucaccacccgcacgcagcugccgcccgccuacaccaacagcuucacccggggcgucuacuaccccgacaagguguuccgcuccagcgugcugcacuccacccaggaccucuuccugcccuucuucagcaacgucacgugguuccacgccauccacguguccgggaccaacggcaccaagcgguucgacaacccggugcugcccuucaacgacggggucuacuucgcgagcaccgagaaguccaacaucauccgcggcuggaucuucgggacgacccucgacagcaagacccagucccugcugaucgugaacaacgccaccaacguggucaucaaggugugcgaguuccaguucugcaacgaccccuuccucggcguguacuaccacaagaacaacaagagcuggauggaguccgaguuccgggucuacagcuccgccaacaacugcacguucgaguacgugagccagcccuuccugauggaccuggagggcaagcaggggaacuucaagaaccuccgcgaguucguguucaagaacaucgacggcuacuucaagaucuacuccaagcacaccccgaucaaccugguccgggaccugccccagggguucagcgcccucgagccccugguggaccugcccaucggcaucaacaucacccgcuuccagacccuccuggcccugcaccgguccuaccucacgccgggggacagcagcuccggcuggaccgcgggcgccgccgccuacuacgugggguaccugcagccccgcaccuuccugcucaaguacaacgagaacggcaccaucacggacgcggucgacugcgcccuggacccccugagcgagaccaagugcacccucaaguccuucaccguggagaaggggaucuaccagacgagcaacuuccgggugcagcccaccgaguccaucguccgcuucccgaacaucaccaaccugugccccuucggcgagguguucaacgccacccgguucgccagcgucuacgccuggaaccgcaagcggaucuccaacugcguggcggacuacagcgugcuguacaacuccgccagcuucuccacguucaagugcuacggcgucagccccaccaagcucaacgaccugugcuucaccaacguguacgccgacuccuucgugauccgcggggacgagguccggcagaucgcccccggccagaccgggaagaucgccgacuacaacuacaagcugccggacgacuucacgggcugcgugaucgcguggaacagcaacaaccucgacuccaaggucgggggcaacuacaacuaccuguaccgccuguuccgcaagagcaaccucaagcccuucgagcgggacaucuccaccgagaucuaccaggccggcagcacccccugcaacgggguggagggcuucaacugcuacuucccccugcaguccuacggguuccagccgaccaacggcgugggguaccagcccuaccggguggucgugcugagcuucgagcuccugcacgcccccgccacggugugcggccccaagaaguccaccaaccuggucaagaacaagugcgugaacuucaacuucaacggccucaccgggaccggcgugcugaccgagagcaacaagaaguuccugccguuccagcaguucgggcgcgacaucgccgacacgaccgacgcgguccgcgacccccagacccuggagauccucgacaucacccccugcagcuucggcgggguguccgugaucacgccgggcaccaacaccagcaaccaggucgccgugcuguaccaggacgugaacugcaccgagguccccguggccauccacgccgaccagcugacgcccaccuggcggguguacuccaccggcagcaacgucuuccagacccgcgccgggugccucaucggcgcggagcacgugaacaacuccuacgagugcgacauccccaucggggccggcaucugcgccagcuaccagacgcagaccaacuccccgcggcgcgcccggagcguggcgucccagagcaucaucgccuacaccaugucccugggcgccgagaacagcgucgccuacuccaacaacagcaucgccauccccaccaacuucacgaucuccgugaccaccgagauccugcccgugagcaugaccaagacgagcgucgacugcaccauguacaucugcggggacuccaccgagugcagcaaccuccugcugcaguacggcuccuucugcacccagcucaaccgcgcgcugacggggaucgccguggagcaggacaagaacacccaggagguguucgcccaggucaagcagaucuacaagacgcccccgaucaaggacuucggcggguucaacuucagccagauccugcccgaccccuccaagcccagcaagcgguccuucaucgaggaccuccuguucaacaaggugacccuggccgacgccggcuucaucaagcaguacggcgacugccucggggacaucgcggcccgcgaccugaucugcgcccagaaguucaacggccugaccgugcucccgccccugcugaccgacgagaugaucgcccaguacaccagcgcccuccuggcggggaccaucacguccggcuggaccuucggggccggcgccgcccugcagauccccuucgcgaugcagauggccuaccgguucaacggcaucggggucacccagaacgugcucuacgagaaccagaagcugaucgccaaccaguucaacagcgccaucggcaagauccaggacucccugagcuccaccgccagcgcgcucgggaagcugcaggacguggucaaccagaacgcccaggcccugaacacgcucgugaagugccuguccagcaacuucggcgccaucuccagcgugcugaacgacauccucucccgccuggacaaggucgaggccgaggugcagaucgaccggcugaucaccgggcgccuccagugccugcagaccuacgugacccagcagcugauccgggcggccgagauccgcgccagcgccaaccucgccgcgaccaagauguccgagugcguccugggccagagcaagcggguggacuucugcggcaagggguaccaccugauguccuucccccagagcgccccgcacggcguggucuuccuccacgugacguacguccccgcccaggagaagaacuucaccaccgcccccgcgaucugccacgacgggaaggcccacuucccccgcgagggcguguucguguccaacgggacccacugguucgucacgcagcggaacuucuacgagccgcagaucaucaccaccgacaacaccuucgugagcggcaacugcgacguggucaucggcaucgugaacaacacgguguacgacccccugcagcccgagcuggacuccuucaaggaggagcucgacaaguacuucaagaaccacaccagccccgacgucgaccugggggacaucuccggcaucaacgccagcguggugaacauccagaaggagaucgaccgccugaacgaggucgccaagaaccucaacgagucccugaucgaccugcaggagcucgggaaguacgagcaguacaucaagggcgggggcgggagcgacaucgaccccuacaaggaguucggcagcuccuaccagcugcucaacuuccugccccuggacuucuuccccgaccucaacgcccugguggacaccgccaccgcgcuguacgaggaggagcucacggggcgcgagcacugcagcccccaccacaccgccauccggcaggcccuggucugcugggacgagcugaccaagcucaucgccuggauguccagcaacaucaccuccgagcagguccgcacgaucaucgugaaccacgucaacgacaccuggggccugaaggugcggcagagccugugguuccaccucuccugccugaccuucgggcagcacaccgugcaggaguuccuggucagcuucggcguguggauccgcacgcccgccccguaccggccgcccaacgcgccgauccucuccacccugccggagcacaccgugaucugcuga

SEQ ID NO: 11903 - RNA, 4098 nt, Artificial Sequence
  SARS-CoV-2/Wuhan/WIV05/2019__EPI_ISL_402128 spike protein CDS gc (1-1211)(F970C_G999C) WhcAg construct
auguucguguuccugguccuccugccccuggugagcucccagugcgugaaccucaccacccgcacgcagcugccgcccgccuacaccaacagcuucacccggggcgucuacuaccccgacaagguguuccgcuccagcgugcugcacuccacccaggaccucuuccugcccuucuucagcaacgucacgugguuccacgccauccacguguccgggaccaacggcaccaagcgguucgacaacccggugcugcccuucaacgacggggucuacuucgcgagcaccgagaaguccaacaucauccgcggcuggaucuucgggacgacccucgacagcaagacccagucccugcugaucgugaacaacgccaccaacguggucaucaaggugugcgaguuccaguucugcaacgaccccuuccucggcguguacuaccacaagaacaacaagagcuggauggaguccgaguuccgggucuacagcuccgccaacaacugcacguucgaguacgugagccagcccuuccugauggaccuggagggcaagcaggggaacuucaagaaccuccgcgaguucguguucaagaacaucgacggcuacuucaagaucuacuccaagcacaccccgaucaaccugguccgggaccugccccagggguucagcgcccucgagccccugguggaccugcccaucggcaucaacaucacccgcuuccagacccuccuggcccugcaccgguccuaccucacgccgggggacagcagcuccggcuggaccgcgggcgccgccgccuacuacgugggguaccugcagccccgcaccuuccugcucaaguacaacgagaacggcaccaucacggacgcggucgacugcgcccuggacccccugagcgagaccaagugcacccucaaguccuucaccguggagaaggggaucuaccagacgagcaacuuccgggugcagcccaccgaguccaucguccgcuucccgaacaucaccaaccugugccccuucggcgagguguucaacgccacccgguucgccagcgucuacgccuggaaccgcaagcggaucuccaacugcguggcggacuacagcgugcuguacaacuccgccagcuucuccacguucaagugcuacggcgucagccccaccaagcucaacgaccugugcuucaccaacguguacgccgacuccuucgugauccgcggggacgagguccggcagaucgcccccggccagaccgggaagaucgccgacuacaacuacaagcugccggacgacuucacgggcugcgugaucgcguggaacagcaacaaccucgacuccaaggucgggggcaacuacaacuaccuguaccgccuguuccgcaagagcaaccucaagcccuucgagcgggacaucuccaccgagaucuaccaggccggcagcacccccugcaacgggguggagggcuucaacugcuacuucccccugcaguccuacggguuccagccgaccaacggcgugggguaccagcccuaccggguggucgugcugagcuucgagcuccugcacgcccccgccacggugugcggccccaagaaguccaccaaccuggucaagaacaagugcgugaacuucaacuucaacggccucaccgggaccggcgugcugaccgagagcaacaagaaguuccugccguuccagcaguucgggcgcgacaucgccgacacgaccgacgcgguccgcgacccccagacccuggagauccucgacaucacccccugcagcuucggcgggguguccgugaucacgccgggcaccaacaccagcaaccaggucgccgugcuguaccaggacgugaacugcaccgagguccccguggccauccacgccgaccagcugacgcccaccuggcggguguacuccaccggcagcaacgucuuccagacccgcgccgggugccucaucggcgcggagcacgugaacaacuccuacgagugcgacauccccaucggggccggcaucugcgccagcuaccagacgcagaccaacuccccgcggcgcgcccggagcguggcgucccagagcaucaucgccuacaccaugucccugggcgccgagaacagcgucgccuacuccaacaacagcaucgccauccccaccaacuucacgaucuccgugaccaccgagauccugcccgugagcaugaccaagacgagcgucgacugcaccauguacaucugcggggacuccaccgagugcagcaaccuccugcugcaguacggcuccuucugcacccagcucaaccgcgcgcugacggggaucgccguggagcaggacaagaacacccaggagguguucgcccaggucaagcagaucuacaagacgcccccgaucaaggacuucggcggguucaacuucagccagauccugcccgaccccuccaagcccagcaagcgguccuucaucgaggaccuccuguucaacaaggugacccuggccgacgccggcuucaucaagcaguacggcgacugccucggggacaucgcggcccgcgaccugaucugcgcccagaaguucaacggccugaccgugcucccgccccugcugaccgacgagaugaucgcccaguacaccagcgcccuccuggcggggaccaucacguccggcuggaccuucggggccggcgccgcccugcagauccccuucgcgaugcagauggccuaccgguucaacggcaucggggucacccagaacgugcucuacgagaaccagaagcugaucgccaaccaguucaacagcgccaucggcaagauccaggacucccugagcuccaccgccagcgcgcucgggaagcugcaggacguggucaaccagaacgcccaggcccugaacacgcucgugaagcagcuguccagcaacugcggcgccaucuccagcgugcugaacgacauccucucccgccuggacaaggucgaggccgaggugcagaucgaccggcugaucaccugucgccuccagagccugcagaccuacgugacccagcagcugauccgggcggccgagauccgcgccagcgccaaccucgccgcgaccaagauguccgagugcguccugggccagagcaagcggguggacuucugcggcaagggguaccaccugauguccuucccccagagcgccccgcacggcguggucuuccuccacgugacguacguccccgcccaggagaagaacuucaccaccgcccccgcgaucugccacgacgggaaggcccacuucccccgcgagggcguguucguguccaacgggacccacugguucgucacgcagcggaacuucuacgagccgcagaucaucaccaccgacaacaccuucgugagcggcaacugcgacguggucaucggcaucgugaacaacacgguguacgacccccugcagcccgagcuggacuccuucaaggaggagcucgacaaguacuucaagaaccacaccagccccgacgucgaccugggggacaucuccggcaucaacgccagcguggugaacauccagaaggagaucgaccgccugaacgaggucgccaagaaccucaacgagucccugaucgaccugcaggagcucgggaaguacgagcaguacaucaagggcgggggcgggagcgacaucgaccccuacaaggaguucggcagcuccuaccagcugcucaacuuccugccccuggacuucuuccccgaccucaacgcccugguggacaccgccaccgcgcuguacgaggaggagcucacggggcgcgagcacugcagcccccaccacaccgccauccggcaggcccuggucugcugggacgagcugaccaagcucaucgccuggauguccagcaacaucaccuccgagcagguccgcacgaucaucgugaaccacgucaacgacaccuggggccugaaggugcggcagagccugugguuccaccucuccugccugaccuucgggcagcacaccgugcaggaguuccuggucagcuucggcguguggauccgcacgcccgccccguaccggccgcccaacgcgccgauccucuccacccugccggagcacaccgugaucugcuga

SEQ ID NO: 11904 - RNA, 4098 nt, Artificial Sequence
  SARS-CoV-2/Wuhan/WIV05/2019__EPI_ISL_402128 spike protein CDS gc (1-1211)(A972C_R995C) WhcAg construct
auguucguguuccugguccuccugccccuggugagcucccagugcgugaaccucaccacccgcacgcagcugccgcccgccuacaccaacagcuucacccggggcgucuacuaccccgacaagguguuccgcuccagcgugcugcacuccacccaggaccucuuccugcccuucuucagcaacgucacgugguuccacgccauccacguguccgggaccaacggcaccaagcgguucgacaacccggugcugcccuucaacgacggggucuacuucgcgagcaccgagaaguccaacaucauccgcggcuggaucuucgggacgacccucgacagcaagacccagucccugcugaucgugaacaacgccaccaacguggucaucaaggugugcgaguuccaguucugcaacgaccccuuccucggcguguacuaccacaagaacaacaagagcuggauggaguccgaguuccgggucuacagcuccgccaacaacugcacguucgaguacgugagccagcccuuccugauggaccuggagggcaagcaggggaacuucaagaaccuccgcgaguucguguucaagaacaucgacggcuacuucaagaucuacuccaagcacaccccgaucaaccugguccgggaccugccccagggguucagcgcccucgagccccugguggaccugcccaucggcaucaacaucacccgcuuccagacccuccuggcccugcaccgguccuaccucacgccgggggacagcagcuccggcuggaccgcgggcgccgccgccuacuacgugggguaccugcagccccgcaccuuccugcucaaguacaacgagaacggcaccaucacggacgcggucgacugcgcccuggacccccugagcgagaccaagugcacccucaaguccuucaccguggagaaggggaucuaccagacgagcaacuuccgggugcagcccaccgaguccaucguccgcuucccgaacaucaccaaccugugccccuucggcgagguguucaacgccacccgguucgccagcgucuacgccuggaaccgcaagcggaucuccaacugcguggcggacuacagcgugcuguacaacuccgccagcuucuccacguucaagugcuacggcgucagccccaccaagcucaacgaccugugcuucaccaacguguacgccgacuccuucgugauccgcggggacgagguccggcagaucgcccccggccagaccgggaagaucgccgacuacaacuacaagcugccggacgacuucacgggcugcgugaucgcguggaacagcaacaaccucgacuccaaggucgggggcaacuacaacuaccuguaccgccuguuccgcaagagcaaccucaagcccuucgagcgggacaucuccaccgagaucuaccaggccggcagcacccccugcaacgggguggagggcuucaacugcuacuucccccugcaguccuacggguuccagccgaccaacggcgugggguaccagcccuaccggguggucgugcugagcuucgagcuccugcacgcccccgccacggugugcggccccaagaaguccaccaaccuggucaagaacaagugcgugaacuucaacuucaacggccucaccgggaccggcgugcugaccgagagcaacaagaaguuccugccguuccagcaguucgggcgcgacaucgccgacacgaccgacgcgguccgcgacccccagacccuggagauccucgacaucacccccugcagcuucggcgggguguccgugaucacgccgggcaccaacaccagcaaccaggucgccgugcuguaccaggacgugaacugcaccgagguccccguggccauccacgccgaccagcugacgcccaccuggcggguguacuccaccggcagcaacgucuuccagacccgcgccgggugccucaucggcgcggagcacgugaacaacuccuacgagugcgacauccccaucggggccggcaucugcgccagcuaccagacgcagaccaacuccccgcggcgcgcccggagcguggcgucccagagcaucaucgccuacaccaugucccugggcgccgagaacagcgucgccuacuccaacaacagcaucgccauccccaccaacuucacgaucuccgugaccaccgagauccugcccgugagcaugaccaagacgagcgucgacugcaccauguacaucugcggggacuccaccgagugcagcaaccuccugcugcaguacggcuccuucugcacccagcucaaccgcgcgcugacggggaucgccguggagcaggacaagaacacccaggagguguucgcccaggucaagcagaucuacaagacgcccccgaucaaggacuucggcggguucaacuucagccagauccugcccgaccccuccaagcccagcaagcgguccuucaucgaggaccuccuguucaacaaggugacccuggccgacgccggcuucaucaagcaguacggcgacugccucggggacaucgcggcccgcgaccugaucugcgcccagaaguucaacggccugaccgugcucccgccccugcugaccgacgagaugaucgcccaguacaccagcgcccuccuggcggggaccaucacguccggcuggaccuucggggccggcgccgcccugcagauccccuucgcgaugcagauggccuaccgguucaacggcaucggggucacccagaacgugcucuacgagaaccagaagcugaucgccaaccaguucaacagcgccaucggcaagauccaggacucccugagcuccaccgccagcgcgcucgggaagcugcaggacguggucaaccagaacgcccaggcccugaacacgcucgugaagcagcuguccagcaacuucggcugcaucuccagcgugcugaacgacauccucucccgccuggacaaggucgaggccgaggugcagaucgacugccugaucaccgggcgccuccagagccugcagaccuacgugacccagcagcugauccgggcggccgagauccgcgccagcgccaaccucgccgcgaccaagauguccgagugcguccugggccagagcaagcggguggacuucugcggcaagggguaccaccugauguccuucccccagagcgccccgcacggcguggucuuccuccacgugacguacguccccgcccaggagaagaacuucaccaccgcccccgcgaucugccacgacgggaaggcccacuucccccgcgagggcguguucguguccaacgggacccacugguucgucacgcagcggaacuucuacgagccgcagaucaucaccaccgacaacaccuucgugagcggcaacugcgacguggucaucggcaucgugaacaacacgguguacgacccccugcagcccgagcuggacuccuucaaggaggagcucgacaaguacuucaagaaccacaccagccccgacgucgaccugggggacaucuccggcaucaacgccagcguggugaacauccagaaggagaucgaccgccugaacgaggucgccaagaaccucaacgagucccugaucgaccugcaggagcucgggaaguacgagcaguacaucaagggcgggggcgggagcgacaucgaccccuacaaggaguucggcagcuccuaccagcugcucaacuuccugccccuggacuucuuccccgaccucaacgcccugguggacaccgccaccgcgcuguacgaggaggagcucacggggcgcgagcacugcagcccccaccacaccgccauccggcaggcccuggucugcugggacgagcugaccaagcucaucgccuggauguccagcaacaucaccuccgagcagguccgcacgaucaucgugaaccacgucaacgacaccuggggccugaaggugcggcagagccugugguuccaccucuccugccugaccuucgggcagcacaccgugcaggaguuccuggucagcuucggcguguggauccgcacgcccgccccguaccggccgcccaacgcgccgauccucuccacccugccggagcacaccgugaucugcuga

SEQ ID NO: 11905 - RNA, 4098 nt, Artificial Sequence
  SARS-CoV-2/Wuhan/WIV05/2019__EPI_ISL_402128 spike protein CDS gc (1-1211)(A890C_V1040C) WhcAg construct
auguucguguuccugguccuccugccccuggugagcucccagugcgugaaccucaccacccgcacgcagcugccgcccgccuacaccaacagcuucacccggggcgucuacuaccccgacaagguguuccgcuccagcgugcugcacuccacccaggaccucuuccugcccuucuucagcaacgucacgugguuccacgccauccacguguccgggaccaacggcaccaagcgguucgacaacccggugcugcccuucaacgacggggucuacuucgcgagcaccgagaaguccaacaucauccgcggcuggaucuucgggacgacccucgacagcaagacccagucccugcugaucgugaacaacgccaccaacguggucaucaaggugugcgaguuccaguucugcaacgaccccuuccucggcguguacuaccacaagaacaacaagagcuggauggaguccgaguuccgggucuacagcuccgccaacaacugcacguucgaguacgugagccagcccuuccugauggaccuggagggcaagcaggggaacuucaagaaccuccgcgaguucguguucaagaacaucgacggcuacuucaagaucuacuccaagcacaccccgaucaaccugguccgggaccugccccagggguucagcgcccucgagccccugguggaccugcccaucggcaucaacaucacccgcuuccagacccuccuggcccugcaccgguccuaccucacgccgggggacagcagcuccggcuggaccgcgggcgccgccgccuacuacgugggguaccugcagccccgcaccuuccugcucaaguacaacgagaacggcaccaucacggacgcggucgacugcgcccuggacccccugagcgagaccaagugcacccucaaguccuucaccguggagaaggggaucuaccagacgagcaacuuccgggugcagcccaccgaguccaucguccgcuucccgaacaucaccaaccugugccccuucggcgagguguucaacgccacccgguucgccagcgucuacgccuggaaccgcaagcggaucuccaacugcguggcggacuacagcgugcuguacaacuccgccagcuucuccacguucaagugcuacggcgucagccccaccaagcucaacgaccugugcuucaccaacguguacgccgacuccuucgugauccgcggggacgagguccggcagaucgcccccggccagaccgggaagaucgccgacuacaacuacaagcugccggacgacuucacgggcugcgugaucgcguggaacagcaacaaccucgacuccaaggucgggggcaacuacaacuaccuguaccgccuguuccgcaagagcaaccucaagcccuucgagcgggacaucuccaccgagaucuaccaggccggcagcacccccugcaacgggguggagggcuucaacugcuacuucccccugcaguccuacggguuccagccgaccaacggcgugggguaccagcccuaccggguggucgugcugagcuucgagcuccugcacgcccccgccacggugugcggccccaagaaguccaccaaccuggucaagaacaagugcgugaacuucaacuucaacggccucaccgggaccggcgugcugaccgagagcaacaagaaguuccugccguuccagcaguucgggcgcgacaucgccgacacgaccgacgcgguccgcgacccccagacccuggagauccucgacaucacccccugcagcuucggcgggguguccgugaucacgccgggcaccaacaccagcaaccaggucgccgugcuguaccaggacgugaacugcaccgagguccccguggccauccacgccgaccagcugacgcccaccuggcggguguacuccaccggcagcaacgucuuccagacccgcgccgggugccucaucggcgcggagcacgugaacaacuccuacgagugcgacauccccaucggggccggcaucugcgccagcuaccagacgcagaccaacuccccgcggcgcgcccggagcguggcgucccagagcaucaucgccuacaccaugucccugggcgccgagaacagcgucgccuacuccaacaacagcaucgccauccccaccaacuucacgaucuccgugaccaccgagauccugcccgugagcaugaccaagacgagcgucgacugcaccauguacaucugcggggacuccaccgagugcagcaaccuccugcugcaguacggcuccuucugcacccagcucaaccgcgcgcugacggggaucgccguggagcaggacaagaacacccaggagguguucgcccaggucaagcagaucuacaagacgcccccgaucaaggacuucggcggguucaacuucagccagauccugcccgaccccuccaagcccagcaagcgguccuucaucgaggaccuccuguucaacaaggugacccuggccgacgccggcuucaucaagcaguacggcgacugccucggggacaucgcggcccgcgaccugaucugcgcccagaaguucaacggccugaccgugcucccgccccugcugaccgacgagaugaucgcccaguacaccagcgcccuccuggcggggaccaucacguccggcuggaccuucgggugcggcgccgcccugcagauccccuucgcgaugcagauggccuaccgguucaacggcaucggggucacccagaacgugcucuacgagaaccagaagcugaucgccaaccaguucaacagcgccaucggcaagauccaggacucccugagcuccaccgccagcgcgcucgggaagcugcaggacguggucaaccagaacgcccaggcccugaacacgcucgugaagcagcuguccagcaacuucggcgccaucuccagcgugcugaacgacauccucucccgccuggacaaggucgaggccgaggugcagaucgaccggcugaucaccgggcgccuccagagccugcagaccuacgugacccagcagcugauccgggcggccgagauccgcgccagcgccaaccucgccgcgaccaagauguccgagugcguccugggccagagcaagcggugcgacuucugcggcaagggguaccaccugauguccuucccccagagcgccccgcacggcguggucuuccuccacgugacguacguccccgcccaggagaagaacuucaccaccgcccccgcgaucugccacgacgggaaggcccacuucccccgcgagggcguguucguguccaacgggacccacugguucgucacgcagcggaacuucuacgagccgcagaucaucaccaccgacaacaccuucgugagcggcaacugcgacguggucaucggcaucgugaacaacacgguguacgacccccugcagcccgagcuggacuccuucaaggaggagcucgacaaguacuucaagaaccacaccagccccgacgucgaccugggggacaucuccggcaucaacgccagcguggugaacauccagaaggagaucgaccgccugaacgaggucgccaagaaccucaacgagucccugaucgaccugcaggagcucgggaaguacgagcaguacaucaagggcgggggcgggagcgacaucgaccccuacaaggaguucggcagcuccuaccagcugcucaacuuccugccccuggacuucuuccccgaccucaacgcccugguggacaccgccaccgcgcuguacgaggaggagcucacggggcgcgagcacugcagcccccaccacaccgccauccggcaggcccuggucugcugggacgagcugaccaagcucaucgccuggauguccagcaacaucaccuccgagcagguccgcacgaucaucgugaaccacgucaacgacaccuggggccugaaggugcggcagagccugugguuccaccucuccugccugaccuucgggcagcacaccgugcaggaguuccuggucagcuucggcguguggauccgcacgcccgccccguaccggccgcccaacgcgccgauccucuccacccugccggagcacaccgugaucugcuga

SEQ ID NO: 11906 - RNA, 4098 nt, Artificial Sequence
  SARS-CoV-2/Wuhan/WIV05/2019__EPI_ISL_402128 spike protein CDS gc (1-1211)(T874C_S1055C) WhcAg construct
auguucguguuccugguccuccugccccuggugagcucccagugcgugaaccucaccacccgcacgcagcugccgcccgccuacaccaacagcuucacccggggcgucuacuaccccgacaagguguuccgcuccagcgugcugcacuccacccaggaccucuuccugcccuucuucagcaacgucacgugguuccacgccauccacguguccgggaccaacggcaccaagcgguucgacaacccggugcugcccuucaacgacggggucuacuucgcgagcaccgagaaguccaacaucauccgcggcuggaucuucgggacgacccucgacagcaagacccagucccugcugaucgugaacaacgccaccaacguggucaucaaggugugcgaguuccaguucugcaacgaccccuuccucggcguguacuaccacaagaacaacaagagcuggauggaguccgaguuccgggucuacagcuccgccaacaacugcacguucgaguacgugagccagcccuuccugauggaccuggagggcaagcaggggaacuucaagaaccuccgcgaguucguguucaagaacaucgacggcuacuucaagaucuacuccaagcacaccccgaucaaccugguccgggaccugccccagggguucagcgcccucgagccccugguggaccugcccaucggcaucaacaucacccgcuuccagacccuccuggcccugcaccgguccuaccucacgccgggggacagcagcuccggcuggaccgcgggcgccgccgccuacuacgugggguaccugcagccccgcaccuuccugcucaaguacaacgagaacggcaccaucacggacgcggucgacugcgcccuggacccccugagcgagaccaagugcacccucaaguccuucaccguggagaaggggaucuaccagacgagcaacuuccgggugcagcccaccgaguccaucguccgcuucccgaacaucaccaaccugugccccuucggcgagguguucaacgccacccgguucgccagcgucuacgccuggaaccgcaagcggaucuccaacugcguggcggacuacagcgugcuguacaacuccgccagcuucuccacguucaagugcuacggcgucagccccaccaagcucaacgaccugugcuucaccaacguguacgccgacuccuucgugauccgcggggacgagguccggcagaucgcccccggccagaccgggaagaucgccgacuacaacuacaagcugccggacgacuucacgggcugcgugaucgcguggaacagcaacaaccucgacuccaaggucgggggcaacuacaacuaccuguaccgccuguuccgcaagagcaaccucaagcccuucgagcgggacaucuccaccgagaucuaccaggccggcagcacccccugcaacgggguggagggcuucaacugcuacuucccccugcaguccuacggguuccagccgaccaacggcgugggguaccagcccuaccggguggucgugcugagcuucgagcuccugcacgcccccgccacggugugcggccccaagaaguccaccaaccuggucaagaacaagugcgugaacuucaacuucaacggccucaccgggaccggcgugcugaccgagagcaacaagaaguuccugccguuccagcaguucgggcgcgacaucgccgacacgaccgacgcgguccgcgacccccagacccuggagauccucgacaucacccccugcagcuucggcgggguguccgugaucacgccgggcaccaacaccagcaaccaggucgccgugcuguaccaggacgugaacugcaccgagguccccguggccauccacgccgaccagcugacgcccaccuggcggguguacuccaccggcagcaacgucuuccagacccgcgccgggugccucaucggcgcggagcacgugaacaacuccuacgagugcgacauccccaucggggccggcaucugcgccagcuaccagacgcagaccaacuccccgcggcgcgcccggagcguggcgucccagagcaucaucgccuacaccaugucccugggcgccgagaacagcgucgccuacuccaacaacagcaucgccauccccaccaacuucacgaucuccgugaccaccgagauccugcccgugagcaugaccaagacgagcgucgacugcaccauguacaucugcggggacuccaccgagugcagcaaccuccugcugcaguacggcuccuucugcacccagcucaaccgcgcgcugacggggaucgccguggagcaggacaagaacacccaggagguguucgcccaggucaagcagaucuacaagacgcccccgaucaaggacuucggcggguucaacuucagccagauccugcccgaccccuccaagcccagcaagcgguccuucaucgaggaccuccuguucaacaaggugacccuggccgacgccggcuucaucaagcaguacggcgacugccucggggacaucgcggcccgcgaccugaucugcgcccagaaguucaacggccugaccgugcucccgccccugcugaccgacgagaugaucgcccaguacugcagcgcccuccuggcggggaccaucacguccggcuggaccuucggggccggcgccgcccugcagauccccuucgcgaugcagauggccuaccgguucaacggcaucggggucacccagaacgugcucuacgagaaccagaagcugaucgccaaccaguucaacagcgccaucggcaagauccaggacucccugagcuccaccgccagcgcgcucgggaagcugcaggacguggucaaccagaacgcccaggcccugaacacgcucgugaagcagcuguccagcaacuucggcgccaucuccagcgugcugaacgacauccucucccgccuggacaaggucgaggccgaggugcagaucgaccggcugaucaccgggcgccuccagagccugcagaccuacgugacccagcagcugauccgggcggccgagauccgcgccagcgccaaccucgccgcgaccaagauguccgagugcguccugggccagagcaagcggguggacuucugcggcaagggguaccaccugauguccuucccccagugcgccccgcacggcguggucuuccuccacgugacguacguccccgcccaggagaagaacuucaccaccgcccccgcgaucugccacgacgggaaggcccacuucccccgcgagggcguguucguguccaacgggacccacugguucgucacgcagcggaacuucuacgagccgcagaucaucaccaccgacaacaccuucgugagcggcaacugcgacguggucaucggcaucgugaacaacacgguguacgacccccugcagcccgagcuggacuccuucaaggaggagcucgacaaguacuucaagaaccacaccagccccgacgucgaccugggggacaucuccggcaucaacgccagcguggugaacauccagaaggagaucgaccgccugaacgaggucgccaagaaccucaacgagucccugaucgaccugcaggagcucgggaaguacgagcaguacaucaagggcgggggcgggagcgacaucgaccccuacaaggaguucggcagcuccuaccagcugcucaacuuccugccccuggacuucuuccccgaccucaacgcccugguggacaccgccaccgcgcuguacgaggaggagcucacggggcgcgagcacugcagcccccaccacaccgccauccggcaggcccuggucugcugggacgagcugaccaagcucaucgccuggauguccagcaacaucaccuccgagcagguccgcacgaucaucgugaaccacgucaacgacaccuggggccugaaggugcggcagagccugugguuccaccucuccugccugaccuucgggcagcacaccgugcaggaguuccuggucagcuucggcguguggauccgcacgcccgccccguaccggccgcccaacgcgccgauccucuccacccugccggagcacaccgugaucugcuga

SEQ ID NO: 11907 - RNA, 3924 nt, Artificial Sequence
  SARS-CoV-2/Wuhan/WIV05/2019__EPI_ISL_402128 spike protein CDS gc (1-1147) LumSynth construct
auguucguguuccugguccuccugccccuggugagcucccagugcgugaaccucaccacccgcacgcagcugccgcccgccuacaccaacagcuucacccggggcgucuacuaccccgacaagguguuccgcuccagcgugcugcacuccacccaggaccucuuccugcccuucuucagcaacgucacgugguuccacgccauccacguguccgggaccaacggcaccaagcgguucgacaacccggugcugcccuucaacgacggggucuacuucgcgagcaccgagaaguccaacaucauccgcggcuggaucuucgggacgacccucgacagcaagacccagucccugcugaucgugaacaacgccaccaacguggucaucaaggugugcgaguuccaguucugcaacgaccccuuccucggcguguacuaccacaagaacaacaagagcuggauggaguccgaguuccgggucuacagcuccgccaacaacugcacguucgaguacgugagccagcccuuccugauggaccuggagggcaagcaggggaacuucaagaaccuccgcgaguucguguucaagaacaucgacggcuacuucaagaucuacuccaagcacaccccgaucaaccugguccgggaccugccccagggguucagcgcccucgagccccugguggaccugcccaucggcaucaacaucacccgcuuccagacccuccuggcccugcaccgguccuaccucacgccgggggacagcagcuccggcuggaccgcgggcgccgccgccuacuacgugggguaccugcagccccgcaccuuccugcucaaguacaacgagaacggcaccaucacggacgcggucgacugcgcccuggacccccugagcgagaccaagugcacccucaaguccuucaccguggagaaggggaucuaccagacgagcaacuuccgggugcagcccaccgaguccaucguccgcuucccgaacaucaccaaccugugccccuucggcgagguguucaacgccacccgguucgccagcgucuacgccuggaaccgcaagcggaucuccaacugcguggcggacuacagcgugcuguacaacuccgccagcuucuccacguucaagugcuacggcgucagccccaccaagcucaacgaccugugcuucaccaacguguacgccgacuccuucgugauccgcggggacgagguccggcagaucgcccccggccagaccgggaagaucgccgacuacaacuacaagcugccggacgacuucacgggcugcgugaucgcguggaacagcaacaaccucgacuccaaggucgggggcaacuacaacuaccuguaccgccuguuccgcaagagcaaccucaagcccuucgagcgggacaucuccaccgagaucuaccaggccggcagcacccccugcaacgggguggagggcuucaacugcuacuucccccugcaguccuacggguuccagccgaccaacggcgugggguaccagcccuaccggguggucgugcugagcuucgagcuccugcacgcccccgccacggugugcggccccaagaaguccaccaaccuggucaagaacaagugcgugaacuucaacuucaacggccucaccgggaccggcgugcugaccgagagcaacaagaaguuccugccguuccagcaguucgggcgcgacaucgccgacacgaccgacgcgguccgcgacccccagacccuggagauccucgacaucacccccugcagcuucggcgggguguccgugaucacgccgggcaccaacaccagcaaccaggucgccgugcuguaccaggacgugaacugcaccgagguccccguggccauccacgccgaccagcugacgcccaccuggcggguguacuccaccggcagcaacgucuuccagacccgcgccgggugccucaucggcgcggagcacgugaacaacuccuacgagugcgacauccccaucggggccggcaucugcgccagcuaccagacgcagaccaacuccccgcggcgcgcccggagcguggcgucccagagcaucaucgccuacaccaugucccugggcgccgagaacagcgucgccuacuccaacaacagcaucgccauccccaccaacuucacgaucuccgugaccaccgagauccugcccgugagcaugaccaagacgagcgucgacugcaccauguacaucugcggggacuccaccgagugcagcaaccuccugcugcaguacggcuccuucugcacccagcucaaccgcgcgcugacggggaucgccguggagcaggacaagaacacccaggagguguucgcccaggucaagcagaucuacaagacgcccccgaucaaggacuucggcggguucaacuucagccagauccugcccgaccccuccaagcccagcaagcgguccuucaucgaggaccuccuguucaacaaggugacccuggccgacgccggcuucaucaagcaguacggcgacugccucggggacaucgcggcccgcgaccugaucugcgcccagaaguucaacggccugaccgugcucccgccccugcugaccgacgagaugaucgcccaguacaccagcgcccuccuggcggggaccaucacguccggcuggaccuucggggccggcgccgcccugcagauccccuucgcgaugcagauggccuaccgguucaacggcaucggggucacccagaacgugcucuacgagaaccagaagcugaucgccaaccaguucaacagcgccaucggcaagauccaggacucccugagcuccaccgccagcgcgcucgggaagcugcaggacguggucaaccagaacgcccaggcccugaacacgcucgugaagcagcuguccagcaacuucggcgccaucuccagcgugcugaacgacauccucucccgccuggacaaggucgaggccgaggugcagaucgaccggcugaucaccgggcgccuccagagccugcagaccuacgugacccagcagcugauccgggcggccgagauccgcgccagcgccaaccucgccgcgaccaagauguccgagugcguccugggccagagcaagcggguggacuucugcggcaagggguaccaccugauguccuucccccagagcgccccgcacggcguggucuuccuccacgugacguacguccccgcccaggagaagaacuucaccaccgcccccgcgaucugccacgacgggaaggcccacuucccccgcgagggcguguucguguccaacgggacccacugguucgucacgcagcggaacuucuacgagccgcagaucaucaccaccgacaacaccuucgugagcggcaacugcgacguggucaucggcaucgugaacaacacgguguacgacccccugcagcccgagcuggacuccggcggcgggagcgggggcgggcagaucuacgagggcaagcugaccgccgaggggcuccgcuucggcaucguggccagccgguucaaccacgcgcuggucgaccgccugguggagggggccaucgacgccaucgugcggcacggcgggcgcgaggaggacaucacccucguccgggugcccggcuccugggagaucccgguggccgccggcgagcuggcccgcaaggaggacaucgacgcggucaucgccaucggggugcugauccggggcgccacgccccacuucgacuacaucgccagcgagguguccaaggggcucgcggaccugagccuggagcuccgcaagcccaucaccuucggcgucaucaccgccgacacccuggagcaggccaucgagcgggccgggacgaagcacggcaacaagggcugggaggccgcgcuguccgccaucgagauggccaaccucuucaagagccugcgcuga

SEQ ID NO: 11908 - RNA, 3924 nt, Artificial Sequence
  SARS-CoV-2/Wuhan/WIV05/2019__EPI_ISL_402128 spike protein CDS gc (1-1147)(K986P_V987P) LumSynth construct
auguucguguuccugguccuccugccccuggugagcucccagugcgugaaccucaccacccgcacgcagcugccgcccgccuacaccaacagcuucacccggggcgucuacuaccccgacaagguguuccgcuccagcgugcugcacuccacccaggaccucuuccugcccuucuucagcaacgucacgugguuccacgccauccacguguccgggaccaacggcaccaagcgguucgacaacccggugcugcccuucaacgacggggucuacuucgcgagcaccgagaaguccaacaucauccgcggcuggaucuucgggacgacccucgacagcaagacccagucccugcugaucgugaacaacgccaccaacguggucaucaaggugugcgaguuccaguucugcaacgaccccuuccucggcguguacuaccacaagaacaacaagagcuggauggaguccgaguuccgggucuacagcuccgccaacaacugcacguucgaguacgugagccagcccuuccugauggaccuggagggcaagcaggggaacuucaagaaccuccgcgaguucguguucaagaacaucgacggcuacuucaagaucuacuccaagcacaccccgaucaaccugguccgggaccugccccagggguucagcgcccucgagccccugguggaccugcccaucggcaucaacaucacccgcuuccagacccuccuggcccugcaccgguccuaccucacgccgggggacagcagcuccggcuggaccgcgggcgccgccgccuacuacgugggguaccugcagccccgcaccuuccugcucaaguacaacgagaacggcaccaucacggacgcggucgacugcgcccuggacccccugagcgagaccaagugcacccucaaguccuucaccguggagaaggggaucuaccagacgagcaacuuccgggugcagcccaccgaguccaucguccgcuucccgaacaucaccaaccugugccccuucggcgagguguucaacgccacccgguucgccagcgucuacgccuggaaccgcaagcggaucuccaacugcguggcggacuacagcgugcuguacaacuccgccagcuucuccacguucaagugcuacggcgucagccccaccaagcucaacgaccugugcuucaccaacguguacgccgacuccuucgugauccgcggggacgagguccggcagaucgcccccggccagaccgggaagaucgccgacuacaacuacaagcugccggacgacuucacgggcugcgugaucgcguggaacagcaacaaccucgacuccaaggucgggggcaacuacaacuaccuguaccgccuguuccgcaagagcaaccucaagcccuucgagcgggacaucuccaccgagaucuaccaggccggcagcacccccugcaacgggguggagggcuucaacugcuacuucccccugcaguccuacggguuccagccgaccaacggcgugggguaccagcccuaccggguggucgugcugagcuucgagcuccugcacgcccccgccacggugugcggccccaagaaguccaccaaccuggucaagaacaagugcgugaacuucaacuucaacggccucaccgggaccggcgugcugaccgagagcaacaagaaguuccugccguuccagcaguucgggcgcgacaucgccgacacgaccgacgcgguccgcgacccccagacccuggagauccucgacaucacccccugcagcuucggcgggguguccgugaucacgccgggcaccaacaccagcaaccaggucgccgugcuguaccaggacgugaacugcaccgagguccccguggccauccacgccgaccagcugacgcccaccuggcggguguacuccaccggcagcaacgucuuccagacccgcgccgggugccucaucggcgcggagcacgugaacaacuccuacgagugcgacauccccaucggggccggcaucugcgccagcuaccagacgcagaccaacuccccgcggcgcgcccggagcguggcgucccagagcaucaucgccuacaccaugucccugggcgccgagaacagcgucgccuacuccaacaacagcaucgccauccccaccaacuucacgaucuccgugaccaccgagauccugcccgugagcaugaccaagacgagcgucgacugcaccauguacaucugcggggacuccaccgagugcagcaaccuccugcugcaguacggcuccuucugcacccagcucaaccgcgcgcugacggggaucgccguggagcaggacaagaacacccaggagguguucgcccaggucaagcagaucuacaagacgcccccgaucaaggacuucggcggguucaacuucagccagauccugcccgaccccuccaagcccagcaagcgguccuucaucgaggaccuccuguucaacaaggugacccuggccgacgccggcuucaucaagcaguacggcgacugccucggggacaucgcggcccgcgaccugaucugcgcccagaaguucaacggccugaccgugcucccgccccugcugaccgacgagaugaucgcccaguacaccagcgcccuccuggcggggaccaucacguccggcuggaccuucggggccggcgccgcccugcagauccccuucgcgaugcagauggccuaccgguucaacggcaucggggucacccagaacgugcucuacgagaaccagaagcugaucgccaaccaguucaacagcgccaucggcaagauccaggacucccugagcuccaccgccagcgcgcucgggaagcugcaggacguggucaaccagaacgcccaggcccugaacacgcucgugaagcagcuguccagcaacuucggcgccaucuccagcgugcugaacgacauccucucccgccuggacccgcccgaggccgaggugcagaucgaccggcugaucaccgggcgccuccagagccugcagaccuacgugacccagcagcugauccgggcggccgagauccgcgccagcgccaaccucgccgcgaccaagauguccgagugcguccugggccagagcaagcggguggacuucugcggcaagggguaccaccugauguccuucccccagagcgccccgcacggcguggucuuccuccacgugacguacguccccgcccaggagaagaacuucaccaccgcccccgcgaucugccacgacgggaaggcccacuucccccgcgagggcguguucguguccaacgggacccacugguucgucacgcagcggaacuucuacgagccgcagaucaucaccaccgacaacaccuucgugagcggcaacugcgacguggucaucggcaucgugaacaacacgguguacgacccccugcagcccgagcuggacuccggcggcgggagcgggggcgggcagaucuacgagggcaagcugaccgccgaggggcuccgcuucggcaucguggccagccgguucaaccacgcgcuggucgaccgccugguggagggggccaucgacgccaucgugcggcacggcgggcgcgaggaggacaucacccucguccgggugcccggcuccugggagaucccgguggccgccggcgagcuggcccgcaaggaggacaucgacgcggucaucgccaucggggugcugauccggggcgccacgccccacuucgacuacaucgccagcgagguguccaaggggcucgcggaccugagccuggagcuccgcaagcccaucaccuucggcgucaucaccgccgacacccuggagcaggccaucgagcgggccgggacgaagcacggcaacaagggcugggaggccgcgcuguccgccaucgagauggccaaccucuucaagagccugcgcuga

SEQ ID NO: 11909 - RNA, 3924 nt, Artificial Sequence
  SARS-CoV-2/Wuhan/WIV05/2019__EPI_ISL_402128 spike protein CDS gc (1-1147)(K986P_V987P_T887WN_A1020W) LumSynth construct
auguucguguuccugguccuccugccccuggugagcucccagugcgugaaccucaccacccgcacgcagcugccgcccgccuacaccaacagcuucacccggggcgucuacuaccccgacaagguguuccgcuccagcgugcugcacuccacccaggaccucuuccugcccuucuucagcaacgucacgugguuccacgccauccacguguccgggaccaacggcaccaagcgguucgacaacccggugcugcccuucaacgacggggucuacuucgcgagcaccgagaaguccaacaucauccgcggcuggaucuucgggacgacccucgacagcaagacccagucccugcugaucgugaacaacgccaccaacguggucaucaaggugugcgaguuccaguucugcaacgaccccuuccucggcguguacuaccacaagaacaacaagagcuggauggaguccgaguuccgggucuacagcuccgccaacaacugcacguucgaguacgugagccagcccuuccugauggaccuggagggcaagcaggggaacuucaagaaccuccgcgaguucguguucaagaacaucgacggcuacuucaagaucuacuccaagcacaccccgaucaaccugguccgggaccugccccagggguucagcgcccucgagccccugguggaccugcccaucggcaucaacaucacccgcuuccagacccuccuggcccugcaccgguccuaccucacgccgggggacagcagcuccggcuggaccgcgggcgccgccgccuacuacgugggguaccugcagccccgcaccuuccugcucaaguacaacgagaacggcaccaucacggacgcggucgacugcgcccuggacccccugagcgagaccaagugcacccucaaguccuucaccguggagaaggggaucuaccagacgagcaacuuccgggugcagcccaccgaguccaucguccgcuucccgaacaucaccaaccugugccccuucggcgagguguucaacgccacccgguucgccagcgucuacgccuggaaccgcaagcggaucuccaacugcguggcggacuacagcgugcuguacaacuccgccagcuucuccacguucaagugcuacggcgucagccccaccaagcucaacgaccugugcuucaccaacguguacgccgacuccuucgugauccgcggggacgagguccggcagaucgcccccggccagaccgggaagaucgccgacuacaacuacaagcugccggacgacuucacgggcugcgugaucgcguggaacagcaacaaccucgacuccaaggucgggggcaacuacaacuaccuguaccgccuguuccgcaagagcaaccucaagcccuucgagcgggacaucuccaccgagaucuaccaggccggcagcacccccugcaacgggguggagggcuucaacugcuacuucccccugcaguccuacggguuccagccgaccaacggcgugggguaccagcccuaccggguggucgugcugagcuucgagcuccugcacgcccccgccacggugugcggccccaagaaguccaccaaccuggucaagaacaagugcgugaacuucaacuucaacggccucaccgggaccggcgugcugaccgagagcaacaagaaguuccugccguuccagcaguucgggcgcgacaucgccgacacgaccgacgcgguccgcgacccccagacccuggagauccucgacaucacccccugcagcuucggcgggguguccgugaucacgccgggcaccaacaccagcaaccaggucgccgugcuguaccaggacgugaacugcaccgagguccccguggccauccacgccgaccagcugacgcccaccuggcggguguacuccaccggcagcaacgucuuccagacccgcgccgggugccucaucggcgcggagcacgugaacaacuccuacgagugcgacauccccaucggggccggcaucugcgccagcuaccagacgcagaccaacuccccgcggcgcgcccggagcguggcgucccagagcaucaucgccuacaccaugucccugggcgccgagaacagcgucgccuacuccaacaacagcaucgccauccccaccaacuucacgaucuccgugaccaccgagauccugcccgugagcaugaccaagacgagcgucgacugcaccauguacaucugcggggacuccaccgagugcagcaaccuccugcugcaguacggcuccuucugcacccagcucaaccgcgcgcugacggggaucgccguggagcaggacaagaacacccaggagguguucgcccaggucaagcagaucuacaagacgcccccgaucaaggacuucggcggguucaacuucagccagauccugcccgaccccuccaagcccagcaagcgguccuucaucgaggaccuccuguucaacaaggugacccuggccgacgccggcuucaucaagcaguacggcgacugccucggggacaucgcggcccgcgaccugaucugcgcccagaaguucaacggccugaccgugcucccgccccugcugaccgacgagaugaucgcccaguacaccagcgcccuccuggcggggaccaucacguccggcuggugguucggggccggcgccgcccugcagauccccuucgcgaugcagauggccuaccgguucaacggcaucggggucacccagaacgugcucuacgagaaccagaagcugaucgccaaccaguucaacagcgccaucggcaagauccaggacucccugagcuccaccgccagcgcgcucgggaagcugcaggacguggucaaccagaacgcccaggcccugaacacgcucgugaagcagcuguccagcaacuucggcgccaucuccagcgugcugaacgacauccucucccgccuggacccgcccgaggccgaggugcagaucgaccggcugaucaccgggcgccuccagagccugcagaccuacgugacccagcagcugauccgggcggccgagauccgcuggagcgccaaccucgccgcgaccaagauguccgagugcguccugggccagagcaagcggguggacuucugcggcaagggguaccaccugauguccuucccccagagcgccccgcacggcguggucuuccuccacgugacguacguccccgcccaggagaagaacuucaccaccgcccccgcgaucugccacgacgggaaggcccacuucccccgcgagggcguguucguguccaacgggacccacugguucgucacgcagcggaacuucuacgagccgcagaucaucaccaccgacaacaccuucgugagcggcaacugcgacguggucaucggcaucgugaacaacacgguguacgacccccugcagcccgagcuggacuccggcggcgggagcgggggcgggcagaucuacgagggcaagcugaccgccgaggggcuccgcuucggcaucguggccagccgguucaaccacgcgcuggucgaccgccugguggagggggccaucgacgccaucgugcggcacggcgggcgcgaggaggacaucacccucguccgggugcccggcuccugggagaucccgguggccgccggcgagcuggcccgcaaggaggacaucgacgcggucaucgccaucggggugcugauccggggcgccacgccccacuucgacuacaucgccagcgagguguccaaggggcucgcggaccugagccuggagcuccgcaagcccaucaccuucggcgucaucaccgccgacacccuggagcaggccaucgagcgggccgggacgaagcacggcaacaagggcugggaggccgcgcuguccgccaucgagauggccaaccucuucaagagccugcgcuga

SEQ ID NO: 11910 - RNA, 3924 nt, Artificial Sequence
  SARS-CoV-2/Wuhan/WIV05/2019__EPI_ISL_402128 spike protein CDS gc (1-1147)(K986P_V987P_P1069F) LumSynth construct
auguucguguuccugguccuccugccccuggugagcucccagugcgugaaccucaccacccgcacgcagcugccgcccgccuacaccaacagcuucacccggggcgucuacuaccccgacaagguguuccgcuccagcgugcugcacuccacccaggaccucuuccugcccuucuucagcaacgucacgugguuccacgccauccacguguccgggaccaacggcaccaagcgguucgacaacccggugcugcccuucaacgacggggucuacuucgcgagcaccgagaaguccaacaucauccgcggcuggaucuucgggacgacccucgacagcaagacccagucccugcugaucgugaacaacgccaccaacguggucaucaaggugugcgaguuccaguucugcaacgaccccuuccucggcguguacuaccacaagaacaacaagagcuggauggaguccgaguuccgggucuacagcuccgccaacaacugcacguucgaguacgugagccagcccuuccugauggaccuggagggcaagcaggggaacuucaagaaccuccgcgaguucguguucaagaacaucgacggcuacuucaagaucuacuccaagcacaccccgaucaaccugguccgggaccugccccagggguucagcgcccucgagccccugguggaccugcccaucggcaucaacaucacccgcuuccagacccuccuggcccugcaccgguccuaccucacgccgggggacagcagcuccggcuggaccgcgggcgccgccgccuacuacgugggguaccugcagccccgcaccuuccugcucaaguacaacgagaacggcaccaucacggacgcggucgacugcgcccuggacccccugagcgagaccaagugcacccucaaguccuucaccguggagaaggggaucuaccagacgagcaacuuccgggugcagcccaccgaguccaucguccgcuucccgaacaucaccaaccugugccccuucggcgagguguucaacgccacccgguucgccagcgucuacgccuggaaccgcaagcggaucuccaacugcguggcggacuacagcgugcuguacaacuccgccagcuucuccacguucaagugcuacggcgucagccccaccaagcucaacgaccugugcuucaccaacguguacgccgacuccuucgugauccgcggggacgagguccggcagaucgcccccggccagaccgggaagaucgccgacuacaacuacaagcugccggacgacuucacgggcugcgugaucgcguggaacagcaacaaccucgacuccaaggucgggggcaacuacaacuaccuguaccgccuguuccgcaagagcaaccucaagcccuucgagcgggacaucuccaccgagaucuaccaggccggcagcacccccugcaacgggguggagggcuucaacugcuacuucccccugcaguccuacggguuccagccgaccaacggcgugggguaccagcccuaccggguggucgugcugagcuucgagcuccugcacgcccccgccacggugugcggccccaagaaguccaccaaccuggucaagaacaagugcgugaacuucaacuucaacggccucaccgggaccggcgugcugaccgagagcaacaagaaguuccugccguuccagcaguucgggcgcgacaucgccgacacgaccgacgcgguccgcgacccccagacccuggagauccucgacaucacccccugcagcuucggcgggguguccgugaucacgccgggcaccaacaccagcaaccaggucgccgugcuguaccaggacgugaacugcaccgagguccccguggccauccacgccgaccagcugacgcccaccuggcggguguacuccaccggcagcaacgucuuccagacccgcgccgggugccucaucggcgcggagcacgugaacaacuccuacgagugcgacauccccaucggggccggcaucugcgccagcuaccagacgcagaccaacuccccgcggcgcgcccggagcguggcgucccagagcaucaucgccuacaccaugucccugggcgccgagaacagcgucgccuacuccaacaacagcaucgccauccccaccaacuucacgaucuccgugaccaccgagauccugcccgugagcaugaccaagacgagcgucgacugcaccauguacaucugcggggacuccaccgagugcagcaaccuccugcugcaguacggcuccuucugcacccagcucaaccgcgcgcugacggggaucgccguggagcaggacaagaacacccaggagguguucgcccaggucaagcagaucuacaagacgcccccgaucaaggacuucggcggguucaacuucagccagauccugcccgaccccuccaagcccagcaagcgguccuucaucgaggaccuccuguucaacaaggugacccuggccgacgccggcuucaucaagcaguacggcgacugccucggggacaucgcggcccgcgaccugaucugcgcccagaaguucaacggccugaccgugcucccgccccugcugaccgacgagaugaucgcccaguacaccagcgcccuccuggcggggaccaucacguccggcuggaccuucggggccggcgccgcccugcagauccccuucgcgaugcagauggccuaccgguucaacggcaucggggucacccagaacgugcucuacgagaaccagaagcugaucgccaaccaguucaacagcgccaucggcaagauccaggacucccugagcuccaccgccagcgcgcucgggaagcugcaggacguggucaaccagaacgcccaggcccugaacacgcucgugaagcagcuguccagcaacuucggcgccaucuccagcgugcugaacgacauccucucccgccuggacccgcccgaggccgaggugcagaucgaccggcugaucaccgggcgccuccagagccugcagaccuacgugacccagcagcugauccgggcggccgagauccgcgccagcgccaaccucgccgcgaccaagauguccgagugcguccugggccagagcaagcggguggacuucugcggcaagggguaccaccugauguccuucccccagagcgccccgcacggcguggucuuccuccacgugacguacgucuucgcccaggagaagaacuucaccaccgcccccgcgaucugccacgacgggaaggcccacuucccccgcgagggcguguucguguccaacgggacccacugguucgucacgcagcggaacuucuacgagccgcagaucaucaccaccgacaacaccuucgugagcggcaacugcgacguggucaucggcaucgugaacaacacgguguacgacccccugcagcccgagcuggacuccggcggcgggagcgggggcgggcagaucuacgagggcaagcugaccgccgaggggcuccgcuucggcaucguggccagccgguucaaccacgcgcuggucgaccgccugguggagggggccaucgacgccaucgugcggcacggcgggcgcgaggaggacaucacccucguccgggugcccggcuccugggagaucccgguggccgccggcgagcuggcccgcaaggaggacaucgacgcggucaucgccaucggggugcugauccggggcgccacgccccacuucgacuacaucgccagcgagguguccaaggggcucgcggaccugagccuggagcuccgcaagcccaucaccuucggcgucaucaccgccgacacccuggagcaggccaucgagcgggccgggacgaagcacggcaacaagggcugggaggccgcgcuguccgccaucgagauggccaaccucuucaagagccugcgcuga

SEQ ID NO: 11911 - RNA, 3924 nt, Artificial Sequence
  SARS-CoV-2/Wuhan/WIV05/2019__EPI_ISL_402128 spike protein CDS gc (1-1147)(K986P_V987P_ H1048Q_H1064N_ H1083N_H1101N) LumSynth construct
auguucguguuccugguccuccugccccuggugagcucccagugcgugaaccucaccacccgcacgcagcugccgcccgccuacaccaacagcuucacccggggcgucuacuaccccgacaagguguuccgcuccagcgugcugcacuccacccaggaccucuuccugcccuucuucagcaacgucacgugguuccacgccauccacguguccgggaccaacggcaccaagcgguucgacaacccggugcugcccuucaacgacggggucuacuucgcgagcaccgagaaguccaacaucauccgcggcuggaucuucgggacgacccucgacagcaagacccagucccugcugaucgugaacaacgccaccaacguggucaucaaggugugcgaguuccaguucugcaacgaccccuuccucggcguguacuaccacaagaacaacaagagcuggauggaguccgaguuccgggucuacagcuccgccaacaacugcacguucgaguacgugagccagcccuuccugauggaccuggagggcaagcaggggaacuucaagaaccuccgcgaguucguguucaagaacaucgacggcuacuucaagaucuacuccaagcacaccccgaucaaccugguccgggaccugccccagggguucagcgcccucgagccccugguggaccugcccaucggcaucaacaucacccgcuuccagacccuccuggcccugcaccgguccuaccucacgccgggggacagcagcuccggcuggaccgcgggcgccgccgccuacuacgugggguaccugcagccccgcaccuuccugcucaaguacaacgagaacggcaccaucacggacgcggucgacugcgcccuggacccccugagcgagaccaagugcacccucaaguccuucaccguggagaaggggaucuaccagacgagcaacuuccgggugcagcccaccgaguccaucguccgcuucccgaacaucaccaaccugugccccuucggcgagguguucaacgccacccgguucgccagcgucuacgccuggaaccgcaagcggaucuccaacugcguggcggacuacagcgugcuguacaacuccgccagcuucuccacguucaagugcuacggcgucagccccaccaagcucaacgaccugugcuucaccaacguguacgccgacuccuucgugauccgcggggacgagguccggcagaucgcccccggccagaccgggaagaucgccgacuacaacuacaagcugccggacgacuucacgggcugcgugaucgcguggaacagcaacaaccucgacuccaaggucgggggcaacuacaacuaccuguaccgccuguuccgcaagagcaaccucaagcccuucgagcgggacaucuccaccgagaucuaccaggccggcagcacccccugcaacgggguggagggcuucaacugcuacuucccccugcaguccuacggguuccagccgaccaacggcgugggguaccagcccuaccggguggucgugcugagcuucgagcuccugcacgcccccgccacggugugcggccccaagaaguccaccaaccuggucaagaacaagugcgugaacuucaacuucaacggccucaccgggaccggcgugcugaccgagagcaacaagaaguuccugccguuccagcaguucgggcgcgacaucgccgacacgaccgacgcgguccgcgacccccagacccuggagauccucgacaucacccccugcagcuucggcgggguguccgugaucacgccgggcaccaacaccagcaaccaggucgccgugcuguaccaggacgugaacugcaccgagguccccguggccauccacgccgaccagcugacgcccaccuggcggguguacuccaccggcagcaacgucuuccagacccgcgccgggugccucaucggcgcggagcacgugaacaacuccuacgagugcgacauccccaucggggccggcaucugcgccagcuaccagacgcagaccaacuccccgcggcgcgcccggagcguggcgucccagagcaucaucgccuacaccaugucccugggcgccgagaacagcgucgccuacuccaacaacagcaucgccauccccaccaacuucacgaucuccgugaccaccgagauccugcccgugagcaugaccaagacgagcgucgacugcaccauguacaucugcggggacuccaccgagugcagcaaccuccugcugcaguacggcuccuucugcacccagcucaaccgcgcgcugacggggaucgccguggagcaggacaagaacacccaggagguguucgcccaggucaagcagaucuacaagacgcccccgaucaaggacuucggcggguucaacuucagccagauccugcccgaccccuccaagcccagcaagcgguccuucaucgaggaccuccuguucaacaaggugacccuggccgacgccggcuucaucaagcaguacggcgacugccucggggacaucgcggcccgcgaccugaucugcgcccagaaguucaacggccugaccgugcucccgccccugcugaccgacgagaugaucgcccaguacaccagcgcccuccuggcggggaccaucacguccggcuggaccuucggggccggcgccgcccugcagauccccuucgcgaugcagauggccuaccgguucaacggcaucggggucacccagaacgugcucuacgagaaccagaagcugaucgccaaccaguucaacagcgccaucggcaagauccaggacucccugagcuccaccgccagcgcgcucgggaagcugcaggacguggucaaccagaacgcccaggcccugaacacgcucgugaagcagcuguccagcaacuucggcgccaucuccagcgugcugaacgacauccucucccgccuggacccgcccgaggccgaggugcagaucgaccggcugaucaccgggcgccuccagagccugcagaccuacgugacccagcagcugauccgggcggccgagauccgcgccagcgccaaccucgccgcgaccaagauguccgagugcguccugggccagagcaagcggguggacuucugcggcaagggguaccagcugauguccuucccccagagcgccccgcacggcguggucuuccucaacgugacguacguccccgcccaggagaagaacuucaccaccgcccccgcgaucugcaacgacgggaaggcccacuucccccgcgagggcguguucguguccaacgggaccaacugguucgucacgcagcggaacuucuacgagccgcagaucaucaccaccgacaacaccuucgugagcggcaacugcgacguggucaucggcaucgugaacaacacgguguacgacccccugcagcccgagcuggacuccggcggcgggagcgggggcgggcagaucuacgagggcaagcugaccgccgaggggcuccgcuucggcaucguggccagccgguucaaccacgcgcuggucgaccgccugguggagggggccaucgacgccaucgugcggcacggcgggcgcgaggaggacaucacccucguccgggugcccggcuccugggagaucccgguggccgccggcgagcuggcccgcaaggaggacaucgacgcggucaucgccaucggggugcugauccggggcgccacgccccacuucgacuacaucgccagcgagguguccaaggggcucgcggaccugagccuggagcuccgcaagcccaucaccuucggcgucaucaccgccgacacccuggagcaggccaucgagcgggccgggacgaagcacggcaacaagggcugggaggccgcgcuguccgccaucgagauggccaaccucuucaagagccugcgcuga

SEQ ID NO: 11912 - RNA, 3924 nt, Artificial Sequence
  SARS-CoV-2/Wuhan/WIV05/2019__EPI_ISL_402128 spike protein CDS gc (1-1147)(I712C_T1077C) LumSynth construct
auguucguguuccugguccuccugccccuggugagcucccagugcgugaaccucaccacccgcacgcagcugccgcccgccuacaccaacagcuucacccggggcgucuacuaccccgacaagguguuccgcuccagcgugcugcacuccacccaggaccucuuccugcccuucuucagcaacgucacgugguuccacgccauccacguguccgggaccaacggcaccaagcgguucgacaacccggugcugcccuucaacgacggggucuacuucgcgagcaccgagaaguccaacaucauccgcggcuggaucuucgggacgacccucgacagcaagacccagucccugcugaucgugaacaacgccaccaacguggucaucaaggugugcgaguuccaguucugcaacgaccccuuccucggcguguacuaccacaagaacaacaagagcuggauggaguccgaguuccgggucuacagcuccgccaacaacugcacguucgaguacgugagccagcccuuccugauggaccuggagggcaagcaggggaacuucaagaaccuccgcgaguucguguucaagaacaucgacggcuacuucaagaucuacuccaagcacaccccgaucaaccugguccgggaccugccccagggguucagcgcccucgagccccugguggaccugcccaucggcaucaacaucacccgcuuccagacccuccuggcccugcaccgguccuaccucacgccgggggacagcagcuccggcuggaccgcgggcgccgccgccuacuacgugggguaccugcagccccgcaccuuccugcucaaguacaacgagaacggcaccaucacggacgcggucgacugcgcccuggacccccugagcgagaccaagugcacccucaaguccuucaccguggagaaggggaucuaccagacgagcaacuuccgggugcagcccaccgaguccaucguccgcuucccgaacaucaccaaccugugccccuucggcgagguguucaacgccacccgguucgccagcgucuacgccuggaaccgcaagcggaucuccaacugcguggcggacuacagcgugcuguacaacuccgccagcuucuccacguucaagugcuacggcgucagccccaccaagcucaacgaccugugcuucaccaacguguacgccgacuccuucgugauccgcggggacgagguccggcagaucgcccccggccagaccgggaagaucgccgacuacaacuacaagcugccggacgacuucacgggcugcgugaucgcguggaacagcaacaaccucgacuccaaggucgggggcaacuacaacuaccuguaccgccuguuccgcaagagcaaccucaagcccuucgagcgggacaucuccaccgagaucuaccaggccggcagcacccccugcaacgggguggagggcuucaacugcuacuucccccugcaguccuacggguuccagccgaccaacggcgugggguaccagcccuaccggguggucgugcugagcuucgagcuccugcacgcccccgccacggugugcggccccaagaaguccaccaaccuggucaagaacaagugcgugaacuucaacuucaacggccucaccgggaccggcgugcugaccgagagcaacaagaaguuccugccguuccagcaguucgggcgcgacaucgccgacacgaccgacgcgguccgcgacccccagacccuggagauccucgacaucacccccugcagcuucggcgggguguccgugaucacgccgggcaccaacaccagcaaccaggucgccgugcuguaccaggacgugaacugcaccgagguccccguggccauccacgccgaccagcugacgcccaccuggcggguguacuccaccggcagcaacgucuuccagacccgcgccgggugccucaucggcgcggagcacgugaacaacuccuacgagugcgacauccccaucggggccggcaucugcgccagcuaccagacgcagaccaacuccccgcggcgcgcccggagcguggcgucccagagcaucaucgccuacaccaugucccugggcgccgagaacagcgucgccuacuccaacaacagcugcgccauccccaccaacuucacgaucuccgugaccaccgagauccugcccgugagcaugaccaagacgagcgucgacugcaccauguacaucugcggggacuccaccgagugcagcaaccuccugcugcaguacggcuccuucugcacccagcucaaccgcgcgcugacggggaucgccguggagcaggacaagaacacccaggagguguucgcccaggucaagcagaucuacaagacgcccccgaucaaggacuucggcggguucaacuucagccagauccugcccgaccccuccaagcccagcaagcgguccuucaucgaggaccuccuguucaacaaggugacccuggccgacgccggcuucaucaagcaguacggcgacugccucggggacaucgcggcccgcgaccugaucugcgcccagaaguucaacggccugaccgugcucccgccccugcugaccgacgagaugaucgcccaguacaccagcgcccuccuggcggggaccaucacguccggcuggaccuucggggccggcgccgcccugcagauccccuucgcgaugcagauggccuaccgguucaacggcaucggggucacccagaacgugcucuacgagaaccagaagcugaucgccaaccaguucaacagcgccaucggcaagauccaggacucccugagcuccaccgccagcgcgcucgggaagcugcaggacguggucaaccagaacgcccaggcccugaacacgcucgugaagcagcuguccagcaacuucggcgccaucuccagcgugcugaacgacauccucucccgccuggacaaggucgaggccgaggugcagaucgaccggcugaucaccgggcgccuccagagccugcagaccuacgugacccagcagcugauccgggcggccgagauccgcgccagcgccaaccucgccgcgaccaagauguccgagugcguccugggccagagcaagcggguggacuucugcggcaagggguaccaccugauguccuucccccagagcgccccgcacggcguggucuuccuccacgugacguacguccccgcccaggagaagaacuucaccugcgcccccgcgaucugccacgacgggaaggcccacuucccccgcgagggcguguucguguccaacgggacccacugguucgucacgcagcggaacuucuacgagccgcagaucaucaccaccgacaacaccuucgugagcggcaacugcgacguggucaucggcaucgugaacaacacgguguacgacccccugcagcccgagcuggacuccggcggcgggagcgggggcgggcagaucuacgagggcaagcugaccgccgaggggcuccgcuucggcaucguggccagccgguucaaccacgcgcuggucgaccgccugguggagggggccaucgacgccaucgugcggcacggcgggcgcgaggaggacaucacccucguccgggugcccggcuccugggagaucccgguggccgccggcgagcuggcccgcaaggaggacaucgacgcggucaucgccaucggggugcugauccggggcgccacgccccacuucgacuacaucgccagcgagguguccaaggggcucgcggaccugagccuggagcuccgcaagcccaucaccuucggcgucaucaccgccgacacccuggagcaggccaucgagcgggccgggacgaagcacggcaacaagggcugggaggccgcgcuguccgccaucgagauggccaaccucuucaagagccugcgcuga

SEQ ID NO: 11913 - RNA, 3924 nt, Artificial Sequence
  SARS-CoV-2/Wuhan/WIV05/2019__EPI_ISL_402128 spike protein CDS gc (1-1147)(I714C_Y1110C) LumSynth construct
auguucguguuccugguccuccugccccuggugagcucccagugcgugaaccucaccacccgcacgcagcugccgcccgccuacaccaacagcuucacccggggcgucuacuaccccgacaagguguuccgcuccagcgugcugcacuccacccaggaccucuuccugcccuucuucagcaacgucacgugguuccacgccauccacguguccgggaccaacggcaccaagcgguucgacaacccggugcugcccuucaacgacggggucuacuucgcgagcaccgagaaguccaacaucauccgcggcuggaucuucgggacgacccucgacagcaagacccagucccugcugaucgugaacaacgccaccaacguggucaucaaggugugcgaguuccaguucugcaacgaccccuuccucggcguguacuaccacaagaacaacaagagcuggauggaguccgaguuccgggucuacagcuccgccaacaacugcacguucgaguacgugagccagcccuuccugauggaccuggagggcaagcaggggaacuucaagaaccuccgcgaguucguguucaagaacaucgacggcuacuucaagaucuacuccaagcacaccccgaucaaccugguccgggaccugccccagggguucagcgcccucgagccccugguggaccugcccaucggcaucaacaucacccgcuuccagacccuccuggcccugcaccgguccuaccucacgccgggggacagcagcuccggcuggaccgcgggcgccgccgccuacuacgugggguaccugcagccccgcaccuuccugcucaaguacaacgagaacggcaccaucacggacgcggucgacugcgcccuggacccccugagcgagaccaagugcacccucaaguccuucaccguggagaaggggaucuaccagacgagcaacuuccgggugcagcccaccgaguccaucguccgcuucccgaacaucaccaaccugugccccuucggcgagguguucaacgccacccgguucgccagcgucuacgccuggaaccgcaagcggaucuccaacugcguggcggacuacagcgugcuguacaacuccgccagcuucuccacguucaagugcuacggcgucagccccaccaagcucaacgaccugugcuucaccaacguguacgccgacuccuucgugauccgcggggacgagguccggcagaucgcccccggccagaccgggaagaucgccgacuacaacuacaagcugccggacgacuucacgggcugcgugaucgcguggaacagcaacaaccucgacuccaaggucgggggcaacuacaacuaccuguaccgccuguuccgcaagagcaaccucaagcccuucgagcgggacaucuccaccgagaucuaccaggccggcagcacccccugcaacgggguggagggcuucaacugcuacuucccccugcaguccuacggguuccagccgaccaacggcgugggguaccagcccuaccggguggucgugcugagcuucgagcuccugcacgcccccgccacggugugcggccccaagaaguccaccaaccuggucaagaacaagugcgugaacuucaacuucaacggccucaccgggaccggcgugcugaccgagagcaacaagaaguuccugccguuccagcaguucgggcgcgacaucgccgacacgaccgacgcgguccgcgacccccagacccuggagauccucgacaucacccccugcagcuucggcgggguguccgugaucacgccgggcaccaacaccagcaaccaggucgccgugcuguaccaggacgugaacugcaccgagguccccguggccauccacgccgaccagcugacgcccaccuggcggguguacuccaccggcagcaacgucuuccagacccgcgccgggugccucaucggcgcggagcacgugaacaacuccuacgagugcgacauccccaucggggccggcaucugcgccagcuaccagacgcagaccaacuccccgcggcgcgcccggagcguggcgucccagagcaucaucgccuacaccaugucccugggcgccgagaacagcgucgccuacuccaacaacagcaucgccugccccaccaacuucacgaucuccgugaccaccgagauccugcccgugagcaugaccaagacgagcgucgacugcaccauguacaucugcggggacuccaccgagugcagcaaccuccugcugcaguacggcuccuucugcacccagcucaaccgcgcgcugacggggaucgccguggagcaggacaagaacacccaggagguguucgcccaggucaagcagaucuacaagacgcccccgaucaaggacuucggcggguucaacuucagccagauccugcccgaccccuccaagcccagcaagcgguccuucaucgaggaccuccuguucaacaaggugacccuggccgacgccggcuucaucaagcaguacggcgacugccucggggacaucgcggcccgcgaccugaucugcgcccagaaguucaacggccugaccgugcucccgccccugcugaccgacgagaugaucgcccaguacaccagcgcccuccuggcggggaccaucacguccggcuggaccuucggggccggcgccgcccugcagauccccuucgcgaugcagauggccuaccgguucaacggcaucggggucacccagaacgugcucuacgagaaccagaagcugaucgccaaccaguucaacagcgccaucggcaagauccaggacucccugagcuccaccgccagcgcgcucgggaagcugcaggacguggucaaccagaacgcccaggcccugaacacgcucgugaagcagcuguccagcaacuucggcgccaucuccagcgugcugaacgacauccucucccgccuggacaaggucgaggccgaggugcagaucgaccggcugaucaccgggcgccuccagagccugcagaccuacgugacccagcagcugauccgggcggccgagauccgcgccagcgccaaccucgccgcgaccaagauguccgagugcguccugggccagagcaagcggguggacuucugcggcaagggguaccaccugauguccuucccccagagcgccccgcacggcguggucuuccuccacgugacguacguccccgcccaggagaagaacuucaccaccgcccccgcgaucugccacgacgggaaggcccacuucccccgcgagggcguguucguguccaacgggacccacugguucgucacgcagcggaacuucugcgagccgcagaucaucaccaccgacaacaccuucgugagcggcaacugcgacguggucaucggcaucgugaacaacacgguguacgacccccugcagcccgagcuggacuccggcggcgggagcgggggcgggcagaucuacgagggcaagcugaccgccgaggggcuccgcuucggcaucguggccagccgguucaaccacgcgcuggucgaccgccugguggagggggccaucgacgccaucgugcggcacggcgggcgcgaggaggacaucacccucguccgggugcccggcuccugggagaucccgguggccgccggcgagcuggcccgcaaggaggacaucgacgcggucaucgccaucggggugcugauccggggcgccacgccccacuucgacuacaucgccagcgagguguccaaggggcucgcggaccugagccuggagcuccgcaagcccaucaccuucggcgucaucaccgccgacacccuggagcaggccaucgagcgggccgggacgaagcacggcaacaagggcugggaggccgcgcuguccgccaucgagauggccaaccucuucaagagccugcgcuga

SEQ ID NO: 11914 - RNA, 3924 nt, Artificial Sequence
  SARS-CoV-2/Wuhan/WIV05/2019__EPI_ISL_402128 spike protein CDS gc (1-1147)(P715C_P1069C) LumSynth construct
auguucguguuccugguccuccugccccuggugagcucccagugcgugaaccucaccacccgcacgcagcugccgcccgccuacaccaacagcuucacccggggcgucuacuaccccgacaagguguuccgcuccagcgugcugcacuccacccaggaccucuuccugcccuucuucagcaacgucacgugguuccacgccauccacguguccgggaccaacggcaccaagcgguucgacaacccggugcugcccuucaacgacggggucuacuucgcgagcaccgagaaguccaacaucauccgcggcuggaucuucgggacgacccucgacagcaagacccagucccugcugaucgugaacaacgccaccaacguggucaucaaggugugcgaguuccaguucugcaacgaccccuuccucggcguguacuaccacaagaacaacaagagcuggauggaguccgaguuccgggucuacagcuccgccaacaacugcacguucgaguacgugagccagcccuuccugauggaccuggagggcaagcaggggaacuucaagaaccuccgcgaguucguguucaagaacaucgacggcuacuucaagaucuacuccaagcacaccccgaucaaccugguccgggaccugccccagggguucagcgcccucgagccccugguggaccugcccaucggcaucaacaucacccgcuuccagacccuccuggcccugcaccgguccuaccucacgccgggggacagcagcuccggcuggaccgcgggcgccgccgccuacuacgugggguaccugcagccccgcaccuuccugcucaaguacaacgagaacggcaccaucacggacgcggucgacugcgcccuggacccccugagcgagaccaagugcacccucaaguccuucaccguggagaaggggaucuaccagacgagcaacuuccgggugcagcccaccgaguccaucguccgcuucccgaacaucaccaaccugugccccuucggcgagguguucaacgccacccgguucgccagcgucuacgccuggaaccgcaagcggaucuccaacugcguggcggacuacagcgugcuguacaacuccgccagcuucuccacguucaagugcuacggcgucagccccaccaagcucaacgaccugugcuucaccaacguguacgccgacuccuucgugauccgcggggacgagguccggcagaucgcccccggccagaccgggaagaucgccgacuacaacuacaagcugccggacgacuucacgggcugcgugaucgcguggaacagcaacaaccucgacuccaaggucgggggcaacuacaacuaccuguaccgccuguuccgcaagagcaaccucaagcccuucgagcgggacaucuccaccgagaucuaccaggccggcagcacccccugcaacgggguggagggcuucaacugcuacuucccccugcaguccuacggguuccagccgaccaacggcgugggguaccagcccuaccggguggucgugcugagcuucgagcuccugcacgcccccgccacggugugcggccccaagaaguccaccaaccuggucaagaacaagugcgugaacuucaacuucaacggccucaccgggaccggcgugcugaccgagagcaacaagaaguuccugccguuccagcaguucgggcgcgacaucgccgacacgaccgacgcgguccgcgacccccagacccuggagauccucgacaucacccccugcagcuucggcgggguguccgugaucacgccgggcaccaacaccagcaaccaggucgccgugcuguaccaggacgugaacugcaccgagguccccguggccauccacgccgaccagcugacgcccaccuggcggguguacuccaccggcagcaacgucuuccagacccgcgccgggugccucaucggcgcggagcacgugaacaacuccuacgagugcgacauccccaucggggccggcaucugcgccagcuaccagacgcagaccaacuccccgcggcgcgcccggagcguggcgucccagagcaucaucgccuacaccaugucccugggcgccgagaacagcgucgccuacuccaacaacagcaucgccaucugcaccaacuucacgaucuccgugaccaccgagauccugcccgugagcaugaccaagacgagcgucgacugcaccauguacaucugcggggacuccaccgagugcagcaaccuccugcugcaguacggcuccuucugcacccagcucaaccgcgcgcugacggggaucgccguggagcaggacaagaacacccaggagguguucgcccaggucaagcagaucuacaagacgcccccgaucaaggacuucggcggguucaacuucagccagauccugcccgaccccuccaagcccagcaagcgguccuucaucgaggaccuccuguucaacaaggugacccuggccgacgccggcuucaucaagcaguacggcgacugccucggggacaucgcggcccgcgaccugaucugcgcccagaaguucaacggccugaccgugcucccgccccugcugaccgacgagaugaucgcccaguacaccagcgcccuccuggcggggaccaucacguccggcuggaccuucggggccggcgccgcccugcagauccccuucgcgaugcagauggccuaccgguucaacggcaucggggucacccagaacgugcucuacgagaaccagaagcugaucgccaaccaguucaacagcgccaucggcaagauccaggacucccugagcuccaccgccagcgcgcucgggaagcugcaggacguggucaaccagaacgcccaggcccugaacacgcucgugaagcagcuguccagcaacuucggcgccaucuccagcgugcugaacgacauccucucccgccuggacaaggucgaggccgaggugcagaucgaccggcugaucaccgggcgccuccagagccugcagaccuacgugacccagcagcugauccgggcggccgagauccgcgccagcgccaaccucgccgcgaccaagauguccgagugcguccugggccagagcaagcggguggacuucugcggcaagggguaccaccugauguccuucccccagagcgccccgcacggcguggucuuccuccacgugacguacgucugcgcccaggagaagaacuucaccaccgcccccgcgaucugccacgacgggaaggcccacuucccccgcgagggcguguucguguccaacgggacccacugguucgucacgcagcggaacuucuacgagccgcagaucaucaccaccgacaacaccuucgugagcggcaacugcgacguggucaucggcaucgugaacaacacgguguacgacccccugcagcccgagcuggacuccggcggcgggagcgggggcgggcagaucuacgagggcaagcugaccgccgaggggcuccgcuucggcaucguggccagccgguucaaccacgcgcuggucgaccgccugguggagggggccaucgacgccaucgugcggcacggcgggcgcgaggaggacaucacccucguccgggugcccggcuccugggagaucccgguggccgccggcgagcuggcccgcaaggaggacaucgacgcggucaucgccaucggggugcugauccggggcgccacgccccacuucgacuacaucgccagcgagguguccaaggggcucgcggaccugagccuggagcuccgcaagcccaucaccuucggcgucaucaccgccgacacccuggagcaggccaucgagcgggccgggacgaagcacggcaacaagggcugggaggccgcgcuguccgccaucgagauggccaaccucuucaagagccugcgcuga

SEQ ID NO: 11915 - RNA, 3924 nt, Artificial Sequence
  SARS-CoV-2/Wuhan/WIV05/2019__EPI_ISL_402128 spike protein CDS gc (1-1147)(G889C_L1034C) LumSynth construct
auguucguguuccugguccuccugccccuggugagcucccagugcgugaaccucaccacccgcacgcagcugccgcccgccuacaccaacagcuucacccggggcgucuacuaccccgacaagguguuccgcuccagcgugcugcacuccacccaggaccucuuccugcccuucuucagcaacgucacgugguuccacgccauccacguguccgggaccaacggcaccaagcgguucgacaacccggugcugcccuucaacgacggggucuacuucgcgagcaccgagaaguccaacaucauccgcggcuggaucuucgggacgacccucgacagcaagacccagucccugcugaucgugaacaacgccaccaacguggucaucaaggugugcgaguuccaguucugcaacgaccccuuccucggcguguacuaccacaagaacaacaagagcuggauggaguccgaguuccgggucuacagcuccgccaacaacugcacguucgaguacgugagccagcccuuccugauggaccuggagggcaagcaggggaacuucaagaaccuccgcgaguucguguucaagaacaucgacggcuacuucaagaucuacuccaagcacaccccgaucaaccugguccgggaccugccccagggguucagcgcccucgagccccugguggaccugcccaucggcaucaacaucacccgcuuccagacccuccuggcccugcaccgguccuaccucacgccgggggacagcagcuccggcuggaccgcgggcgccgccgccuacuacgugggguaccugcagccccgcaccuuccugcucaaguacaacgagaacggcaccaucacggacgcggucgacugcgcccuggacccccugagcgagaccaagugcacccucaaguccuucaccguggagaaggggaucuaccagacgagcaacuuccgggugcagcccaccgaguccaucguccgcuucccgaacaucaccaaccugugccccuucggcgagguguucaacgccacccgguucgccagcgucuacgccuggaaccgcaagcggaucuccaacugcguggcggacuacagcgugcuguacaacuccgccagcuucuccacguucaagugcuacggcgucagccccaccaagcucaacgaccugugcuucaccaacguguacgccgacuccuucgugauccgcggggacgagguccggcagaucgcccccggccagaccgggaagaucgccgacuacaacuacaagcugccggacgacuucacgggcugcgugaucgcguggaacagcaacaaccucgacuccaaggucgggggcaacuacaacuaccuguaccgccuguuccgcaagagcaaccucaagcccuucgagcgggacaucuccaccgagaucuaccaggccggcagcacccccugcaacgggguggagggcuucaacugcuacuucccccugcaguccuacggguuccagccgaccaacggcgugggguaccagcccuaccggguggucgugcugagcuucgagcuccugcacgcccccgccacggugugcggccccaagaaguccaccaaccuggucaagaacaagugcgugaacuucaacuucaacggccucaccgggaccggcgugcugaccgagagcaacaagaaguuccugccguuccagcaguucgggcgcgacaucgccgacacgaccgacgcgguccgcgacccccagacccuggagauccucgacaucacccccugcagcuucggcgggguguccgugaucacgccgggcaccaacaccagcaaccaggucgccgugcuguaccaggacgugaacugcaccgagguccccguggccauccacgccgaccagcugacgcccaccuggcggguguacuccaccggcagcaacgucuuccagacccgcgccgggugccucaucggcgcggagcacgugaacaacuccuacgagugcgacauccccaucggggccggcaucugcgccagcuaccagacgcagaccaacuccccgcggcgcgcccggagcguggcgucccagagcaucaucgccuacaccaugucccugggcgccgagaacagcgucgccuacuccaacaacagcaucgccauccccaccaacuucacgaucuccgugaccaccgagauccugcccgugagcaugaccaagacgagcgucgacugcaccauguacaucugcggggacuccaccgagugcagcaaccuccugcugcaguacggcuccuucugcacccagcucaaccgcgcgcugacggggaucgccguggagcaggacaagaacacccaggagguguucgcccaggucaagcagaucuacaagacgcccccgaucaaggacuucggcggguucaacuucagccagauccugcccgaccccuccaagcccagcaagcgguccuucaucgaggaccuccuguucaacaaggugacccuggccgacgccggcuucaucaagcaguacggcgacugccucggggacaucgcggcccgcgaccugaucugcgcccagaaguucaacggccugaccgugcucccgccccugcugaccgacgagaugaucgcccaguacaccagcgcccuccuggcggggaccaucacguccggcuggaccuucugcgccggcgccgcccugcagauccccuucgcgaugcagauggccuaccgguucaacggcaucggggucacccagaacgugcucuacgagaaccagaagcugaucgccaaccaguucaacagcgccaucggcaagauccaggacucccugagcuccaccgccagcgcgcucgggaagcugcaggacguggucaaccagaacgcccaggcccugaacacgcucgugaagcagcuguccagcaacuucggcgccaucuccagcgugcugaacgacauccucucccgccuggacaaggucgaggccgaggugcagaucgaccggcugaucaccgggcgccuccagagccugcagaccuacgugacccagcagcugauccgggcggccgagauccgcgccagcgccaaccucgccgcgaccaagauguccgagugcgucugcggccagagcaagcggguggacuucugcggcaagggguaccaccugauguccuucccccagagcgccccgcacggcguggucuuccuccacgugacguacguccccgcccaggagaagaacuucaccaccgcccccgcgaucugccacgacgggaaggcccacuucccccgcgagggcguguucguguccaacgggacccacugguucgucacgcagcggaacuucuacgagccgcagaucaucaccaccgacaacaccuucgugagcggcaacugcgacguggucaucggcaucgugaacaacacgguguacgacccccugcagcccgagcuggacuccggcggcgggagcgggggcgggcagaucuacgagggcaagcugaccgccgaggggcuccgcuucggcaucguggccagccgguucaaccacgcgcuggucgaccgccugguggagggggccaucgacgccaucgugcggcacggcgggcgcgaggaggacaucacccucguccgggugcccggcuccugggagaucccgguggccgccggcgagcuggcccgcaaggaggacaucgacgcggucaucgccaucggggugcugauccggggcgccacgccccacuucgacuacaucgccagcgagguguccaaggggcucgcggaccugagccuggagcuccgcaagcccaucaccuucggcgucaucaccgccgacacccuggagcaggccaucgagcgggccgggacgaagcacggcaacaagggcugggaggccgcgcuguccgccaucgagauggccaaccucuucaagagccugcgcuga

SEQ ID NO: 11916 - RNA, 3924 nt, Artificial Sequence
  SARS-CoV-2/Wuhan/WIV05/2019__EPI_ISL_402128 spike protein CDS gc (1-1147)(I909C_Y1047C) LumSynth construct
auguucguguuccugguccuccugccccuggugagcucccagugcgugaaccucaccacccgcacgcagcugccgcccgccuacaccaacagcuucacccggggcgucuacuaccccgacaagguguuccgcuccagcgugcugcacuccacccaggaccucuuccugcccuucuucagcaacgucacgugguuccacgccauccacguguccgggaccaacggcaccaagcgguucgacaacccggugcugcccuucaacgacggggucuacuucgcgagcaccgagaaguccaacaucauccgcggcuggaucuucgggacgacccucgacagcaagacccagucccugcugaucgugaacaacgccaccaacguggucaucaaggugugcgaguuccaguucugcaacgaccccuuccucggcguguacuaccacaagaacaacaagagcuggauggaguccgaguuccgggucuacagcuccgccaacaacugcacguucgaguacgugagccagcccuuccugauggaccuggagggcaagcaggggaacuucaagaaccuccgcgaguucguguucaagaacaucgacggcuacuucaagaucuacuccaagcacaccccgaucaaccugguccgggaccugccccagggguucagcgcccucgagccccugguggaccugcccaucggcaucaacaucacccgcuuccagacccuccuggcccugcaccgguccuaccucacgccgggggacagcagcuccggcuggaccgcgggcgccgccgccuacuacgugggguaccugcagccccgcaccuuccugcucaaguacaacgagaacggcaccaucacggacgcggucgacugcgcccuggacccccugagcgagaccaagugcacccucaaguccuucaccguggagaaggggaucuaccagacgagcaacuuccgggugcagcccaccgaguccaucguccgcuucccgaacaucaccaaccugugccccuucggcgagguguucaacgccacccgguucgccagcgucuacgccuggaaccgcaagcggaucuccaacugcguggcggacuacagcgugcuguacaacuccgccagcuucuccacguucaagugcuacggcgucagccccaccaagcucaacgaccugugcuucaccaacguguacgccgacuccuucgugauccgcggggacgagguccggcagaucgcccccggccagaccgggaagaucgccgacuacaacuacaagcugccggacgacuucacgggcugcgugaucgcguggaacagcaacaaccucgacuccaaggucgggggcaacuacaacuaccuguaccgccuguuccgcaagagcaaccucaagcccuucgagcgggacaucuccaccgagaucuaccaggccggcagcacccccugcaacgggguggagggcuucaacugcuacuucccccugcaguccuacggguuccagccgaccaacggcgugggguaccagcccuaccggguggucgugcugagcuucgagcuccugcacgcccccgccacggugugcggccccaagaaguccaccaaccuggucaagaacaagugcgugaacuucaacuucaacggccucaccgggaccggcgugcugaccgagagcaacaagaaguuccugccguuccagcaguucgggcgcgacaucgccgacacgaccgacgcgguccgcgacccccagacccuggagauccucgacaucacccccugcagcuucggcgggguguccgugaucacgccgggcaccaacaccagcaaccaggucgccgugcuguaccaggacgugaacugcaccgagguccccguggccauccacgccgaccagcugacgcccaccuggcggguguacuccaccggcagcaacgucuuccagacccgcgccgggugccucaucggcgcggagcacgugaacaacuccuacgagugcgacauccccaucggggccggcaucugcgccagcuaccagacgcagaccaacuccccgcggcgcgcccggagcguggcgucccagagcaucaucgccuacaccaugucccugggcgccgagaacagcgucgccuacuccaacaacagcaucgccauccccaccaacuucacgaucuccgugaccaccgagauccugcccgugagcaugaccaagacgagcgucgacugcaccauguacaucugcggggacuccaccgagugcagcaaccuccugcugcaguacggcuccuucugcacccagcucaaccgcgcgcugacggggaucgccguggagcaggacaagaacacccaggagguguucgcccaggucaagcagaucuacaagacgcccccgaucaaggacuucggcggguucaacuucagccagauccugcccgaccccuccaagcccagcaagcgguccuucaucgaggaccuccuguucaacaaggugacccuggccgacgccggcuucaucaagcaguacggcgacugccucggggacaucgcggcccgcgaccugaucugcgcccagaaguucaacggccugaccgugcucccgccccugcugaccgacgagaugaucgcccaguacaccagcgcccuccuggcggggaccaucacguccggcuggaccuucggggccggcgccgcccugcagauccccuucgcgaugcagauggccuaccgguucaacggcugcggggucacccagaacgugcucuacgagaaccagaagcugaucgccaaccaguucaacagcgccaucggcaagauccaggacucccugagcuccaccgccagcgcgcucgggaagcugcaggacguggucaaccagaacgcccaggcccugaacacgcucgugaagcagcuguccagcaacuucggcgccaucuccagcgugcugaacgacauccucucccgccuggacaaggucgaggccgaggugcagaucgaccggcugaucaccgggcgccuccagagccugcagaccuacgugacccagcagcugauccgggcggccgagauccgcgccagcgccaaccucgccgcgaccaagauguccgagugcguccugggccagagcaagcggguggacuucugcggcaaggggugccaccugauguccuucccccagagcgccccgcacggcguggucuuccuccacgugacguacguccccgcccaggagaagaacuucaccaccgcccccgcgaucugccacgacgggaaggcccacuucccccgcgagggcguguucguguccaacgggacccacugguucgucacgcagcggaacuucuacgagccgcagaucaucaccaccgacaacaccuucgugagcggcaacugcgacguggucaucggcaucgugaacaacacgguguacgacccccugcagcccgagcuggacuccggcggcgggagcgggggcgggcagaucuacgagggcaagcugaccgccgaggggcuccgcuucggcaucguggccagccgguucaaccacgcgcuggucgaccgccugguggagggggccaucgacgccaucgugcggcacggcgggcgcgaggaggacaucacccucguccgggugcccggcuccugggagaucccgguggccgccggcgagcuggcccgcaaggaggacaucgacgcggucaucgccaucggggugcugauccggggcgccacgccccacuucgacuacaucgccagcgagguguccaaggggcucgcggaccugagccuggagcuccgcaagcccaucaccuucggcgucaucaccgccgacacccuggagcaggccaucgagcgggccgggacgaagcacggcaacaagggcugggaggccgcgcuguccgccaucgagauggccaaccucuucaagagccugcgcuga

SEQ ID NO: 11917 - RNA, 3924 nt, Artificial Sequence
  SARS-CoV-2/Wuhan/WIV05/2019__EPI_ISL_402128 spike protein CDS gc (1-1147)(Q965C_S1003C) LumSynth construct
auguucguguuccugguccuccugccccuggugagcucccagugcgugaaccucaccacccgcacgcagcugccgcccgccuacaccaacagcuucacccggggcgucuacuaccccgacaagguguuccgcuccagcgugcugcacuccacccaggaccucuuccugcccuucuucagcaacgucacgugguuccacgccauccacguguccgggaccaacggcaccaagcgguucgacaacccggugcugcccuucaacgacggggucuacuucgcgagcaccgagaaguccaacaucauccgcggcuggaucuucgggacgacccucgacagcaagacccagucccugcugaucgugaacaacgccaccaacguggucaucaaggugugcgaguuccaguucugcaacgaccccuuccucggcguguacuaccacaagaacaacaagagcuggauggaguccgaguuccgggucuacagcuccgccaacaacugcacguucgaguacgugagccagcccuuccugauggaccuggagggcaagcaggggaacuucaagaaccuccgcgaguucguguucaagaacaucgacggcuacuucaagaucuacuccaagcacaccccgaucaaccugguccgggaccugccccagggguucagcgcccucgagccccugguggaccugcccaucggcaucaacaucacccgcuuccagacccuccuggcccugcaccgguccuaccucacgccgggggacagcagcuccggcuggaccgcgggcgccgccgccuacuacgugggguaccugcagccccgcaccuuccugcucaaguacaacgagaacggcaccaucacggacgcggucgacugcgcccuggacccccugagcgagaccaagugcacccucaaguccuucaccguggagaaggggaucuaccagacgagcaacuuccgggugcagcccaccgaguccaucguccgcuucccgaacaucaccaaccugugccccuucggcgagguguucaacgccacccgguucgccagcgucuacgccuggaaccgcaagcggaucuccaacugcguggcggacuacagcgugcuguacaacuccgccagcuucuccacguucaagugcuacggcgucagccccaccaagcucaacgaccugugcuucaccaacguguacgccgacuccuucgugauccgcggggacgagguccggcagaucgcccccggccagaccgggaagaucgccgacuacaacuacaagcugccggacgacuucacgggcugcgugaucgcguggaacagcaacaaccucgacuccaaggucgggggcaacuacaacuaccuguaccgccuguuccgcaagagcaaccucaagcccuucgagcgggacaucuccaccgagaucuaccaggccggcagcacccccugcaacgggguggagggcuucaacugcuacuucccccugcaguccuacggguuccagccgaccaacggcgugggguaccagcccuaccggguggucgugcugagcuucgagcuccugcacgcccccgccacggugugcggccccaagaaguccaccaaccuggucaagaacaagugcgugaacuucaacuucaacggccucaccgggaccggcgugcugaccgagagcaacaagaaguuccugccguuccagcaguucgggcgcgacaucgccgacacgaccgacgcgguccgcgacccccagacccuggagauccucgacaucacccccugcagcuucggcgggguguccgugaucacgccgggcaccaacaccagcaaccaggucgccgugcuguaccaggacgugaacugcaccgagguccccguggccauccacgccgaccagcugacgcccaccuggcggguguacuccaccggcagcaacgucuuccagacccgcgccgggugccucaucggcgcggagcacgugaacaacuccuacgagugcgacauccccaucggggccggcaucugcgccagcuaccagacgcagaccaacuccccgcggcgcgcccggagcguggcgucccagagcaucaucgccuacaccaugucccugggcgccgagaacagcgucgccuacuccaacaacagcaucgccauccccaccaacuucacgaucuccgugaccaccgagauccugcccgugagcaugaccaagacgagcgucgacugcaccauguacaucugcggggacuccaccgagugcagcaaccuccugcugcaguacggcuccuucugcacccagcucaaccgcgcgcugacggggaucgccguggagcaggacaagaacacccaggagguguucgcccaggucaagcagaucuacaagacgcccccgaucaaggacuucggcggguucaacuucagccagauccugcccgaccccuccaagcccagcaagcgguccuucaucgaggaccuccuguucaacaaggugacccuggccgacgccggcuucaucaagcaguacggcgacugccucggggacaucgcggcccgcgaccugaucugcgcccagaaguucaacggccugaccgugcucccgccccugcugaccgacgagaugaucgcccaguacaccagcgcccuccuggcggggaccaucacguccggcuggaccuucggggccggcgccgcccugcagauccccuucgcgaugcagauggccuaccgguucaacggcaucggggucacccagaacgugcucuacgagaaccagaagcugaucgccaaccaguucaacagcgccaucggcaagauccaggacucccugagcuccaccgccagcgcgcucgggaagcugcaggacguggucaaccagaacgcccaggcccugaacacgcucgugaagugccuguccagcaacuucggcgccaucuccagcgugcugaacgacauccucucccgccuggacaaggucgaggccgaggugcagaucgaccggcugaucaccgggcgccuccagugccugcagaccuacgugacccagcagcugauccgggcggccgagauccgcgccagcgccaaccucgccgcgaccaagauguccgagugcguccugggccagagcaagcggguggacuucugcggcaagggguaccaccugauguccuucccccagagcgccccgcacggcguggucuuccuccacgugacguacguccccgcccaggagaagaacuucaccaccgcccccgcgaucugccacgacgggaaggcccacuucccccgcgagggcguguucguguccaacgggacccacugguucgucacgcagcggaacuucuacgagccgcagaucaucaccaccgacaacaccuucgugagcggcaacugcgacguggucaucggcaucgugaacaacacgguguacgacccccugcagcccgagcuggacuccggcggcgggagcgggggcgggcagaucuacgagggcaagcugaccgccgaggggcuccgcuucggcaucguggccagccgguucaaccacgcgcuggucgaccgccugguggagggggccaucgacgccaucgugcggcacggcgggcgcgaggaggacaucacccucguccgggugcccggcuccugggagaucccgguggccgccggcgagcuggcccgcaaggaggacaucgacgcggucaucgccaucggggugcugauccggggcgccacgccccacuucgacuacaucgccagcgagguguccaaggggcucgcggaccugagccuggagcuccgcaagcccaucaccuucggcgucaucaccgccgacacccuggagcaggccaucgagcgggccgggacgaagcacggcaacaagggcugggaggccgcgcuguccgccaucgagauggccaaccucuucaagagccugcgcuga

SEQ ID NO: 11918 - RNA, 3924 nt, Artificial Sequence
  SARS-CoV-2/Wuhan/WIV05/2019__EPI_ISL_402128 spike protein CDS gc (1-1147)(F970C_G999C) LumSynth construct
auguucguguuccugguccuccugccccuggugagcucccagugcgugaaccucaccacccgcacgcagcugccgcccgccuacaccaacagcuucacccggggcgucuacuaccccgacaagguguuccgcuccagcgugcugcacuccacccaggaccucuuccugcccuucuucagcaacgucacgugguuccacgccauccacguguccgggaccaacggcaccaagcgguucgacaacccggugcugcccuucaacgacggggucuacuucgcgagcaccgagaaguccaacaucauccgcggcuggaucuucgggacgacccucgacagcaagacccagucccugcugaucgugaacaacgccaccaacguggucaucaaggugugcgaguuccaguucugcaacgaccccuuccucggcguguacuaccacaagaacaacaagagcuggauggaguccgaguuccgggucuacagcuccgccaacaacugcacguucgaguacgugagccagcccuuccugauggaccuggagggcaagcaggggaacuucaagaaccuccgcgaguucguguucaagaacaucgacggcuacuucaagaucuacuccaagcacaccccgaucaaccugguccgggaccugccccagggguucagcgcccucgagccccugguggaccugcccaucggcaucaacaucacccgcuuccagacccuccuggcccugcaccgguccuaccucacgccgggggacagcagcuccggcuggaccgcgggcgccgccgccuacuacgugggguaccugcagccccgcaccuuccugcucaaguacaacgagaacggcaccaucacggacgcggucgacugcgcccuggacccccugagcgagaccaagugcacccucaaguccuucaccguggagaaggggaucuaccagacgagcaacuuccgggugcagcccaccgaguccaucguccgcuucccgaacaucaccaaccugugccccuucggcgagguguucaacgccacccgguucgccagcgucuacgccuggaaccgcaagcggaucuccaacugcguggcggacuacagcgugcuguacaacuccgccagcuucuccacguucaagugcuacggcgucagccccaccaagcucaacgaccugugcuucaccaacguguacgccgacuccuucgugauccgcggggacgagguccggcagaucgcccccggccagaccgggaagaucgccgacuacaacuacaagcugccggacgacuucacgggcugcgugaucgcguggaacagcaacaaccucgacuccaaggucgggggcaacuacaacuaccuguaccgccuguuccgcaagagcaaccucaagcccuucgagcgggacaucuccaccgagaucuaccaggccggcagcacccccugcaacgggguggagggcuucaacugcuacuucccccugcaguccuacggguuccagccgaccaacggcgugggguaccagcccuaccggguggucgugcugagcuucgagcuccugcacgcccccgccacggugugcggccccaagaaguccaccaaccuggucaagaacaagugcgugaacuucaacuucaacggccucaccgggaccggcgugcugaccgagagcaacaagaaguuccugccguuccagcaguucgggcgcgacaucgccgacacgaccgacgcgguccgcgacccccagacccuggagauccucgacaucacccccugcagcuucggcgggguguccgugaucacgccgggcaccaacaccagcaaccaggucgccgugcuguaccaggacgugaacugcaccgagguccccguggccauccacgccgaccagcugacgcccaccuggcggguguacuccaccggcagcaacgucuuccagacccgcgccgggugccucaucggcgcggagcacgugaacaacuccuacgagugcgacauccccaucggggccggcaucugcgccagcuaccagacgcagaccaacuccccgcggcgcgcccggagcguggcgucccagagcaucaucgccuacaccaugucccugggcgccgagaacagcgucgccuacuccaacaacagcaucgccauccccaccaacuucacgaucuccgugaccaccgagauccugcccgugagcaugaccaagacgagcgucgacugcaccauguacaucugcggggacuccaccgagugcagcaaccuccugcugcaguacggcuccuucugcacccagcucaaccgcgcgcugacggggaucgccguggagcaggacaagaacacccaggagguguucgcccaggucaagcagaucuacaagacgcccccgaucaaggacuucggcggguucaacuucagccagauccugcccgaccccuccaagcccagcaagcgguccuucaucgaggaccuccuguucaacaaggugacccuggccgacgccggcuucaucaagcaguacggcgacugccucggggacaucgcggcccgcgaccugaucugcgcccagaaguucaacggccugaccgugcucccgccccugcugaccgacgagaugaucgcccaguacaccagcgcccuccuggcggggaccaucacguccggcuggaccuucggggccggcgccgcccugcagauccccuucgcgaugcagauggccuaccgguucaacggcaucggggucacccagaacgugcucuacgagaaccagaagcugaucgccaaccaguucaacagcgccaucggcaagauccaggacucccugagcuccaccgccagcgcgcucgggaagcugcaggacguggucaaccagaacgcccaggcccugaacacgcucgugaagcagcuguccagcaacugcggcgccaucuccagcgugcugaacgacauccucucccgccuggacaaggucgaggccgaggugcagaucgaccggcugaucaccugucgccuccagagccugcagaccuacgugacccagcagcugauccgggcggccgagauccgcgccagcgccaaccucgccgcgaccaagauguccgagugcguccugggccagagcaagcggguggacuucugcggcaagggguaccaccugauguccuucccccagagcgccccgcacggcguggucuuccuccacgugacguacguccccgcccaggagaagaacuucaccaccgcccccgcgaucugccacgacgggaaggcccacuucccccgcgagggcguguucguguccaacgggacccacugguucgucacgcagcggaacuucuacgagccgcagaucaucaccaccgacaacaccuucgugagcggcaacugcgacguggucaucggcaucgugaacaacacgguguacgacccccugcagcccgagcuggacuccggcggcgggagcgggggcgggcagaucuacgagggcaagcugaccgccgaggggcuccgcuucggcaucguggccagccgguucaaccacgcgcuggucgaccgccugguggagggggccaucgacgccaucgugcggcacggcgggcgcgaggaggacaucacccucguccgggugcccggcuccugggagaucccgguggccgccggcgagcuggcccgcaaggaggacaucgacgcggucaucgccaucggggugcugauccggggcgccacgccccacuucgacuacaucgccagcgagguguccaaggggcucgcggaccugagccuggagcuccgcaagcccaucaccuucggcgucaucaccgccgacacccuggagcaggccaucgagcgggccgggacgaagcacggcaacaagggcugggaggccgcgcuguccgccaucgagauggccaaccucuucaagagccugcgcuga

SEQ ID NO: 11919 - RNA, 3924 nt, Artificial Sequence
  SARS-CoV-2/Wuhan/WIV05/2019__EPI_ISL_402128 spike protein CDS gc (1-1147)(A972C_R995C) LumSynth construct
auguucguguuccugguccuccugccccuggugagcucccagugcgugaaccucaccacccgcacgcagcugccgcccgccuacaccaacagcuucacccggggcgucuacuaccccgacaagguguuccgcuccagcgugcugcacuccacccaggaccucuuccugcccuucuucagcaacgucacgugguuccacgccauccacguguccgggaccaacggcaccaagcgguucgacaacccggugcugcccuucaacgacggggucuacuucgcgagcaccgagaaguccaacaucauccgcggcuggaucuucgggacgacccucgacagcaagacccagucccugcugaucgugaacaacgccaccaacguggucaucaaggugugcgaguuccaguucugcaacgaccccuuccucggcguguacuaccacaagaacaacaagagcuggauggaguccgaguuccgggucuacagcuccgccaacaacugcacguucgaguacgugagccagcccuuccugauggaccuggagggcaagcaggggaacuucaagaaccuccgcgaguucguguucaagaacaucgacggcuacuucaagaucuacuccaagcacaccccgaucaaccugguccgggaccugccccagggguucagcgcccucgagccccugguggaccugcccaucggcaucaacaucacccgcuuccagacccuccuggcccugcaccgguccuaccucacgccgggggacagcagcuccggcuggaccgcgggcgccgccgccuacuacgugggguaccugcagccccgcaccuuccugcucaaguacaacgagaacggcaccaucacggacgcggucgacugcgcccuggacccccugagcgagaccaagugcacccucaaguccuucaccguggagaaggggaucuaccagacgagcaacuuccgggugcagcccaccgaguccaucguccgcuucccgaacaucaccaaccugugccccuucggcgagguguucaacgccacccgguucgccagcgucuacgccuggaaccgcaagcggaucuccaacugcguggcggacuacagcgugcuguacaacuccgccagcuucuccacguucaagugcuacggcgucagccccaccaagcucaacgaccugugcuucaccaacguguacgccgacuccuucgugauccgcggggacgagguccggcagaucgcccccggccagaccgggaagaucgccgacuacaacuacaagcugccggacgacuucacgggcugcgugaucgcguggaacagcaacaaccucgacuccaaggucgggggcaacuacaacuaccuguaccgccuguuccgcaagagcaaccucaagcccuucgagcgggacaucuccaccgagaucuaccaggccggcagcacccccugcaacgggguggagggcuucaacugcuacuucccccugcaguccuacggguuccagccgaccaacggcgugggguaccagcccuaccggguggucgugcugagcuucgagcuccugcacgcccccgccacggugugcggccccaagaaguccaccaaccuggucaagaacaagugcgugaacuucaacuucaacggccucaccgggaccggcgugcugaccgagagcaacaagaaguuccugccguuccagcaguucgggcgcgacaucgccgacacgaccgacgcgguccgcgacccccagacccuggagauccucgacaucacccccugcagcuucggcgggguguccgugaucacgccgggcaccaacaccagcaaccaggucgccgugcuguaccaggacgugaacugcaccgagguccccguggccauccacgccgaccagcugacgcccaccuggcggguguacuccaccggcagcaacgucuuccagacccgcgccgggugccucaucggcgcggagcacgugaacaacuccuacgagugcgacauccccaucggggccggcaucugcgccagcuaccagacgcagaccaacuccccgcggcgcgcccggagcguggcgucccagagcaucaucgccuacaccaugucccugggcgccgagaacagcgucgccuacuccaacaacagcaucgccauccccaccaacuucacgaucuccgugaccaccgagauccugcccgugagcaugaccaagacgagcgucgacugcaccauguacaucugcggggacuccaccgagugcagcaaccuccugcugcaguacggcuccuucugcacccagcucaaccgcgcgcugacggggaucgccguggagcaggacaagaacacccaggagguguucgcccaggucaagcagaucuacaagacgcccccgaucaaggacuucggcggguucaacuucagccagauccugcccgaccccuccaagcccagcaagcgguccuucaucgaggaccuccuguucaacaaggugacccuggccgacgccggcuucaucaagcaguacggcgacugccucggggacaucgcggcccgcgaccugaucugcgcccagaaguucaacggccugaccgugcucccgccccugcugaccgacgagaugaucgcccaguacaccagcgcccuccuggcggggaccaucacguccggcuggaccuucggggccggcgccgcccugcagauccccuucgcgaugcagauggccuaccgguucaacggcaucggggucacccagaacgugcucuacgagaaccagaagcugaucgccaaccaguucaacagcgccaucggcaagauccaggacucccugagcuccaccgccagcgcgcucgggaagcugcaggacguggucaaccagaacgcccaggcccugaacacgcucgugaagcagcuguccagcaacuucggcugcaucuccagcgugcugaacgacauccucucccgccuggacaaggucgaggccgaggugcagaucgacugccugaucaccgggcgccuccagagccugcagaccuacgugacccagcagcugauccgggcggccgagauccgcgccagcgccaaccucgccgcgaccaagauguccgagugcguccugggccagagcaagcggguggacuucugcggcaagggguaccaccugauguccuucccccagagcgccccgcacggcguggucuuccuccacgugacguacguccccgcccaggagaagaacuucaccaccgcccccgcgaucugccacgacgggaaggcccacuucccccgcgagggcguguucguguccaacgggacccacugguucgucacgcagcggaacuucuacgagccgcagaucaucaccaccgacaacaccuucgugagcggcaacugcgacguggucaucggcaucgugaacaacacgguguacgacccccugcagcccgagcuggacuccggcggcgggagcgggggcgggcagaucuacgagggcaagcugaccgccgaggggcuccgcuucggcaucguggccagccgguucaaccacgcgcuggucgaccgccugguggagggggccaucgacgccaucgugcggcacggcgggcgcgaggaggacaucacccucguccgggugcccggcuccugggagaucccgguggccgccggcgagcuggcccgcaaggaggacaucgacgcggucaucgccaucggggugcugauccggggcgccacgccccacuucgacuacaucgccagcgagguguccaaggggcucgcggaccugagccuggagcuccgcaagcccaucaccuucggcgucaucaccgccgacacccuggagcaggccaucgagcgggccgggacgaagcacggcaacaagggcugggaggccgcgcuguccgccaucgagauggccaaccucuucaagagccugcgcuga

SEQ ID NO: 11920 - RNA, 3924 nt, Artificial Sequence
  SARS-CoV-2/Wuhan/WIV05/2019__EPI_ISL_402128 spike protein CDS gc (1-1147)(A890C_V1040C) LumSynth construct
auguucguguuccugguccuccugccccuggugagcucccagugcgugaaccucaccacccgcacgcagcugccgcccgccuacaccaacagcuucacccggggcgucuacuaccccgacaagguguuccgcuccagcgugcugcacuccacccaggaccucuuccugcccuucuucagcaacgucacgugguuccacgccauccacguguccgggaccaacggcaccaagcgguucgacaacccggugcugcccuucaacgacggggucuacuucgcgagcaccgagaaguccaacaucauccgcggcuggaucuucgggacgacccucgacagcaagacccagucccugcugaucgugaacaacgccaccaacguggucaucaaggugugcgaguuccaguucugcaacgaccccuuccucggcguguacuaccacaagaacaacaagagcuggauggaguccgaguuccgggucuacagcuccgccaacaacugcacguucgaguacgugagccagcccuuccugauggaccuggagggcaagcaggggaacuucaagaaccuccgcgaguucguguucaagaacaucgacggcuacuucaagaucuacuccaagcacaccccgaucaaccugguccgggaccugccccagggguucagcgcccucgagccccugguggaccugcccaucggcaucaacaucacccgcuuccagacccuccuggcccugcaccgguccuaccucacgccgggggacagcagcuccggcuggaccgcgggcgccgccgccuacuacgugggguaccugcagccccgcaccuuccugcucaaguacaacgagaacggcaccaucacggacgcggucgacugcgcccuggacccccugagcgagaccaagugcacccucaaguccuucaccguggagaaggggaucuaccagacgagcaacuuccgggugcagcccaccgaguccaucguccgcuucccgaacaucaccaaccugugccccuucggcgagguguucaacgccacccgguucgccagcgucuacgccuggaaccgcaagcggaucuccaacugcguggcggacuacagcgugcuguacaacuccgccagcuucuccacguucaagugcuacggcgucagccccaccaagcucaacgaccugugcuucaccaacguguacgccgacuccuucgugauccgcggggacgagguccggcagaucgcccccggccagaccgggaagaucgccgacuacaacuacaagcugccggacgacuucacgggcugcgugaucgcguggaacagcaacaaccucgacuccaaggucgggggcaacuacaacuaccuguaccgccuguuccgcaagagcaaccucaagcccuucgagcgggacaucuccaccgagaucuaccaggccggcagcacccccugcaacgggguggagggcuucaacugcuacuucccccugcaguccuacggguuccagccgaccaacggcgugggguaccagcccuaccggguggucgugcugagcuucgagcuccugcacgcccccgccacggugugcggccccaagaaguccaccaaccuggucaagaacaagugcgugaacuucaacuucaacggccucaccgggaccggcgugcugaccgagagcaacaagaaguuccugccguuccagcaguucgggcgcgacaucgccgacacgaccgacgcgguccgcgacccccagacccuggagauccucgacaucacccccugcagcuucggcgggguguccgugaucacgccgggcaccaacaccagcaaccaggucgccgugcuguaccaggacgugaacugcaccgagguccccguggccauccacgccgaccagcugacgcccaccuggcggguguacuccaccggcagcaacgucuuccagacccgcgccgggugccucaucggcgcggagcacgugaacaacuccuacgagugcgacauccccaucggggccggcaucugcgccagcuaccagacgcagaccaacuccccgcggcgcgcccggagcguggcgucccagagcaucaucgccuacaccaugucccugggcgccgagaacagcgucgccuacuccaacaacagcaucgccauccccaccaacuucacgaucuccgugaccaccgagauccugcccgugagcaugaccaagacgagcgucgacugcaccauguacaucugcggggacuccaccgagugcagcaaccuccugcugcaguacggcuccuucugcacccagcucaaccgcgcgcugacggggaucgccguggagcaggacaagaacacccaggagguguucgcccaggucaagcagaucuacaagacgcccccgaucaaggacuucggcggguucaacuucagccagauccugcccgaccccuccaagcccagcaagcgguccuucaucgaggaccuccuguucaacaaggugacccuggccgacgccggcuucaucaagcaguacggcgacugccucggggacaucgcggcccgcgaccugaucugcgcccagaaguucaacggccugaccgugcucccgccccugcugaccgacgagaugaucgcccaguacaccagcgcccuccuggcggggaccaucacguccggcuggaccuucgggugcggcgccgcccugcagauccccuucgcgaugcagauggccuaccgguucaacggcaucggggucacccagaacgugcucuacgagaaccagaagcugaucgccaaccaguucaacagcgccaucggcaagauccaggacucccugagcuccaccgccagcgcgcucgggaagcugcaggacguggucaaccagaacgcccaggcccugaacacgcucgugaagcagcuguccagcaacuucggcgccaucuccagcgugcugaacgacauccucucccgccuggacaaggucgaggccgaggugcagaucgaccggcugaucaccgggcgccuccagagccugcagaccuacgugacccagcagcugauccgggcggccgagauccgcgccagcgccaaccucgccgcgaccaagauguccgagugcguccugggccagagcaagcggugcgacuucugcggcaagggguaccaccugauguccuucccccagagcgccccgcacggcguggucuuccuccacgugacguacguccccgcccaggagaagaacuucaccaccgcccccgcgaucugccacgacgggaaggcccacuucccccgcgagggcguguucguguccaacgggacccacugguucgucacgcagcggaacuucuacgagccgcagaucaucaccaccgacaacaccuucgugagcggcaacugcgacguggucaucggcaucgugaacaacacgguguacgacccccugcagcccgagcuggacuccggcggcgggagcgggggcgggcagaucuacgagggcaagcugaccgccgaggggcuccgcuucggcaucguggccagccgguucaaccacgcgcuggucgaccgccugguggagggggccaucgacgccaucgugcggcacggcgggcgcgaggaggacaucacccucguccgggugcccggcuccugggagaucccgguggccgccggcgagcuggcccgcaaggaggacaucgacgcggucaucgccaucggggugcugauccggggcgccacgccccacuucgacuacaucgccagcgagguguccaaggggcucgcggaccugagccuggagcuccgcaagcccaucaccuucggcgucaucaccgccgacacccuggagcaggccaucgagcgggccgggacgaagcacggcaacaagggcugggaggccgcgcuguccgccaucgagauggccaaccucuucaagagccugcgcuga

SEQ ID NO: 11921 - RNA, 3924 nt, Artificial Sequence
  SARS-CoV-2/Wuhan/WIV05/2019__EPI_ISL_402128 spike protein CDS gc (1-1147)(T874C_S1055C) LumSynth construct
auguucguguuccugguccuccugccccuggugagcucccagugcgugaaccucaccacccgcacgcagcugccgcccgccuacaccaacagcuucacccggggcgucuacuaccccgacaagguguuccgcuccagcgugcugcacuccacccaggaccucuuccugcccuucuucagcaacgucacgugguuccacgccauccacguguccgggaccaacggcaccaagcgguucgacaacccggugcugcccuucaacgacggggucuacuucgcgagcaccgagaaguccaacaucauccgcggcuggaucuucgggacgacccucgacagcaagacccagucccugcugaucgugaacaacgccaccaacguggucaucaaggugugcgaguuccaguucugcaacgaccccuuccucggcguguacuaccacaagaacaacaagagcuggauggaguccgaguuccgggucuacagcuccgccaacaacugcacguucgaguacgugagccagcccuuccugauggaccuggagggcaagcaggggaacuucaagaaccuccgcgaguucguguucaagaacaucgacggcuacuucaagaucuacuccaagcacaccccgaucaaccugguccgggaccugccccagggguucagcgcccucgagccccugguggaccugcccaucggcaucaacaucacccgcuuccagacccuccuggcccugcaccgguccuaccucacgccgggggacagcagcuccggcuggaccgcgggcgccgccgccuacuacgugggguaccugcagccccgcaccuuccugcucaaguacaacgagaacggcaccaucacggacgcggucgacugcgcccuggacccccugagcgagaccaagugcacccucaaguccuucaccguggagaaggggaucuaccagacgagcaacuuccgggugcagcccaccgaguccaucguccgcuucccgaacaucaccaaccugugccccuucggcgagguguucaacgccacccgguucgccagcgucuacgccuggaaccgcaagcggaucuccaacugcguggcggacuacagcgugcuguacaacuccgccagcuucuccacguucaagugcuacggcgucagccccaccaagcucaacgaccugugcuucaccaacguguacgccgacuccuucgugauccgcggggacgagguccggcagaucgcccccggccagaccgggaagaucgccgacuacaacuacaagcugccggacgacuucacgggcugcgugaucgcguggaacagcaacaaccucgacuccaaggucgggggcaacuacaacuaccuguaccgccuguuccgcaagagcaaccucaagcccuucgagcgggacaucuccaccgagaucuaccaggccggcagcacccccugcaacgggguggagggcuucaacugcuacuucccccugcaguccuacggguuccagccgaccaacggcgugggguaccagcccuaccggguggucgugcugagcuucgagcuccugcacgcccccgccacggugugcggccccaagaaguccaccaaccuggucaagaacaagugcgugaacuucaacuucaacggccucaccgggaccggcgugcugaccgagagcaacaagaaguuccugccguuccagcaguucgggcgcgacaucgccgacacgaccgacgcgguccgcgacccccagacccuggagauccucgacaucacccccugcagcuucggcgggguguccgugaucacgccgggcaccaacaccagcaaccaggucgccgugcuguaccaggacgugaacugcaccgagguccccguggccauccacgccgaccagcugacgcccaccuggcggguguacuccaccggcagcaacgucuuccagacccgcgccgggugccucaucggcgcggagcacgugaacaacuccuacgagugcgacauccccaucggggccggcaucugcgccagcuaccagacgcagaccaacuccccgcggcgcgcccggagcguggcgucccagagcaucaucgccuacaccaugucccugggcgccgagaacagcgucgccuacuccaacaacagcaucgccauccccaccaacuucacgaucuccgugaccaccgagauccugcccgugagcaugaccaagacgagcgucgacugcaccauguacaucugcggggacuccaccgagugcagcaaccuccugcugcaguacggcuccuucugcacccagcucaaccgcgcgcugacggggaucgccguggagcaggacaagaacacccaggagguguucgcccaggucaagcagaucuacaagacgcccccgaucaaggacuucggcggguucaacuucagccagauccugcccgaccccuccaagcccagcaagcgguccuucaucgaggaccuccuguucaacaaggugacccuggccgacgccggcuucaucaagcaguacggcgacugccucggggacaucgcggcccgcgaccugaucugcgcccagaaguucaacggccugaccgugcucccgccccugcugaccgacgagaugaucgcccaguacugcagcgcccuccuggcggggaccaucacguccggcuggaccuucggggccggcgccgcccugcagauccccuucgcgaugcagauggccuaccgguucaacggcaucggggucacccagaacgugcucuacgagaaccagaagcugaucgccaaccaguucaacagcgccaucggcaagauccaggacucccugagcuccaccgccagcgcgcucgggaagcugcaggacguggucaaccagaacgcccaggcccugaacacgcucgugaagcagcuguccagcaacuucggcgccaucuccagcgugcugaacgacauccucucccgccuggacaaggucgaggccgaggugcagaucgaccggcugaucaccgggcgccuccagagccugcagaccuacgugacccagcagcugauccgggcggccgagauccgcgccagcgccaaccucgccgcgaccaagauguccgagugcguccugggccagagcaagcggguggacuucugcggcaagggguaccaccugauguccuucccccagugcgccccgcacggcguggucuuccuccacgugacguacguccccgcccaggagaagaacuucaccaccgcccccgcgaucugccacgacgggaaggcccacuucccccgcgagggcguguucguguccaacgggacccacugguucgucacgcagcggaacuucuacgagccgcagaucaucaccaccgacaacaccuucgugagcggcaacugcgacguggucaucggcaucgugaacaacacgguguacgacccccugcagcccgagcuggacuccggcggcgggagcgggggcgggcagaucuacgagggcaagcugaccgccgaggggcuccgcuucggcaucguggccagccgguucaaccacgcgcuggucgaccgccugguggagggggccaucgacgccaucgugcggcacggcgggcgcgaggaggacaucacccucguccgggugcccggcuccugggagaucccgguggccgccggcgagcuggcccgcaaggaggacaucgacgcggucaucgccaucggggugcugauccggggcgccacgccccacuucgacuacaucgccagcgagguguccaaggggcucgcggaccugagccuggagcuccgcaagcccaucaccuucggcgucaucaccgccgacacccuggagcaggccaucgagcgggccgggacgaagcacggcaacaagggcugggaggccgcgcuguccgccaucgagauggccaaccucuucaagagccugcgcuga

SEQ ID NO: 11922 - RNA, 3948 nt, Artificial Sequence
  SARS-CoV-2/Wuhan/WIV05/2019__EPI_ISL_402128 spike protein CDS gc (1-1147) Ferritin construct
auguucguguuccugguccuccugccccuggugagcucccagugcgugaaccucaccacccgcacgcagcugccgcccgccuacaccaacagcuucacccggggcgucuacuaccccgacaagguguuccgcuccagcgugcugcacuccacccaggaccucuuccugcccuucuucagcaacgucacgugguuccacgccauccacguguccgggaccaacggcaccaagcgguucgacaacccggugcugcccuucaacgacggggucuacuucgcgagcaccgagaaguccaacaucauccgcggcuggaucuucgggacgacccucgacagcaagacccagucccugcugaucgugaacaacgccaccaacguggucaucaaggugugcgaguuccaguucugcaacgaccccuuccucggcguguacuaccacaagaacaacaagagcuggauggaguccgaguuccgggucuacagcuccgccaacaacugcacguucgaguacgugagccagcccuuccugauggaccuggagggcaagcaggggaacuucaagaaccuccgcgaguucguguucaagaacaucgacggcuacuucaagaucuacuccaagcacaccccgaucaaccugguccgggaccugccccagggguucagcgcccucgagccccugguggaccugcccaucggcaucaacaucacccgcuuccagacccuccuggcccugcaccgguccuaccucacgccgggggacagcagcuccggcuggaccgcgggcgccgccgccuacuacgugggguaccugcagccccgcaccuuccugcucaaguacaacgagaacggcaccaucacggacgcggucgacugcgcccuggacccccugagcgagaccaagugcacccucaaguccuucaccguggagaaggggaucuaccagacgagcaacuuccgggugcagcccaccgaguccaucguccgcuucccgaacaucaccaaccugugccccuucggcgagguguucaacgccacccgguucgccagcgucuacgccuggaaccgcaagcggaucuccaacugcguggcggacuacagcgugcuguacaacuccgccagcuucuccacguucaagugcuacggcgucagccccaccaagcucaacgaccugugcuucaccaacguguacgccgacuccuucgugauccgcggggacgagguccggcagaucgcccccggccagaccgggaagaucgccgacuacaacuacaagcugccggacgacuucacgggcugcgugaucgcguggaacagcaacaaccucgacuccaaggucgggggcaacuacaacuaccuguaccgccuguuccgcaagagcaaccucaagcccuucgagcgggacaucuccaccgagaucuaccaggccggcagcacccccugcaacgggguggagggcuucaacugcuacuucccccugcaguccuacggguuccagccgaccaacggcgugggguaccagcccuaccggguggucgugcugagcuucgagcuccugcacgcccccgccacggugugcggccccaagaaguccaccaaccuggucaagaacaagugcgugaacuucaacuucaacggccucaccgggaccggcgugcugaccgagagcaacaagaaguuccugccguuccagcaguucgggcgcgacaucgccgacacgaccgacgcgguccgcgacccccagacccuggagauccucgacaucacccccugcagcuucggcgggguguccgugaucacgccgggcaccaacaccagcaaccaggucgccgugcuguaccaggacgugaacugcaccgagguccccguggccauccacgccgaccagcugacgcccaccuggcggguguacuccaccggcagcaacgucuuccagacccgcgccgggugccucaucggcgcggagcacgugaacaacuccuacgagugcgacauccccaucggggccggcaucugcgccagcuaccagacgcagaccaacuccccgcggcgcgcccggagcguggcgucccagagcaucaucgccuacaccaugucccugggcgccgagaacagcgucgccuacuccaacaacagcaucgccauccccaccaacuucacgaucuccgugaccaccgagauccugcccgugagcaugaccaagacgagcgucgacugcaccauguacaucugcggggacuccaccgagugcagcaaccuccugcugcaguacggcuccuucugcacccagcucaaccgcgcgcugacggggaucgccguggagcaggacaagaacacccaggagguguucgcccaggucaagcagaucuacaagacgcccccgaucaaggacuucggcggguucaacuucagccagauccugcccgaccccuccaagcccagcaagcgguccuucaucgaggaccuccuguucaacaaggugacccuggccgacgccggcuucaucaagcaguacggcgacugccucggggacaucgcggcccgcgaccugaucugcgcccagaaguucaacggccugaccgugcucccgccccugcugaccgacgagaugaucgcccaguacaccagcgcccuccuggcggggaccaucacguccggcuggaccuucggggccggcgccgcccugcagauccccuucgcgaugcagauggccuaccgguucaacggcaucggggucacccagaacgugcucuacgagaaccagaagcugaucgccaaccaguucaacagcgccaucggcaagauccaggacucccugagcuccaccgccagcgcgcucgggaagcugcaggacguggucaaccagaacgcccaggcccugaacacgcucgugaagcagcuguccagcaacuucggcgccaucuccagcgugcugaacgacauccucucccgccuggacaaggucgaggccgaggugcagaucgaccggcugaucaccgggcgccuccagagccugcagaccuacgugacccagcagcugauccgggcggccgagauccgcgccagcgccaaccucgccgcgaccaagauguccgagugcguccugggccagagcaagcggguggacuucugcggcaagggguaccaccugauguccuucccccagagcgccccgcacggcguggucuuccuccacgugacguacguccccgcccaggagaagaacuucaccaccgcccccgcgaucugccacgacgggaaggcccacuucccccgcgagggcguguucguguccaacgggacccacugguucgucacgcagcggaacuucuacgagccgcagaucaucaccaccgacaacaccuucgugagcggcaacugcgacguggucaucggcaucgugaacaacacgguguacgacccccugcagcccgagcuggacuccggcgggggcgggagcgacaucaucaagcuccugaacgagcaggucaacaaggagaugcaguccagcaaccuguacauguccaugagcuccuggugcuacacccacagccucgacggcgccgggcuguuccuguucgaccacgccgcggaggaguacgagcacgccaagaagcucaucaucuuccugaacgagaacaacgugcccgugcagcugaccuccaucagcgccccggagcacaaguucgagggccucacgcagaucuuccagaaggccuacgagcacgagcagcacaucuccgagagcaucaacaacaucguggaccacgccaucaaguccaaggaccacgcgaccuucaacuuccugcagugguacgucgccgagcagcacgaggaggaggugcuguucaaggacauccucgacaagaucgagcugaucgggaacgagaaccacggccuguaccucgccgaccaguacgugaaggggaucgccaagagccgcaaguccuga

SEQ ID NO: 11923 - RNA, 3948 nt, Artificial Sequence
  SARS-CoV-2/Wuhan/WIV05/2019__EPI_ISL_402128 spike protein CDS gc (1-1147)(K986P_V987P) Ferritin construct
auguucguguuccugguccuccugccccuggugagcucccagugcgugaaccucaccacccgcacgcagcugccgcccgccuacaccaacagcuucacccggggcgucuacuaccccgacaagguguuccgcuccagcgugcugcacuccacccaggaccucuuccugcccuucuucagcaacgucacgugguuccacgccauccacguguccgggaccaacggcaccaagcgguucgacaacccggugcugcccuucaacgacggggucuacuucgcgagcaccgagaaguccaacaucauccgcggcuggaucuucgggacgacccucgacagcaagacccagucccugcugaucgugaacaacgccaccaacguggucaucaaggugugcgaguuccaguucugcaacgaccccuuccucggcguguacuaccacaagaacaacaagagcuggauggaguccgaguuccgggucuacagcuccgccaacaacugcacguucgaguacgugagccagcccuuccugauggaccuggagggcaagcaggggaacuucaagaaccuccgcgaguucguguucaagaacaucgacggcuacuucaagaucuacuccaagcacaccccgaucaaccugguccgggaccugccccagggguucagcgcccucgagccccugguggaccugcccaucggcaucaacaucacccgcuuccagacccuccuggcccugcaccgguccuaccucacgccgggggacagcagcuccggcuggaccgcgggcgccgccgccuacuacgugggguaccugcagccccgcaccuuccugcucaaguacaacgagaacggcaccaucacggacgcggucgacugcgcccuggacccccugagcgagaccaagugcacccucaaguccuucaccguggagaaggggaucuaccagacgagcaacuuccgggugcagcccaccgaguccaucguccgcuucccgaacaucaccaaccugugccccuucggcgagguguucaacgccacccgguucgccagcgucuacgccuggaaccgcaagcggaucuccaacugcguggcggacuacagcgugcuguacaacuccgccagcuucuccacguucaagugcuacggcgucagccccaccaagcucaacgaccugugcuucaccaacguguacgccgacuccuucgugauccgcggggacgagguccggcagaucgcccccggccagaccgggaagaucgccgacuacaacuacaagcugccggacgacuucacgggcugcgugaucgcguggaacagcaacaaccucgacuccaaggucgggggcaacuacaacuaccuguaccgccuguuccgcaagagcaaccucaagcccuucgagcgggacaucuccaccgagaucuaccaggccggcagcacccccugcaacgggguggagggcuucaacugcuacuucccccugcaguccuacggguuccagccgaccaacggcgugggguaccagcccuaccggguggucgugcugagcuucgagcuccugcacgcccccgccacggugugcggccccaagaaguccaccaaccuggucaagaacaagugcgugaacuucaacuucaacggccucaccgggaccggcgugcugaccgagagcaacaagaaguuccugccguuccagcaguucgggcgcgacaucgccgacacgaccgacgcgguccgcgacccccagacccuggagauccucgacaucacccccugcagcuucggcgggguguccgugaucacgccgggcaccaacaccagcaaccaggucgccgugcuguaccaggacgugaacugcaccgagguccccguggccauccacgccgaccagcugacgcccaccuggcggguguacuccaccggcagcaacgucuuccagacccgcgccgggugccucaucggcgcggagcacgugaacaacuccuacgagugcgacauccccaucggggccggcaucugcgccagcuaccagacgcagaccaacuccccgcggcgcgcccggagcguggcgucccagagcaucaucgccuacaccaugucccugggcgccgagaacagcgucgccuacuccaacaacagcaucgccauccccaccaacuucacgaucuccgugaccaccgagauccugcccgugagcaugaccaagacgagcgucgacugcaccauguacaucugcggggacuccaccgagugcagcaaccuccugcugcaguacggcuccuucugcacccagcucaaccgcgcgcugacggggaucgccguggagcaggacaagaacacccaggagguguucgcccaggucaagcagaucuacaagacgcccccgaucaaggacuucggcggguucaacuucagccagauccugcccgaccccuccaagcccagcaagcgguccuucaucgaggaccuccuguucaacaaggugacccuggccgacgccggcuucaucaagcaguacggcgacugccucggggacaucgcggcccgcgaccugaucugcgcccagaaguucaacggccugaccgugcucccgccccugcugaccgacgagaugaucgcccaguacaccagcgcccuccuggcggggaccaucacguccggcuggaccuucggggccggcgccgcccugcagauccccuucgcgaugcagauggccuaccgguucaacggcaucggggucacccagaacgugcucuacgagaaccagaagcugaucgccaaccaguucaacagcgccaucggcaagauccaggacucccugagcuccaccgccagcgcgcucgggaagcugcaggacguggucaaccagaacgcccaggcccugaacacgcucgugaagcagcuguccagcaacuucggcgccaucuccagcgugcugaacgacauccucucccgccuggacccgcccgaggccgaggugcagaucgaccggcugaucaccgggcgccuccagagccugcagaccuacgugacccagcagcugauccgggcggccgagauccgcgccagcgccaaccucgccgcgaccaagauguccgagugcguccugggccagagcaagcggguggacuucugcggcaagggguaccaccugauguccuucccccagagcgccccgcacggcguggucuuccuccacgugacguacguccccgcccaggagaagaacuucaccaccgcccccgcgaucugccacgacgggaaggcccacuucccccgcgagggcguguucguguccaacgggacccacugguucgucacgcagcggaacuucuacgagccgcagaucaucaccaccgacaacaccuucgugagcggcaacugcgacguggucaucggcaucgugaacaacacgguguacgacccccugcagcccgagcuggacuccggcgggggcgggagcgacaucaucaagcuccugaacgagcaggucaacaaggagaugcaguccagcaaccuguacauguccaugagcuccuggugcuacacccacagccucgacggcgccgggcuguuccuguucgaccacgccgcggaggaguacgagcacgccaagaagcucaucaucuuccugaacgagaacaacgugcccgugcagcugaccuccaucagcgccccggagcacaaguucgagggccucacgcagaucuuccagaaggccuacgagcacgagcagcacaucuccgagagcaucaacaacaucguggaccacgccaucaaguccaaggaccacgcgaccuucaacuuccugcagugguacgucgccgagcagcacgaggaggaggugcuguucaaggacauccucgacaagaucgagcugaucgggaacgagaaccacggccuguaccucgccgaccaguacgugaaggggaucgccaagagccgcaaguccuga

SEQ ID NO: 11924 - RNA, 3948 nt, Artificial Sequence
  SARS-CoV-2/Wuhan/WIV05/2019__EPI_ISL_402128 spike protein CDS gc (1-1147)(K986P_V987P_T887WN_A1020W) Ferritin construct
auguucguguuccugguccuccugccccuggugagcucccagugcgugaaccucaccacccgcacgcagcugccgcccgccuacaccaacagcuucacccggggcgucuacuaccccgacaagguguuccgcuccagcgugcugcacuccacccaggaccucuuccugcccuucuucagcaacgucacgugguuccacgccauccacguguccgggaccaacggcaccaagcgguucgacaacccggugcugcccuucaacgacggggucuacuucgcgagcaccgagaaguccaacaucauccgcggcuggaucuucgggacgacccucgacagcaagacccagucccugcugaucgugaacaacgccaccaacguggucaucaaggugugcgaguuccaguucugcaacgaccccuuccucggcguguacuaccacaagaacaacaagagcuggauggaguccgaguuccgggucuacagcuccgccaacaacugcacguucgaguacgugagccagcccuuccugauggaccuggagggcaagcaggggaacuucaagaaccuccgcgaguucguguucaagaacaucgacggcuacuucaagaucuacuccaagcacaccccgaucaaccugguccgggaccugccccagggguucagcgcccucgagccccugguggaccugcccaucggcaucaacaucacccgcuuccagacccuccuggcccugcaccgguccuaccucacgccgggggacagcagcuccggcuggaccgcgggcgccgccgccuacuacgugggguaccugcagccccgcaccuuccugcucaaguacaacgagaacggcaccaucacggacgcggucgacugcgcccuggacccccugagcgagaccaagugcacccucaaguccuucaccguggagaaggggaucuaccagacgagcaacuuccgggugcagcccaccgaguccaucguccgcuucccgaacaucaccaaccugugccccuucggcgagguguucaacgccacccgguucgccagcgucuacgccuggaaccgcaagcggaucuccaacugcguggcggacuacagcgugcuguacaacuccgccagcuucuccacguucaagugcuacggcgucagccccaccaagcucaacgaccugugcuucaccaacguguacgccgacuccuucgugauccgcggggacgagguccggcagaucgcccccggccagaccgggaagaucgccgacuacaacuacaagcugccggacgacuucacgggcugcgugaucgcguggaacagcaacaaccucgacuccaaggucgggggcaacuacaacuaccuguaccgccuguuccgcaagagcaaccucaagcccuucgagcgggacaucuccaccgagaucuaccaggccggcagcacccccugcaacgggguggagggcuucaacugcuacuucccccugcaguccuacggguuccagccgaccaacggcgugggguaccagcccuaccggguggucgugcugagcuucgagcuccugcacgcccccgccacggugugcggccccaagaaguccaccaaccuggucaagaacaagugcgugaacuucaacuucaacggccucaccgggaccggcgugcugaccgagagcaacaagaaguuccugccguuccagcaguucgggcgcgacaucgccgacacgaccgacgcgguccgcgacccccagacccuggagauccucgacaucacccccugcagcuucggcgggguguccgugaucacgccgggcaccaacaccagcaaccaggucgccgugcuguaccaggacgugaacugcaccgagguccccguggccauccacgccgaccagcugacgcccaccuggcggguguacuccaccggcagcaacgucuuccagacccgcgccgggugccucaucggcgcggagcacgugaacaacuccuacgagugcgacauccccaucggggccggcaucugcgccagcuaccagacgcagaccaacuccccgcggcgcgcccggagcguggcgucccagagcaucaucgccuacaccaugucccugggcgccgagaacagcgucgccuacuccaacaacagcaucgccauccccaccaacuucacgaucuccgugaccaccgagauccugcccgugagcaugaccaagacgagcgucgacugcaccauguacaucugcggggacuccaccgagugcagcaaccuccugcugcaguacggcuccuucugcacccagcucaaccgcgcgcugacggggaucgccguggagcaggacaagaacacccaggagguguucgcccaggucaagcagaucuacaagacgcccccgaucaaggacuucggcggguucaacuucagccagauccugcccgaccccuccaagcccagcaagcgguccuucaucgaggaccuccuguucaacaaggugacccuggccgacgccggcuucaucaagcaguacggcgacugccucggggacaucgcggcccgcgaccugaucugcgcccagaaguucaacggccugaccgugcucccgccccugcugaccgacgagaugaucgcccaguacaccagcgcccuccuggcggggaccaucacguccggcuggugguucggggccggcgccgcccugcagauccccuucgcgaugcagauggccuaccgguucaacggcaucggggucacccagaacgugcucuacgagaaccagaagcugaucgccaaccaguucaacagcgccaucggcaagauccaggacucccugagcuccaccgccagcgcgcucgggaagcugcaggacguggucaaccagaacgcccaggcccugaacacgcucgugaagcagcuguccagcaacuucggcgccaucuccagcgugcugaacgacauccucucccgccuggacccgcccgaggccgaggugcagaucgaccggcugaucaccgggcgccuccagagccugcagaccuacgugacccagcagcugauccgggcggccgagauccgcuggagcgccaaccucgccgcgaccaagauguccgagugcguccugggccagagcaagcggguggacuucugcggcaagggguaccaccugauguccuucccccagagcgccccgcacggcguggucuuccuccacgugacguacguccccgcccaggagaagaacuucaccaccgcccccgcgaucugccacgacgggaaggcccacuucccccgcgagggcguguucguguccaacgggacccacugguucgucacgcagcggaacuucuacgagccgcagaucaucaccaccgacaacaccuucgugagcggcaacugcgacguggucaucggcaucgugaacaacacgguguacgacccccugcagcccgagcuggacuccggcgggggcgggagcgacaucaucaagcuccugaacgagcaggucaacaaggagaugcaguccagcaaccuguacauguccaugagcuccuggugcuacacccacagccucgacggcgccgggcuguuccuguucgaccacgccgcggaggaguacgagcacgccaagaagcucaucaucuuccugaacgagaacaacgugcccgugcagcugaccuccaucagcgccccggagcacaaguucgagggccucacgcagaucuuccagaaggccuacgagcacgagcagcacaucuccgagagcaucaacaacaucguggaccacgccaucaaguccaaggaccacgcgaccuucaacuuccugcagugguacgucgccgagcagcacgaggaggaggugcuguucaaggacauccucgacaagaucgagcugaucgggaacgagaaccacggccuguaccucgccgaccaguacgugaaggggaucgccaagagccgcaaguccuga

SEQ ID NO: 11925 - RNA, 3948 nt, Artificial Sequence
  SARS-CoV-2/Wuhan/WIV05/2019__EPI_ISL_402128 spike protein CDS gc (1-1147)(K986P_V987P_P1069F) Ferritin construct
auguucguguuccugguccuccugccccuggugagcucccagugcgugaaccucaccacccgcacgcagcugccgcccgccuacaccaacagcuucacccggggcgucuacuaccccgacaagguguuccgcuccagcgugcugcacuccacccaggaccucuuccugcccuucuucagcaacgucacgugguuccacgccauccacguguccgggaccaacggcaccaagcgguucgacaacccggugcugcccuucaacgacggggucuacuucgcgagcaccgagaaguccaacaucauccgcggcuggaucuucgggacgacccucgacagcaagacccagucccugcugaucgugaacaacgccaccaacguggucaucaaggugugcgaguuccaguucugcaacgaccccuuccucggcguguacuaccacaagaacaacaagagcuggauggaguccgaguuccgggucuacagcuccgccaacaacugcacguucgaguacgugagccagcccuuccugauggaccuggagggcaagcaggggaacuucaagaaccuccgcgaguucguguucaagaacaucgacggcuacuucaagaucuacuccaagcacaccccgaucaaccugguccgggaccugccccagggguucagcgcccucgagccccugguggaccugcccaucggcaucaacaucacccgcuuccagacccuccuggcccugcaccgguccuaccucacgccgggggacagcagcuccggcuggaccgcgggcgccgccgccuacuacgugggguaccugcagccccgcaccuuccugcucaaguacaacgagaacggcaccaucacggacgcggucgacugcgcccuggacccccugagcgagaccaagugcacccucaaguccuucaccguggagaaggggaucuaccagacgagcaacuuccgggugcagcccaccgaguccaucguccgcuucccgaacaucaccaaccugugccccuucggcgagguguucaacgccacccgguucgccagcgucuacgccuggaaccgcaagcggaucuccaacugcguggcggacuacagcgugcuguacaacuccgccagcuucuccacguucaagugcuacggcgucagccccaccaagcucaacgaccugugcuucaccaacguguacgccgacuccuucgugauccgcggggacgagguccggcagaucgcccccggccagaccgggaagaucgccgacuacaacuacaagcugccggacgacuucacgggcugcgugaucgcguggaacagcaacaaccucgacuccaaggucgggggcaacuacaacuaccuguaccgccuguuccgcaagagcaaccucaagcccuucgagcgggacaucuccaccgagaucuaccaggccggcagcacccccugcaacgggguggagggcuucaacugcuacuucccccugcaguccuacggguuccagccgaccaacggcgugggguaccagcccuaccggguggucgugcugagcuucgagcuccugcacgcccccgccacggugugcggccccaagaaguccaccaaccuggucaagaacaagugcgugaacuucaacuucaacggccucaccgggaccggcgugcugaccgagagcaacaagaaguuccugccguuccagcaguucgggcgcgacaucgccgacacgaccgacgcgguccgcgacccccagacccuggagauccucgacaucacccccugcagcuucggcgggguguccgugaucacgccgggcaccaacaccagcaaccaggucgccgugcuguaccaggacgugaacugcaccgagguccccguggccauccacgccgaccagcugacgcccaccuggcggguguacuccaccggcagcaacgucuuccagacccgcgccgggugccucaucggcgcggagcacgugaacaacuccuacgagugcgacauccccaucggggccggcaucugcgccagcuaccagacgcagaccaacuccccgcggcgcgcccggagcguggcgucccagagcaucaucgccuacaccaugucccugggcgccgagaacagcgucgccuacuccaacaacagcaucgccauccccaccaacuucacgaucuccgugaccaccgagauccugcccgugagcaugaccaagacgagcgucgacugcaccauguacaucugcggggacuccaccgagugcagcaaccuccugcugcaguacggcuccuucugcacccagcucaaccgcgcgcugacggggaucgccguggagcaggacaagaacacccaggagguguucgcccaggucaagcagaucuacaagacgcccccgaucaaggacuucggcggguucaacuucagccagauccugcccgaccccuccaagcccagcaagcgguccuucaucgaggaccuccuguucaacaaggugacccuggccgacgccggcuucaucaagcaguacggcgacugccucggggacaucgcggcccgcgaccugaucugcgcccagaaguucaacggccugaccgugcucccgccccugcugaccgacgagaugaucgcccaguacaccagcgcccuccuggcggggaccaucacguccggcuggaccuucggggccggcgccgcccugcagauccccuucgcgaugcagauggccuaccgguucaacggcaucggggucacccagaacgugcucuacgagaaccagaagcugaucgccaaccaguucaacagcgccaucggcaagauccaggacucccugagcuccaccgccagcgcgcucgggaagcugcaggacguggucaaccagaacgcccaggcccugaacacgcucgugaagcagcuguccagcaacuucggcgccaucuccagcgugcugaacgacauccucucccgccuggacccgcccgaggccgaggugcagaucgaccggcugaucaccgggcgccuccagagccugcagaccuacgugacccagcagcugauccgggcggccgagauccgcgccagcgccaaccucgccgcgaccaagauguccgagugcguccugggccagagcaagcggguggacuucugcggcaagggguaccaccugauguccuucccccagagcgccccgcacggcguggucuuccuccacgugacguacgucuucgcccaggagaagaacuucaccaccgcccccgcgaucugccacgacgggaaggcccacuucccccgcgagggcguguucguguccaacgggacccacugguucgucacgcagcggaacuucuacgagccgcagaucaucaccaccgacaacaccuucgugagcggcaacugcgacguggucaucggcaucgugaacaacacgguguacgacccccugcagcccgagcuggacuccggcgggggcgggagcgacaucaucaagcuccugaacgagcaggucaacaaggagaugcaguccagcaaccuguacauguccaugagcuccuggugcuacacccacagccucgacggcgccgggcuguuccuguucgaccacgccgcggaggaguacgagcacgccaagaagcucaucaucuuccugaacgagaacaacgugcccgugcagcugaccuccaucagcgccccggagcacaaguucgagggccucacgcagaucuuccagaaggccuacgagcacgagcagcacaucuccgagagcaucaacaacaucguggaccacgccaucaaguccaaggaccacgcgaccuucaacuuccugcagugguacgucgccgagcagcacgaggaggaggugcuguucaaggacauccucgacaagaucgagcugaucgggaacgagaaccacggccuguaccucgccgaccaguacgugaaggggaucgccaagagccgcaaguccuga

SEQ ID NO: 11926 - RNA, 3948 nt, Artificial Sequence
  SARS-CoV-2/Wuhan/WIV05/2019__EPI_ISL_402128 spike protein CDS gc (1-1147)(K986P_V987P_ H1048Q_H1064N_ H1083N_H1101N) Ferritin construct
auguucguguuccugguccuccugccccuggugagcucccagugcgugaaccucaccacccgcacgcagcugccgcccgccuacaccaacagcuucacccggggcgucuacuaccccgacaagguguuccgcuccagcgugcugcacuccacccaggaccucuuccugcccuucuucagcaacgucacgugguuccacgccauccacguguccgggaccaacggcaccaagcgguucgacaacccggugcugcccuucaacgacggggucuacuucgcgagcaccgagaaguccaacaucauccgcggcuggaucuucgggacgacccucgacagcaagacccagucccugcugaucgugaacaacgccaccaacguggucaucaaggugugcgaguuccaguucugcaacgaccccuuccucggcguguacuaccacaagaacaacaagagcuggauggaguccgaguuccgggucuacagcuccgccaacaacugcacguucgaguacgugagccagcccuuccugauggaccuggagggcaagcaggggaacuucaagaaccuccgcgaguucguguucaagaacaucgacggcuacuucaagaucuacuccaagcacaccccgaucaaccugguccgggaccugccccagggguucagcgcccucgagccccugguggaccugcccaucggcaucaacaucacccgcuuccagacccuccuggcccugcaccgguccuaccucacgccgggggacagcagcuccggcuggaccgcgggcgccgccgccuacuacgugggguaccugcagccccgcaccuuccugcucaaguacaacgagaacggcaccaucacggacgcggucgacugcgcccuggacccccugagcgagaccaagugcacccucaaguccuucaccguggagaaggggaucuaccagacgagcaacuuccgggugcagcccaccgaguccaucguccgcuucccgaacaucaccaaccugugccccuucggcgagguguucaacgccacccgguucgccagcgucuacgccuggaaccgcaagcggaucuccaacugcguggcggacuacagcgugcuguacaacuccgccagcuucuccacguucaagugcuacggcgucagccccaccaagcucaacgaccugugcuucaccaacguguacgccgacuccuucgugauccgcggggacgagguccggcagaucgcccccggccagaccgggaagaucgccgacuacaacuacaagcugccggacgacuucacgggcugcgugaucgcguggaacagcaacaaccucgacuccaaggucgggggcaacuacaacuaccuguaccgccuguuccgcaagagcaaccucaagcccuucgagcgggacaucuccaccgagaucuaccaggccggcagcacccccugcaacgggguggagggcuucaacugcuacuucccccugcaguccuacggguuccagccgaccaacggcgugggguaccagcccuaccggguggucgugcugagcuucgagcuccugcacgcccccgccacggugugcggccccaagaaguccaccaaccuggucaagaacaagugcgugaacuucaacuucaacggccucaccgggaccggcgugcugaccgagagcaacaagaaguuccugccguuccagcaguucgggcgcgacaucgccgacacgaccgacgcgguccgcgacccccagacccuggagauccucgacaucacccccugcagcuucggcgggguguccgugaucacgccgggcaccaacaccagcaaccaggucgccgugcuguaccaggacgugaacugcaccgagguccccguggccauccacgccgaccagcugacgcccaccuggcggguguacuccaccggcagcaacgucuuccagacccgcgccgggugccucaucggcgcggagcacgugaacaacuccuacgagugcgacauccccaucggggccggcaucugcgccagcuaccagacgcagaccaacuccccgcggcgcgcccggagcguggcgucccagagcaucaucgccuacaccaugucccugggcgccgagaacagcgucgccuacuccaacaacagcaucgccauccccaccaacuucacgaucuccgugaccaccgagauccugcccgugagcaugaccaagacgagcgucgacugcaccauguacaucugcggggacuccaccgagugcagcaaccuccugcugcaguacggcuccuucugcacccagcucaaccgcgcgcugacggggaucgccguggagcaggacaagaacacccaggagguguucgcccaggucaagcagaucuacaagacgcccccgaucaaggacuucggcggguucaacuucagccagauccugcccgaccccuccaagcccagcaagcgguccuucaucgaggaccuccuguucaacaaggugacccuggccgacgccggcuucaucaagcaguacggcgacugccucggggacaucgcggcccgcgaccugaucugcgcccagaaguucaacggccugaccgugcucccgccccugcugaccgacgagaugaucgcccaguacaccagcgcccuccuggcggggaccaucacguccggcuggaccuucggggccggcgccgcccugcagauccccuucgcgaugcagauggccuaccgguucaacggcaucggggucacccagaacgugcucuacgagaaccagaagcugaucgccaaccaguucaacagcgccaucggcaagauccaggacucccugagcuccaccgccagcgcgcucgggaagcugcaggacguggucaaccagaacgcccaggcccugaacacgcucgugaagcagcuguccagcaacuucggcgccaucuccagcgugcugaacgacauccucucccgccuggacccgcccgaggccgaggugcagaucgaccggcugaucaccgggcgccuccagagccugcagaccuacgugacccagcagcugauccgggcggccgagauccgcgccagcgccaaccucgccgcgaccaagauguccgagugcguccugggccagagcaagcggguggacuucugcggcaagggguaccagcugauguccuucccccagagcgccccgcacggcguggucuuccucaacgugacguacguccccgcccaggagaagaacuucaccaccgcccccgcgaucugcaacgacgggaaggcccacuucccccgcgagggcguguucguguccaacgggaccaacugguucgucacgcagcggaacuucuacgagccgcagaucaucaccaccgacaacaccuucgugagcggcaacugcgacguggucaucggcaucgugaacaacacgguguacgacccccugcagcccgagcuggacuccggcgggggcgggagcgacaucaucaagcuccugaacgagcaggucaacaaggagaugcaguccagcaaccuguacauguccaugagcuccuggugcuacacccacagccucgacggcgccgggcuguuccuguucgaccacgccgcggaggaguacgagcacgccaagaagcucaucaucuuccugaacgagaacaacgugcccgugcagcugaccuccaucagcgccccggagcacaaguucgagggccucacgcagaucuuccagaaggccuacgagcacgagcagcacaucuccgagagcaucaacaacaucguggaccacgccaucaaguccaaggaccacgcgaccuucaacuuccugcagugguacgucgccgagcagcacgaggaggaggugcuguucaaggacauccucgacaagaucgagcugaucgggaacgagaaccacggccuguaccucgccgaccaguacgugaaggggaucgccaagagccgcaaguccuga

SEQ ID NO: 11927 - RNA, 3948 nt, Artificial Sequence
  SARS-CoV-2/Wuhan/WIV05/2019__EPI_ISL_402128 spike protein CDS gc (1-1147)(I712C_T1077C) Ferritin construct
auguucguguuccugguccuccugccccuggugagcucccagugcgugaaccucaccacccgcacgcagcugccgcccgccuacaccaacagcuucacccggggcgucuacuaccccgacaagguguuccgcuccagcgugcugcacuccacccaggaccucuuccugcccuucuucagcaacgucacgugguuccacgccauccacguguccgggaccaacggcaccaagcgguucgacaacccggugcugcccuucaacgacggggucuacuucgcgagcaccgagaaguccaacaucauccgcggcuggaucuucgggacgacccucgacagcaagacccagucccugcugaucgugaacaacgccaccaacguggucaucaaggugugcgaguuccaguucugcaacgaccccuuccucggcguguacuaccacaagaacaacaagagcuggauggaguccgaguuccgggucuacagcuccgccaacaacugcacguucgaguacgugagccagcccuuccugauggaccuggagggcaagcaggggaacuucaagaaccuccgcgaguucguguucaagaacaucgacggcuacuucaagaucuacuccaagcacaccccgaucaaccugguccgggaccugccccagggguucagcgcccucgagccccugguggaccugcccaucggcaucaacaucacccgcuuccagacccuccuggcccugcaccgguccuaccucacgccgggggacagcagcuccggcuggaccgcgggcgccgccgccuacuacgugggguaccugcagccccgcaccuuccugcucaaguacaacgagaacggcaccaucacggacgcggucgacugcgcccuggacccccugagcgagaccaagugcacccucaaguccuucaccguggagaaggggaucuaccagacgagcaacuuccgggugcagcccaccgaguccaucguccgcuucccgaacaucaccaaccugugccccuucggcgagguguucaacgccacccgguucgccagcgucuacgccuggaaccgcaagcggaucuccaacugcguggcggacuacagcgugcuguacaacuccgccagcuucuccacguucaagugcuacggcgucagccccaccaagcucaacgaccugugcuucaccaacguguacgccgacuccuucgugauccgcggggacgagguccggcagaucgcccccggccagaccgggaagaucgccgacuacaacuacaagcugccggacgacuucacgggcugcgugaucgcguggaacagcaacaaccucgacuccaaggucgggggcaacuacaacuaccuguaccgccuguuccgcaagagcaaccucaagcccuucgagcgggacaucuccaccgagaucuaccaggccggcagcacccccugcaacgggguggagggcuucaacugcuacuucccccugcaguccuacggguuccagccgaccaacggcgugggguaccagcccuaccggguggucgugcugagcuucgagcuccugcacgcccccgccacggugugcggccccaagaaguccaccaaccuggucaagaacaagugcgugaacuucaacuucaacggccucaccgggaccggcgugcugaccgagagcaacaagaaguuccugccguuccagcaguucgggcgcgacaucgccgacacgaccgacgcgguccgcgacccccagacccuggagauccucgacaucacccccugcagcuucggcgggguguccgugaucacgccgggcaccaacaccagcaaccaggucgccgugcuguaccaggacgugaacugcaccgagguccccguggccauccacgccgaccagcugacgcccaccuggcggguguacuccaccggcagcaacgucuuccagacccgcgccgggugccucaucggcgcggagcacgugaacaacuccuacgagugcgacauccccaucggggccggcaucugcgccagcuaccagacgcagaccaacuccccgcggcgcgcccggagcguggcgucccagagcaucaucgccuacaccaugucccugggcgccgagaacagcgucgccuacuccaacaacagcugcgccauccccaccaacuucacgaucuccgugaccaccgagauccugcccgugagcaugaccaagacgagcgucgacugcaccauguacaucugcggggacuccaccgagugcagcaaccuccugcugcaguacggcuccuucugcacccagcucaaccgcgcgcugacggggaucgccguggagcaggacaagaacacccaggagguguucgcccaggucaagcagaucuacaagacgcccccgaucaaggacuucggcggguucaacuucagccagauccugcccgaccccuccaagcccagcaagcgguccuucaucgaggaccuccuguucaacaaggugacccuggccgacgccggcuucaucaagcaguacggcgacugccucggggacaucgcggcccgcgaccugaucugcgcccagaaguucaacggccugaccgugcucccgccccugcugaccgacgagaugaucgcccaguacaccagcgcccuccuggcggggaccaucacguccggcuggaccuucggggccggcgccgcccugcagauccccuucgcgaugcagauggccuaccgguucaacggcaucggggucacccagaacgugcucuacgagaaccagaagcugaucgccaaccaguucaacagcgccaucggcaagauccaggacucccugagcuccaccgccagcgcgcucgggaagcugcaggacguggucaaccagaacgcccaggcccugaacacgcucgugaagcagcuguccagcaacuucggcgccaucuccagcgugcugaacgacauccucucccgccuggacaaggucgaggccgaggugcagaucgaccggcugaucaccgggcgccuccagagccugcagaccuacgugacccagcagcugauccgggcggccgagauccgcgccagcgccaaccucgccgcgaccaagauguccgagugcguccugggccagagcaagcggguggacuucugcggcaagggguaccaccugauguccuucccccagagcgccccgcacggcguggucuuccuccacgugacguacguccccgcccaggagaagaacuucaccugcgcccccgcgaucugccacgacgggaaggcccacuucccccgcgagggcguguucguguccaacgggacccacugguucgucacgcagcggaacuucuacgagccgcagaucaucaccaccgacaacaccuucgugagcggcaacugcgacguggucaucggcaucgugaacaacacgguguacgacccccugcagcccgagcuggacuccggcgggggcgggagcgacaucaucaagcuccugaacgagcaggucaacaaggagaugcaguccagcaaccuguacauguccaugagcuccuggugcuacacccacagccucgacggcgccgggcuguuccuguucgaccacgccgcggaggaguacgagcacgccaagaagcucaucaucuuccugaacgagaacaacgugcccgugcagcugaccuccaucagcgccccggagcacaaguucgagggccucacgcagaucuuccagaaggccuacgagcacgagcagcacaucuccgagagcaucaacaacaucguggaccacgccaucaaguccaaggaccacgcgaccuucaacuuccugcagugguacgucgccgagcagcacgaggaggaggugcuguucaaggacauccucgacaagaucgagcugaucgggaacgagaaccacggccuguaccucgccgaccaguacgugaaggggaucgccaagagccgcaaguccuga

SEQ ID NO: 11928 - RNA, 3948 nt, Artificial Sequence
  SARS-CoV-2/Wuhan/WIV05/2019__EPI_ISL_402128 spike protein CDS gc (1-1147)(I714C_Y1110C) Ferritin construct
auguucguguuccugguccuccugccccuggugagcucccagugcgugaaccucaccacccgcacgcagcugccgcccgccuacaccaacagcuucacccggggcgucuacuaccccgacaagguguuccgcuccagcgugcugcacuccacccaggaccucuuccugcccuucuucagcaacgucacgugguuccacgccauccacguguccgggaccaacggcaccaagcgguucgacaacccggugcugcccuucaacgacggggucuacuucgcgagcaccgagaaguccaacaucauccgcggcuggaucuucgggacgacccucgacagcaagacccagucccugcugaucgugaacaacgccaccaacguggucaucaaggugugcgaguuccaguucugcaacgaccccuuccucggcguguacuaccacaagaacaacaagagcuggauggaguccgaguuccgggucuacagcuccgccaacaacugcacguucgaguacgugagccagcccuuccugauggaccuggagggcaagcaggggaacuucaagaaccuccgcgaguucguguucaagaacaucgacggcuacuucaagaucuacuccaagcacaccccgaucaaccugguccgggaccugccccagggguucagcgcccucgagccccugguggaccugcccaucggcaucaacaucacccgcuuccagacccuccuggcccugcaccgguccuaccucacgccgggggacagcagcuccggcuggaccgcgggcgccgccgccuacuacgugggguaccugcagccccgcaccuuccugcucaaguacaacgagaacggcaccaucacggacgcggucgacugcgcccuggacccccugagcgagaccaagugcacccucaaguccuucaccguggagaaggggaucuaccagacgagcaacuuccgggugcagcccaccgaguccaucguccgcuucccgaacaucaccaaccugugccccuucggcgagguguucaacgccacccgguucgccagcgucuacgccuggaaccgcaagcggaucuccaacugcguggcggacuacagcgugcuguacaacuccgccagcuucuccacguucaagugcuacggcgucagccccaccaagcucaacgaccugugcuucaccaacguguacgccgacuccuucgugauccgcggggacgagguccggcagaucgcccccggccagaccgggaagaucgccgacuacaacuacaagcugccggacgacuucacgggcugcgugaucgcguggaacagcaacaaccucgacuccaaggucgggggcaacuacaacuaccuguaccgccuguuccgcaagagcaaccucaagcccuucgagcgggacaucuccaccgagaucuaccaggccggcagcacccccugcaacgggguggagggcuucaacugcuacuucccccugcaguccuacggguuccagccgaccaacggcgugggguaccagcccuaccggguggucgugcugagcuucgagcuccugcacgcccccgccacggugugcggccccaagaaguccaccaaccuggucaagaacaagugcgugaacuucaacuucaacggccucaccgggaccggcgugcugaccgagagcaacaagaaguuccugccguuccagcaguucgggcgcgacaucgccgacacgaccgacgcgguccgcgacccccagacccuggagauccucgacaucacccccugcagcuucggcgggguguccgugaucacgccgggcaccaacaccagcaaccaggucgccgugcuguaccaggacgugaacugcaccgagguccccguggccauccacgccgaccagcugacgcccaccuggcggguguacuccaccggcagcaacgucuuccagacccgcgccgggugccucaucggcgcggagcacgugaacaacuccuacgagugcgacauccccaucggggccggcaucugcgccagcuaccagacgcagaccaacuccccgcggcgcgcccggagcguggcgucccagagcaucaucgccuacaccaugucccugggcgccgagaacagcgucgccuacuccaacaacagcaucgccugccccaccaacuucacgaucuccgugaccaccgagauccugcccgugagcaugaccaagacgagcgucgacugcaccauguacaucugcggggacuccaccgagugcagcaaccuccugcugcaguacggcuccuucugcacccagcucaaccgcgcgcugacggggaucgccguggagcaggacaagaacacccaggagguguucgcccaggucaagcagaucuacaagacgcccccgaucaaggacuucggcggguucaacuucagccagauccugcccgaccccuccaagcccagcaagcgguccuucaucgaggaccuccuguucaacaaggugacccuggccgacgccggcuucaucaagcaguacggcgacugccucggggacaucgcggcccgcgaccugaucugcgcccagaaguucaacggccugaccgugcucccgccccugcugaccgacgagaugaucgcccaguacaccagcgcccuccuggcggggaccaucacguccggcuggaccuucggggccggcgccgcccugcagauccccuucgcgaugcagauggccuaccgguucaacggcaucggggucacccagaacgugcucuacgagaaccagaagcugaucgccaaccaguucaacagcgccaucggcaagauccaggacucccugagcuccaccgccagcgcgcucgggaagcugcaggacguggucaaccagaacgcccaggcccugaacacgcucgugaagcagcuguccagcaacuucggcgccaucuccagcgugcugaacgacauccucucccgccuggacaaggucgaggccgaggugcagaucgaccggcugaucaccgggcgccuccagagccugcagaccuacgugacccagcagcugauccgggcggccgagauccgcgccagcgccaaccucgccgcgaccaagauguccgagugcguccugggccagagcaagcggguggacuucugcggcaagggguaccaccugauguccuucccccagagcgccccgcacggcguggucuuccuccacgugacguacguccccgcccaggagaagaacuucaccaccgcccccgcgaucugccacgacgggaaggcccacuucccccgcgagggcguguucguguccaacgggacccacugguucgucacgcagcggaacuucugcgagccgcagaucaucaccaccgacaacaccuucgugagcggcaacugcgacguggucaucggcaucgugaacaacacgguguacgacccccugcagcccgagcuggacuccggcgggggcgggagcgacaucaucaagcuccugaacgagcaggucaacaaggagaugcaguccagcaaccuguacauguccaugagcuccuggugcuacacccacagccucgacggcgccgggcuguuccuguucgaccacgccgcggaggaguacgagcacgccaagaagcucaucaucuuccugaacgagaacaacgugcccgugcagcugaccuccaucagcgccccggagcacaaguucgagggccucacgcagaucuuccagaaggccuacgagcacgagcagcacaucuccgagagcaucaacaacaucguggaccacgccaucaaguccaaggaccacgcgaccuucaacuuccugcagugguacgucgccgagcagcacgaggaggaggugcuguucaaggacauccucgacaagaucgagcugaucgggaacgagaaccacggccuguaccucgccgaccaguacgugaaggggaucgccaagagccgcaaguccuga

SEQ ID NO: 11929 - RNA, 3948 nt, Artificial Sequence
  SARS-CoV-2/Wuhan/WIV05/2019__EPI_ISL_402128 spike protein CDS gc (1-1147)(P715C_P1069C) Ferritin construct
auguucguguuccugguccuccugccccuggugagcucccagugcgugaaccucaccacccgcacgcagcugccgcccgccuacaccaacagcuucacccggggcgucuacuaccccgacaagguguuccgcuccagcgugcugcacuccacccaggaccucuuccugcccuucuucagcaacgucacgugguuccacgccauccacguguccgggaccaacggcaccaagcgguucgacaacccggugcugcccuucaacgacggggucuacuucgcgagcaccgagaaguccaacaucauccgcggcuggaucuucgggacgacccucgacagcaagacccagucccugcugaucgugaacaacgccaccaacguggucaucaaggugugcgaguuccaguucugcaacgaccccuuccucggcguguacuaccacaagaacaacaagagcuggauggaguccgaguuccgggucuacagcuccgccaacaacugcacguucgaguacgugagccagcccuuccugauggaccuggagggcaagcaggggaacuucaagaaccuccgcgaguucguguucaagaacaucgacggcuacuucaagaucuacuccaagcacaccccgaucaaccugguccgggaccugccccagggguucagcgcccucgagccccugguggaccugcccaucggcaucaacaucacccgcuuccagacccuccuggcccugcaccgguccuaccucacgccgggggacagcagcuccggcuggaccgcgggcgccgccgccuacuacgugggguaccugcagccccgcaccuuccugcucaaguacaacgagaacggcaccaucacggacgcggucgacugcgcccuggacccccugagcgagaccaagugcacccucaaguccuucaccguggagaaggggaucuaccagacgagcaacuuccgggugcagcccaccgaguccaucguccgcuucccgaacaucaccaaccugugccccuucggcgagguguucaacgccacccgguucgccagcgucuacgccuggaaccgcaagcggaucuccaacugcguggcggacuacagcgugcuguacaacuccgccagcuucuccacguucaagugcuacggcgucagccccaccaagcucaacgaccugugcuucaccaacguguacgccgacuccuucgugauccgcggggacgagguccggcagaucgcccccggccagaccgggaagaucgccgacuacaacuacaagcugccggacgacuucacgggcugcgugaucgcguggaacagcaacaaccucgacuccaaggucgggggcaacuacaacuaccuguaccgccuguuccgcaagagcaaccucaagcccuucgagcgggacaucuccaccgagaucuaccaggccggcagcacccccugcaacgggguggagggcuucaacugcuacuucccccugcaguccuacggguuccagccgaccaacggcgugggguaccagcccuaccggguggucgugcugagcuucgagcuccugcacgcccccgccacggugugcggccccaagaaguccaccaaccuggucaagaacaagugcgugaacuucaacuucaacggccucaccgggaccggcgugcugaccgagagcaacaagaaguuccugccguuccagcaguucgggcgcgacaucgccgacacgaccgacgcgguccgcgacccccagacccuggagauccucgacaucacccccugcagcuucggcgggguguccgugaucacgccgggcaccaacaccagcaaccaggucgccgugcuguaccaggacgugaacugcaccgagguccccguggccauccacgccgaccagcugacgcccaccuggcggguguacuccaccggcagcaacgucuuccagacccgcgccgggugccucaucggcgcggagcacgugaacaacuccuacgagugcgacauccccaucggggccggcaucugcgccagcuaccagacgcagaccaacuccccgcggcgcgcccggagcguggcgucccagagcaucaucgccuacaccaugucccugggcgccgagaacagcgucgccuacuccaacaacagcaucgccaucugcaccaacuucacgaucuccgugaccaccgagauccugcccgugagcaugaccaagacgagcgucgacugcaccauguacaucugcggggacuccaccgagugcagcaaccuccugcugcaguacggcuccuucugcacccagcucaaccgcgcgcugacggggaucgccguggagcaggacaagaacacccaggagguguucgcccaggucaagcagaucuacaagacgcccccgaucaaggacuucggcggguucaacuucagccagauccugcccgaccccuccaagcccagcaagcgguccuucaucgaggaccuccuguucaacaaggugacccuggccgacgccggcuucaucaagcaguacggcgacugccucggggacaucgcggcccgcgaccugaucugcgcccagaaguucaacggccugaccgugcucccgccccugcugaccgacgagaugaucgcccaguacaccagcgcccuccuggcggggaccaucacguccggcuggaccuucggggccggcgccgcccugcagauccccuucgcgaugcagauggccuaccgguucaacggcaucggggucacccagaacgugcucuacgagaaccagaagcugaucgccaaccaguucaacagcgccaucggcaagauccaggacucccugagcuccaccgccagcgcgcucgggaagcugcaggacguggucaaccagaacgcccaggcccugaacacgcucgugaagcagcuguccagcaacuucggcgccaucuccagcgugcugaacgacauccucucccgccuggacaaggucgaggccgaggugcagaucgaccggcugaucaccgggcgccuccagagccugcagaccuacgugacccagcagcugauccgggcggccgagauccgcgccagcgccaaccucgccgcgaccaagauguccgagugcguccugggccagagcaagcggguggacuucugcggcaagggguaccaccugauguccuucccccagagcgccccgcacggcguggucuuccuccacgugacguacgucugcgcccaggagaagaacuucaccaccgcccccgcgaucugccacgacgggaaggcccacuucccccgcgagggcguguucguguccaacgggacccacugguucgucacgcagcggaacuucuacgagccgcagaucaucaccaccgacaacaccuucgugagcggcaacugcgacguggucaucggcaucgugaacaacacgguguacgacccccugcagcccgagcuggacuccggcgggggcgggagcgacaucaucaagcuccugaacgagcaggucaacaaggagaugcaguccagcaaccuguacauguccaugagcuccuggugcuacacccacagccucgacggcgccgggcuguuccuguucgaccacgccgcggaggaguacgagcacgccaagaagcucaucaucuuccugaacgagaacaacgugcccgugcagcugaccuccaucagcgccccggagcacaaguucgagggccucacgcagaucuuccagaaggccuacgagcacgagcagcacaucuccgagagcaucaacaacaucguggaccacgccaucaaguccaaggaccacgcgaccuucaacuuccugcagugguacgucgccgagcagcacgaggaggaggugcuguucaaggacauccucgacaagaucgagcugaucgggaacgagaaccacggccuguaccucgccgaccaguacgugaaggggaucgccaagagccgcaaguccuga

SEQ ID NO: 11930 - RNA, 3948 nt, Artificial Sequence
  SARS-CoV-2/Wuhan/WIV05/2019__EPI_ISL_402128 spike protein CDS gc (1-1147)(G889C_L1034C) Ferritin construct
auguucguguuccugguccuccugccccuggugagcucccagugcgugaaccucaccacccgcacgcagcugccgcccgccuacaccaacagcuucacccggggcgucuacuaccccgacaagguguuccgcuccagcgugcugcacuccacccaggaccucuuccugcccuucuucagcaacgucacgugguuccacgccauccacguguccgggaccaacggcaccaagcgguucgacaacccggugcugcccuucaacgacggggucuacuucgcgagcaccgagaaguccaacaucauccgcggcuggaucuucgggacgacccucgacagcaagacccagucccugcugaucgugaacaacgccaccaacguggucaucaaggugugcgaguuccaguucugcaacgaccccuuccucggcguguacuaccacaagaacaacaagagcuggauggaguccgaguuccgggucuacagcuccgccaacaacugcacguucgaguacgugagccagcccuuccugauggaccuggagggcaagcaggggaacuucaagaaccuccgcgaguucguguucaagaacaucgacggcuacuucaagaucuacuccaagcacaccccgaucaaccugguccgggaccugccccagggguucagcgcccucgagccccugguggaccugcccaucggcaucaacaucacccgcuuccagacccuccuggcccugcaccgguccuaccucacgccgggggacagcagcuccggcuggaccgcgggcgccgccgccuacuacgugggguaccugcagccccgcaccuuccugcucaaguacaacgagaacggcaccaucacggacgcggucgacugcgcccuggacccccugagcgagaccaagugcacccucaaguccuucaccguggagaaggggaucuaccagacgagcaacuuccgggugcagcccaccgaguccaucguccgcuucccgaacaucaccaaccugugccccuucggcgagguguucaacgccacccgguucgccagcgucuacgccuggaaccgcaagcggaucuccaacugcguggcggacuacagcgugcuguacaacuccgccagcuucuccacguucaagugcuacggcgucagccccaccaagcucaacgaccugugcuucaccaacguguacgccgacuccuucgugauccgcggggacgagguccggcagaucgcccccggccagaccgggaagaucgccgacuacaacuacaagcugccggacgacuucacgggcugcgugaucgcguggaacagcaacaaccucgacuccaaggucgggggcaacuacaacuaccuguaccgccuguuccgcaagagcaaccucaagcccuucgagcgggacaucuccaccgagaucuaccaggccggcagcacccccugcaacgggguggagggcuucaacugcuacuucccccugcaguccuacggguuccagccgaccaacggcgugggguaccagcccuaccggguggucgugcugagcuucgagcuccugcacgcccccgccacggugugcggccccaagaaguccaccaaccuggucaagaacaagugcgugaacuucaacuucaacggccucaccgggaccggcgugcugaccgagagcaacaagaaguuccugccguuccagcaguucgggcgcgacaucgccgacacgaccgacgcgguccgcgacccccagacccuggagauccucgacaucacccccugcagcuucggcgggguguccgugaucacgccgggcaccaacaccagcaaccaggucgccgugcuguaccaggacgugaacugcaccgagguccccguggccauccacgccgaccagcugacgcccaccuggcggguguacuccaccggcagcaacgucuuccagacccgcgccgggugccucaucggcgcggagcacgugaacaacuccuacgagugcgacauccccaucggggccggcaucugcgccagcuaccagacgcagaccaacuccccgcggcgcgcccggagcguggcgucccagagcaucaucgccuacaccaugucccugggcgccgagaacagcgucgccuacuccaacaacagcaucgccauccccaccaacuucacgaucuccgugaccaccgagauccugcccgugagcaugaccaagacgagcgucgacugcaccauguacaucugcggggacuccaccgagugcagcaaccuccugcugcaguacggcuccuucugcacccagcucaaccgcgcgcugacggggaucgccguggagcaggacaagaacacccaggagguguucgcccaggucaagcagaucuacaagacgcccccgaucaaggacuucggcggguucaacuucagccagauccugcccgaccccuccaagcccagcaagcgguccuucaucgaggaccuccuguucaacaaggugacccuggccgacgccggcuucaucaagcaguacggcgacugccucggggacaucgcggcccgcgaccugaucugcgcccagaaguucaacggccugaccgugcucccgccccugcugaccgacgagaugaucgcccaguacaccagcgcccuccuggcggggaccaucacguccggcuggaccuucugcgccggcgccgcccugcagauccccuucgcgaugcagauggccuaccgguucaacggcaucggggucacccagaacgugcucuacgagaaccagaagcugaucgccaaccaguucaacagcgccaucggcaagauccaggacucccugagcuccaccgccagcgcgcucgggaagcugcaggacguggucaaccagaacgcccaggcccugaacacgcucgugaagcagcuguccagcaacuucggcgccaucuccagcgugcugaacgacauccucucccgccuggacaaggucgaggccgaggugcagaucgaccggcugaucaccgggcgccuccagagccugcagaccuacgugacccagcagcugauccgggcggccgagauccgcgccagcgccaaccucgccgcgaccaagauguccgagugcgucugcggccagagcaagcggguggacuucugcggcaagggguaccaccugauguccuucccccagagcgccccgcacggcguggucuuccuccacgugacguacguccccgcccaggagaagaacuucaccaccgcccccgcgaucugccacgacgggaaggcccacuucccccgcgagggcguguucguguccaacgggacccacugguucgucacgcagcggaacuucuacgagccgcagaucaucaccaccgacaacaccuucgugagcggcaacugcgacguggucaucggcaucgugaacaacacgguguacgacccccugcagcccgagcuggacuccggcgggggcgggagcgacaucaucaagcuccugaacgagcaggucaacaaggagaugcaguccagcaaccuguacauguccaugagcuccuggugcuacacccacagccucgacggcgccgggcuguuccuguucgaccacgccgcggaggaguacgagcacgccaagaagcucaucaucuuccugaacgagaacaacgugcccgugcagcugaccuccaucagcgccccggagcacaaguucgagggccucacgcagaucuuccagaaggccuacgagcacgagcagcacaucuccgagagcaucaacaacaucguggaccacgccaucaaguccaaggaccacgcgaccuucaacuuccugcagugguacgucgccgagcagcacgaggaggaggugcuguucaaggacauccucgacaagaucgagcugaucgggaacgagaaccacggccuguaccucgccgaccaguacgugaaggggaucgccaagagccgcaaguccuga

SEQ ID NO: 11931 - RNA, 3948 nt, Artificial Sequence
  SARS-CoV-2/Wuhan/WIV05/2019__EPI_ISL_402128 spike protein CDS gc (1-1147)(I909C_Y1047C) Ferritin construct
auguucguguuccugguccuccugccccuggugagcucccagugcgugaaccucaccacccgcacgcagcugccgcccgccuacaccaacagcuucacccggggcgucuacuaccccgacaagguguuccgcuccagcgugcugcacuccacccaggaccucuuccugcccuucuucagcaacgucacgugguuccacgccauccacguguccgggaccaacggcaccaagcgguucgacaacccggugcugcccuucaacgacggggucuacuucgcgagcaccgagaaguccaacaucauccgcggcuggaucuucgggacgacccucgacagcaagacccagucccugcugaucgugaacaacgccaccaacguggucaucaaggugugcgaguuccaguucugcaacgaccccuuccucggcguguacuaccacaagaacaacaagagcuggauggaguccgaguuccgggucuacagcuccgccaacaacugcacguucgaguacgugagccagcccuuccugauggaccuggagggcaagcaggggaacuucaagaaccuccgcgaguucguguucaagaacaucgacggcuacuucaagaucuacuccaagcacaccccgaucaaccugguccgggaccugccccagggguucagcgcccucgagccccugguggaccugcccaucggcaucaacaucacccgcuuccagacccuccuggcccugcaccgguccuaccucacgccgggggacagcagcuccggcuggaccgcgggcgccgccgccuacuacgugggguaccugcagccccgcaccuuccugcucaaguacaacgagaacggcaccaucacggacgcggucgacugcgcccuggacccccugagcgagaccaagugcacccucaaguccuucaccguggagaaggggaucuaccagacgagcaacuuccgggugcagcccaccgaguccaucguccgcuucccgaacaucaccaaccugugccccuucggcgagguguucaacgccacccgguucgccagcgucuacgccuggaaccgcaagcggaucuccaacugcguggcggacuacagcgugcuguacaacuccgccagcuucuccacguucaagugcuacggcgucagccccaccaagcucaacgaccugugcuucaccaacguguacgccgacuccuucgugauccgcggggacgagguccggcagaucgcccccggccagaccgggaagaucgccgacuacaacuacaagcugccggacgacuucacgggcugcgugaucgcguggaacagcaacaaccucgacuccaaggucgggggcaacuacaacuaccuguaccgccuguuccgcaagagcaaccucaagcccuucgagcgggacaucuccaccgagaucuaccaggccggcagcacccccugcaacgggguggagggcuucaacugcuacuucccccugcaguccuacggguuccagccgaccaacggcgugggguaccagcccuaccggguggucgugcugagcuucgagcuccugcacgcccccgccacggugugcggccccaagaaguccaccaaccuggucaagaacaagugcgugaacuucaacuucaacggccucaccgggaccggcgugcugaccgagagcaacaagaaguuccugccguuccagcaguucgggcgcgacaucgccgacacgaccgacgcgguccgcgacccccagacccuggagauccucgacaucacccccugcagcuucggcgggguguccgugaucacgccgggcaccaacaccagcaaccaggucgccgugcuguaccaggacgugaacugcaccgagguccccguggccauccacgccgaccagcugacgcccaccuggcggguguacuccaccggcagcaacgucuuccagacccgcgccgggugccucaucggcgcggagcacgugaacaacuccuacgagugcgacauccccaucggggccggcaucugcgccagcuaccagacgcagaccaacuccccgcggcgcgcccggagcguggcgucccagagcaucaucgccuacaccaugucccugggcgccgagaacagcgucgccuacuccaacaacagcaucgccauccccaccaacuucacgaucuccgugaccaccgagauccugcccgugagcaugaccaagacgagcgucgacugcaccauguacaucugcggggacuccaccgagugcagcaaccuccugcugcaguacggcuccuucugcacccagcucaaccgcgcgcugacggggaucgccguggagcaggacaagaacacccaggagguguucgcccaggucaagcagaucuacaagacgcccccgaucaaggacuucggcggguucaacuucagccagauccugcccgaccccuccaagcccagcaagcgguccuucaucgaggaccuccuguucaacaaggugacccuggccgacgccggcuucaucaagcaguacggcgacugccucggggacaucgcggcccgcgaccugaucugcgcccagaaguucaacggccugaccgugcucccgccccugcugaccgacgagaugaucgcccaguacaccagcgcccuccuggcggggaccaucacguccggcuggaccuucggggccggcgccgcccugcagauccccuucgcgaugcagauggccuaccgguucaacggcugcggggucacccagaacgugcucuacgagaaccagaagcugaucgccaaccaguucaacagcgccaucggcaagauccaggacucccugagcuccaccgccagcgcgcucgggaagcugcaggacguggucaaccagaacgcccaggcccugaacacgcucgugaagcagcuguccagcaacuucggcgccaucuccagcgugcugaacgacauccucucccgccuggacaaggucgaggccgaggugcagaucgaccggcugaucaccgggcgccuccagagccugcagaccuacgugacccagcagcugauccgggcggccgagauccgcgccagcgccaaccucgccgcgaccaagauguccgagugcguccugggccagagcaagcggguggacuucugcggcaaggggugccaccugauguccuucccccagagcgccccgcacggcguggucuuccuccacgugacguacguccccgcccaggagaagaacuucaccaccgcccccgcgaucugccacgacgggaaggcccacuucccccgcgagggcguguucguguccaacgggacccacugguucgucacgcagcggaacuucuacgagccgcagaucaucaccaccgacaacaccuucgugagcggcaacugcgacguggucaucggcaucgugaacaacacgguguacgacccccugcagcccgagcuggacuccggcgggggcgggagcgacaucaucaagcuccugaacgagcaggucaacaaggagaugcaguccagcaaccuguacauguccaugagcuccuggugcuacacccacagccucgacggcgccgggcuguuccuguucgaccacgccgcggaggaguacgagcacgccaagaagcucaucaucuuccugaacgagaacaacgugcccgugcagcugaccuccaucagcgccccggagcacaaguucgagggccucacgcagaucuuccagaaggccuacgagcacgagcagcacaucuccgagagcaucaacaacaucguggaccacgccaucaaguccaaggaccacgcgaccuucaacuuccugcagugguacgucgccgagcagcacgaggaggaggugcuguucaaggacauccucgacaagaucgagcugaucgggaacgagaaccacggccuguaccucgccgaccaguacgugaaggggaucgccaagagccgcaaguccuga

SEQ ID NO: 11932 - RNA, 3948 nt, Artificial Sequence
  SARS-CoV-2/Wuhan/WIV05/2019__EPI_ISL_402128 spike protein CDS gc (1-1147)(Q965C_S1003C) Ferritin construct
auguucguguuccugguccuccugccccuggugagcucccagugcgugaaccucaccacccgcacgcagcugccgcccgccuacaccaacagcuucacccggggcgucuacuaccccgacaagguguuccgcuccagcgugcugcacuccacccaggaccucuuccugcccuucuucagcaacgucacgugguuccacgccauccacguguccgggaccaacggcaccaagcgguucgacaacccggugcugcccuucaacgacggggucuacuucgcgagcaccgagaaguccaacaucauccgcggcuggaucuucgggacgacccucgacagcaagacccagucccugcugaucgugaacaacgccaccaacguggucaucaaggugugcgaguuccaguucugcaacgaccccuuccucggcguguacuaccacaagaacaacaagagcuggauggaguccgaguuccgggucuacagcuccgccaacaacugcacguucgaguacgugagccagcccuuccugauggaccuggagggcaagcaggggaacuucaagaaccuccgcgaguucguguucaagaacaucgacggcuacuucaagaucuacuccaagcacaccccgaucaaccugguccgggaccugccccagggguucagcgcccucgagccccugguggaccugcccaucggcaucaacaucacccgcuuccagacccuccuggcccugcaccgguccuaccucacgccgggggacagcagcuccggcuggaccgcgggcgccgccgccuacuacgugggguaccugcagccccgcaccuuccugcucaaguacaacgagaacggcaccaucacggacgcggucgacugcgcccuggacccccugagcgagaccaagugcacccucaaguccuucaccguggagaaggggaucuaccagacgagcaacuuccgggugcagcccaccgaguccaucguccgcuucccgaacaucaccaaccugugccccuucggcgagguguucaacgccacccgguucgccagcgucuacgccuggaaccgcaagcggaucuccaacugcguggcggacuacagcgugcuguacaacuccgccagcuucuccacguucaagugcuacggcgucagccccaccaagcucaacgaccugugcuucaccaacguguacgccgacuccuucgugauccgcggggacgagguccggcagaucgcccccggccagaccgggaagaucgccgacuacaacuacaagcugccggacgacuucacgggcugcgugaucgcguggaacagcaacaaccucgacuccaaggucgggggcaacuacaacuaccuguaccgccuguuccgcaagagcaaccucaagcccuucgagcgggacaucuccaccgagaucuaccaggccggcagcacccccugcaacgggguggagggcuucaacugcuacuucccccugcaguccuacggguuccagccgaccaacggcgugggguaccagcccuaccggguggucgugcugagcuucgagcuccugcacgcccccgccacggugugcggccccaagaaguccaccaaccuggucaagaacaagugcgugaacuucaacuucaacggccucaccgggaccggcgugcugaccgagagcaacaagaaguuccugccguuccagcaguucgggcgcgacaucgccgacacgaccgacgcgguccgcgacccccagacccuggagauccucgacaucacccccugcagcuucggcgggguguccgugaucacgccgggcaccaacaccagcaaccaggucgccgugcuguaccaggacgugaacugcaccgagguccccguggccauccacgccgaccagcugacgcccaccuggcggguguacuccaccggcagcaacgucuuccagacccgcgccgggugccucaucggcgcggagcacgugaacaacuccuacgagugcgacauccccaucggggccggcaucugcgccagcuaccagacgcagaccaacuccccgcggcgcgcccggagcguggcgucccagagcaucaucgccuacaccaugucccugggcgccgagaacagcgucgccuacuccaacaacagcaucgccauccccaccaacuucacgaucuccgugaccaccgagauccugcccgugagcaugaccaagacgagcgucgacugcaccauguacaucugcggggacuccaccgagugcagcaaccuccugcugcaguacggcuccuucugcacccagcucaaccgcgcgcugacggggaucgccguggagcaggacaagaacacccaggagguguucgcccaggucaagcagaucuacaagacgcccccgaucaaggacuucggcggguucaacuucagccagauccugcccgaccccuccaagcccagcaagcgguccuucaucgaggaccuccuguucaacaaggugacccuggccgacgccggcuucaucaagcaguacggcgacugccucggggacaucgcggcccgcgaccugaucugcgcccagaaguucaacggccugaccgugcucccgccccugcugaccgacgagaugaucgcccaguacaccagcgcccuccuggcggggaccaucacguccggcuggaccuucggggccggcgccgcccugcagauccccuucgcgaugcagauggccuaccgguucaacggcaucggggucacccagaacgugcucuacgagaaccagaagcugaucgccaaccaguucaacagcgccaucggcaagauccaggacucccugagcuccaccgccagcgcgcucgggaagcugcaggacguggucaaccagaacgcccaggcccugaacacgcucgugaagugccuguccagcaacuucggcgccaucuccagcgugcugaacgacauccucucccgccuggacaaggucgaggccgaggugcagaucgaccggcugaucaccgggcgccuccagugccugcagaccuacgugacccagcagcugauccgggcggccgagauccgcgccagcgccaaccucgccgcgaccaagauguccgagugcguccugggccagagcaagcggguggacuucugcggcaagggguaccaccugauguccuucccccagagcgccccgcacggcguggucuuccuccacgugacguacguccccgcccaggagaagaacuucaccaccgcccccgcgaucugccacgacgggaaggcccacuucccccgcgagggcguguucguguccaacgggacccacugguucgucacgcagcggaacuucuacgagccgcagaucaucaccaccgacaacaccuucgugagcggcaacugcgacguggucaucggcaucgugaacaacacgguguacgacccccugcagcccgagcuggacuccggcgggggcgggagcgacaucaucaagcuccugaacgagcaggucaacaaggagaugcaguccagcaaccuguacauguccaugagcuccuggugcuacacccacagccucgacggcgccgggcuguuccuguucgaccacgccgcggaggaguacgagcacgccaagaagcucaucaucuuccugaacgagaacaacgugcccgugcagcugaccuccaucagcgccccggagcacaaguucgagggccucacgcagaucuuccagaaggccuacgagcacgagcagcacaucuccgagagcaucaacaacaucguggaccacgccaucaaguccaaggaccacgcgaccuucaacuuccugcagugguacgucgccgagcagcacgaggaggaggugcuguucaaggacauccucgacaagaucgagcugaucgggaacgagaaccacggccuguaccucgccgaccaguacgugaaggggaucgccaagagccgcaaguccuga

SEQ ID NO: 11933 - RNA, 3948 nt, Artificial Sequence
  SARS-CoV-2/Wuhan/WIV05/2019__EPI_ISL_402128 spike protein CDS gc (1-1147)(F970C_G999C) Ferritin construct
auguucguguuccugguccuccugccccuggugagcucccagugcgugaaccucaccacccgcacgcagcugccgcccgccuacaccaacagcuucacccggggcgucuacuaccccgacaagguguuccgcuccagcgugcugcacuccacccaggaccucuuccugcccuucuucagcaacgucacgugguuccacgccauccacguguccgggaccaacggcaccaagcgguucgacaacccggugcugcccuucaacgacggggucuacuucgcgagcaccgagaaguccaacaucauccgcggcuggaucuucgggacgacccucgacagcaagacccagucccugcugaucgugaacaacgccaccaacguggucaucaaggugugcgaguuccaguucugcaacgaccccuuccucggcguguacuaccacaagaacaacaagagcuggauggaguccgaguuccgggucuacagcuccgccaacaacugcacguucgaguacgugagccagcccuuccugauggaccuggagggcaagcaggggaacuucaagaaccuccgcgaguucguguucaagaacaucgacggcuacuucaagaucuacuccaagcacaccccgaucaaccugguccgggaccugccccagggguucagcgcccucgagccccugguggaccugcccaucggcaucaacaucacccgcuuccagacccuccuggcccugcaccgguccuaccucacgccgggggacagcagcuccggcuggaccgcgggcgccgccgccuacuacgugggguaccugcagccccgcaccuuccugcucaaguacaacgagaacggcaccaucacggacgcggucgacugcgcccuggacccccugagcgagaccaagugcacccucaaguccuucaccguggagaaggggaucuaccagacgagcaacuuccgggugcagcccaccgaguccaucguccgcuucccgaacaucaccaaccugugccccuucggcgagguguucaacgccacccgguucgccagcgucuacgccuggaaccgcaagcggaucuccaacugcguggcggacuacagcgugcuguacaacuccgccagcuucuccacguucaagugcuacggcgucagccccaccaagcucaacgaccugugcuucaccaacguguacgccgacuccuucgugauccgcggggacgagguccggcagaucgcccccggccagaccgggaagaucgccgacuacaacuacaagcugccggacgacuucacgggcugcgugaucgcguggaacagcaacaaccucgacuccaaggucgggggcaacuacaacuaccuguaccgccuguuccgcaagagcaaccucaagcccuucgagcgggacaucuccaccgagaucuaccaggccggcagcacccccugcaacgggguggagggcuucaacugcuacuucccccugcaguccuacggguuccagccgaccaacggcgugggguaccagcccuaccggguggucgugcugagcuucgagcuccugcacgcccccgccacggugugcggccccaagaaguccaccaaccuggucaagaacaagugcgugaacuucaacuucaacggccucaccgggaccggcgugcugaccgagagcaacaagaaguuccugccguuccagcaguucgggcgcgacaucgccgacacgaccgacgcgguccgcgacccccagacccuggagauccucgacaucacccccugcagcuucggcgggguguccgugaucacgccgggcaccaacaccagcaaccaggucgccgugcuguaccaggacgugaacugcaccgagguccccguggccauccacgccgaccagcugacgcccaccuggcggguguacuccaccggcagcaacgucuuccagacccgcgccgggugccucaucggcgcggagcacgugaacaacuccuacgagugcgacauccccaucggggccggcaucugcgccagcuaccagacgcagaccaacuccccgcggcgcgcccggagcguggcgucccagagcaucaucgccuacaccaugucccugggcgccgagaacagcgucgccuacuccaacaacagcaucgccauccccaccaacuucacgaucuccgugaccaccgagauccugcccgugagcaugaccaagacgagcgucgacugcaccauguacaucugcggggacuccaccgagugcagcaaccuccugcugcaguacggcuccuucugcacccagcucaaccgcgcgcugacggggaucgccguggagcaggacaagaacacccaggagguguucgcccaggucaagcagaucuacaagacgcccccgaucaaggacuucggcggguucaacuucagccagauccugcccgaccccuccaagcccagcaagcgguccuucaucgaggaccuccuguucaacaaggugacccuggccgacgccggcuucaucaagcaguacggcgacugccucggggacaucgcggcccgcgaccugaucugcgcccagaaguucaacggccugaccgugcucccgccccugcugaccgacgagaugaucgcccaguacaccagcgcccuccuggcggggaccaucacguccggcuggaccuucggggccggcgccgcccugcagauccccuucgcgaugcagauggccuaccgguucaacggcaucggggucacccagaacgugcucuacgagaaccagaagcugaucgccaaccaguucaacagcgccaucggcaagauccaggacucccugagcuccaccgccagcgcgcucgggaagcugcaggacguggucaaccagaacgcccaggcccugaacacgcucgugaagcagcuguccagcaacugcggcgccaucuccagcgugcugaacgacauccucucccgccuggacaaggucgaggccgaggugcagaucgaccggcugaucaccugucgccuccagagccugcagaccuacgugacccagcagcugauccgggcggccgagauccgcgccagcgccaaccucgccgcgaccaagauguccgagugcguccugggccagagcaagcggguggacuucugcggcaagggguaccaccugauguccuucccccagagcgccccgcacggcguggucuuccuccacgugacguacguccccgcccaggagaagaacuucaccaccgcccccgcgaucugccacgacgggaaggcccacuucccccgcgagggcguguucguguccaacgggacccacugguucgucacgcagcggaacuucuacgagccgcagaucaucaccaccgacaacaccuucgugagcggcaacugcgacguggucaucggcaucgugaacaacacgguguacgacccccugcagcccgagcuggacuccggcgggggcgggagcgacaucaucaagcuccugaacgagcaggucaacaaggagaugcaguccagcaaccuguacauguccaugagcuccuggugcuacacccacagccucgacggcgccgggcuguuccuguucgaccacgccgcggaggaguacgagcacgccaagaagcucaucaucuuccugaacgagaacaacgugcccgugcagcugaccuccaucagcgccccggagcacaaguucgagggccucacgcagaucuuccagaaggccuacgagcacgagcagcacaucuccgagagcaucaacaacaucguggaccacgccaucaaguccaaggaccacgcgaccuucaacuuccugcagugguacgucgccgagcagcacgaggaggaggugcuguucaaggacauccucgacaagaucgagcugaucgggaacgagaaccacggccuguaccucgccgaccaguacgugaaggggaucgccaagagccgcaaguccuga

SEQ ID NO: 11934 - RNA, 3948 nt, Artificial Sequence
  SARS-CoV-2/Wuhan/WIV05/2019__EPI_ISL_402128 spike protein CDS gc (1-1147)(A972C_R995C) Ferritin construct
auguucguguuccugguccuccugccccuggugagcucccagugcgugaaccucaccacccgcacgcagcugccgcccgccuacaccaacagcuucacccggggcgucuacuaccccgacaagguguuccgcuccagcgugcugcacuccacccaggaccucuuccugcccuucuucagcaacgucacgugguuccacgccauccacguguccgggaccaacggcaccaagcgguucgacaacccggugcugcccuucaacgacggggucuacuucgcgagcaccgagaaguccaacaucauccgcggcuggaucuucgggacgacccucgacagcaagacccagucccugcugaucgugaacaacgccaccaacguggucaucaaggugugcgaguuccaguucugcaacgaccccuuccucggcguguacuaccacaagaacaacaagagcuggauggaguccgaguuccgggucuacagcuccgccaacaacugcacguucgaguacgugagccagcccuuccugauggaccuggagggcaagcaggggaacuucaagaaccuccgcgaguucguguucaagaacaucgacggcuacuucaagaucuacuccaagcacaccccgaucaaccugguccgggaccugccccagggguucagcgcccucgagccccugguggaccugcccaucggcaucaacaucacccgcuuccagacccuccuggcccugcaccgguccuaccucacgccgggggacagcagcuccggcuggaccgcgggcgccgccgccuacuacgugggguaccugcagccccgcaccuuccugcucaaguacaacgagaacggcaccaucacggacgcggucgacugcgcccuggacccccugagcgagaccaagugcacccucaaguccuucaccguggagaaggggaucuaccagacgagcaacuuccgggugcagcccaccgaguccaucguccgcuucccgaacaucaccaaccugugccccuucggcgagguguucaacgccacccgguucgccagcgucuacgccuggaaccgcaagcggaucuccaacugcguggcggacuacagcgugcuguacaacuccgccagcuucuccacguucaagugcuacggcgucagccccaccaagcucaacgaccugugcuucaccaacguguacgccgacuccuucgugauccgcggggacgagguccggcagaucgcccccggccagaccgggaagaucgccgacuacaacuacaagcugccggacgacuucacgggcugcgugaucgcguggaacagcaacaaccucgacuccaaggucgggggcaacuacaacuaccuguaccgccuguuccgcaagagcaaccucaagcccuucgagcgggacaucuccaccgagaucuaccaggccggcagcacccccugcaacgggguggagggcuucaacugcuacuucccccugcaguccuacggguuccagccgaccaacggcgugggguaccagcccuaccggguggucgugcugagcuucgagcuccugcacgcccccgccacggugugcggccccaagaaguccaccaaccuggucaagaacaagugcgugaacuucaacuucaacggccucaccgggaccggcgugcugaccgagagcaacaagaaguuccugccguuccagcaguucgggcgcgacaucgccgacacgaccgacgcgguccgcgacccccagacccuggagauccucgacaucacccccugcagcuucggcgggguguccgugaucacgccgggcaccaacaccagcaaccaggucgccgugcuguaccaggacgugaacugcaccgagguccccguggccauccacgccgaccagcugacgcccaccuggcggguguacuccaccggcagcaacgucuuccagacccgcgccgggugccucaucggcgcggagcacgugaacaacuccuacgagugcgacauccccaucggggccggcaucugcgccagcuaccagacgcagaccaacuccccgcggcgcgcccggagcguggcgucccagagcaucaucgccuacaccaugucccugggcgccgagaacagcgucgccuacuccaacaacagcaucgccauccccaccaacuucacgaucuccgugaccaccgagauccugcccgugagcaugaccaagacgagcgucgacugcaccauguacaucugcggggacuccaccgagugcagcaaccuccugcugcaguacggcuccuucugcacccagcucaaccgcgcgcugacggggaucgccguggagcaggacaagaacacccaggagguguucgcccaggucaagcagaucuacaagacgcccccgaucaaggacuucggcggguucaacuucagccagauccugcccgaccccuccaagcccagcaagcgguccuucaucgaggaccuccuguucaacaaggugacccuggccgacgccggcuucaucaagcaguacggcgacugccucggggacaucgcggcccgcgaccugaucugcgcccagaaguucaacggccugaccgugcucccgccccugcugaccgacgagaugaucgcccaguacaccagcgcccuccuggcggggaccaucacguccggcuggaccuucggggccggcgccgcccugcagauccccuucgcgaugcagauggccuaccgguucaacggcaucggggucacccagaacgugcucuacgagaaccagaagcugaucgccaaccaguucaacagcgccaucggcaagauccaggacucccugagcuccaccgccagcgcgcucgggaagcugcaggacguggucaaccagaacgcccaggcccugaacacgcucgugaagcagcuguccagcaacuucggcugcaucuccagcgugcugaacgacauccucucccgccuggacaaggucgaggccgaggugcagaucgacugccugaucaccgggcgccuccagagccugcagaccuacgugacccagcagcugauccgggcggccgagauccgcgccagcgccaaccucgccgcgaccaagauguccgagugcguccugggccagagcaagcggguggacuucugcggcaagggguaccaccugauguccuucccccagagcgccccgcacggcguggucuuccuccacgugacguacguccccgcccaggagaagaacuucaccaccgcccccgcgaucugccacgacgggaaggcccacuucccccgcgagggcguguucguguccaacgggacccacugguucgucacgcagcggaacuucuacgagccgcagaucaucaccaccgacaacaccuucgugagcggcaacugcgacguggucaucggcaucgugaacaacacgguguacgacccccugcagcccgagcuggacuccggcgggggcgggagcgacaucaucaagcuccugaacgagcaggucaacaaggagaugcaguccagcaaccuguacauguccaugagcuccuggugcuacacccacagccucgacggcgccgggcuguuccuguucgaccacgccgcggaggaguacgagcacgccaagaagcucaucaucuuccugaacgagaacaacgugcccgugcagcugaccuccaucagcgccccggagcacaaguucgagggccucacgcagaucuuccagaaggccuacgagcacgagcagcacaucuccgagagcaucaacaacaucguggaccacgccaucaaguccaaggaccacgcgaccuucaacuuccugcagugguacgucgccgagcagcacgaggaggaggugcuguucaaggacauccucgacaagaucgagcugaucgggaacgagaaccacggccuguaccucgccgaccaguacgugaaggggaucgccaagagccgcaaguccuga

SEQ ID NO: 11935 - RNA, 3948 nt, Artificial Sequence
  SARS-CoV-2/Wuhan/WIV05/2019__EPI_ISL_402128 spike protein CDS gc (1-1147)(A890C_V1040C) Ferritin construct
auguucguguuccugguccuccugccccuggugagcucccagugcgugaaccucaccacccgcacgcagcugccgcccgccuacaccaacagcuucacccggggcgucuacuaccccgacaagguguuccgcuccagcgugcugcacuccacccaggaccucuuccugcccuucuucagcaacgucacgugguuccacgccauccacguguccgggaccaacggcaccaagcgguucgacaacccggugcugcccuucaacgacggggucuacuucgcgagcaccgagaaguccaacaucauccgcggcuggaucuucgggacgacccucgacagcaagacccagucccugcugaucgugaacaacgccaccaacguggucaucaaggugugcgaguuccaguucugcaacgaccccuuccucggcguguacuaccacaagaacaacaagagcuggauggaguccgaguuccgggucuacagcuccgccaacaacugcacguucgaguacgugagccagcccuuccugauggaccuggagggcaagcaggggaacuucaagaaccuccgcgaguucguguucaagaacaucgacggcuacuucaagaucuacuccaagcacaccccgaucaaccugguccgggaccugccccagggguucagcgcccucgagccccugguggaccugcccaucggcaucaacaucacccgcuuccagacccuccuggcccugcaccgguccuaccucacgccgggggacagcagcuccggcuggaccgcgggcgccgccgccuacuacgugggguaccugcagccccgcaccuuccugcucaaguacaacgagaacggcaccaucacggacgcggucgacugcgcccuggacccccugagcgagaccaagugcacccucaaguccuucaccguggagaaggggaucuaccagacgagcaacuuccgggugcagcccaccgaguccaucguccgcuucccgaacaucaccaaccugugccccuucggcgagguguucaacgccacccgguucgccagcgucuacgccuggaaccgcaagcggaucuccaacugcguggcggacuacagcgugcuguacaacuccgccagcuucuccacguucaagugcuacggcgucagccccaccaagcucaacgaccugugcuucaccaacguguacgccgacuccuucgugauccgcggggacgagguccggcagaucgcccccggccagaccgggaagaucgccgacuacaacuacaagcugccggacgacuucacgggcugcgugaucgcguggaacagcaacaaccucgacuccaaggucgggggcaacuacaacuaccuguaccgccuguuccgcaagagcaaccucaagcccuucgagcgggacaucuccaccgagaucuaccaggccggcagcacccccugcaacgggguggagggcuucaacugcuacuucccccugcaguccuacggguuccagccgaccaacggcgugggguaccagcccuaccggguggucgugcugagcuucgagcuccugcacgcccccgccacggugugcggccccaagaaguccaccaaccuggucaagaacaagugcgugaacuucaacuucaacggccucaccgggaccggcgugcugaccgagagcaacaagaaguuccugccguuccagcaguucgggcgcgacaucgccgacacgaccgacgcgguccgcgacccccagacccuggagauccucgacaucacccccugcagcuucggcgggguguccgugaucacgccgggcaccaacaccagcaaccaggucgccgugcuguaccaggacgugaacugcaccgagguccccguggccauccacgccgaccagcugacgcccaccuggcggguguacuccaccggcagcaacgucuuccagacccgcgccgggugccucaucggcgcggagcacgugaacaacuccuacgagugcgacauccccaucggggccggcaucugcgccagcuaccagacgcagaccaacuccccgcggcgcgcccggagcguggcgucccagagcaucaucgccuacaccaugucccugggcgccgagaacagcgucgccuacuccaacaacagcaucgccauccccaccaacuucacgaucuccgugaccaccgagauccugcccgugagcaugaccaagacgagcgucgacugcaccauguacaucugcggggacuccaccgagugcagcaaccuccugcugcaguacggcuccuucugcacccagcucaaccgcgcgcugacggggaucgccguggagcaggacaagaacacccaggagguguucgcccaggucaagcagaucuacaagacgcccccgaucaaggacuucggcggguucaacuucagccagauccugcccgaccccuccaagcccagcaagcgguccuucaucgaggaccuccuguucaacaaggugacccuggccgacgccggcuucaucaagcaguacggcgacugccucggggacaucgcggcccgcgaccugaucugcgcccagaaguucaacggccugaccgugcucccgccccugcugaccgacgagaugaucgcccaguacaccagcgcccuccuggcggggaccaucacguccggcuggaccuucgggugcggcgccgcccugcagauccccuucgcgaugcagauggccuaccgguucaacggcaucggggucacccagaacgugcucuacgagaaccagaagcugaucgccaaccaguucaacagcgccaucggcaagauccaggacucccugagcuccaccgccagcgcgcucgggaagcugcaggacguggucaaccagaacgcccaggcccugaacacgcucgugaagcagcuguccagcaacuucggcgccaucuccagcgugcugaacgacauccucucccgccuggacaaggucgaggccgaggugcagaucgaccggcugaucaccgggcgccuccagagccugcagaccuacgugacccagcagcugauccgggcggccgagauccgcgccagcgccaaccucgccgcgaccaagauguccgagugcguccugggccagagcaagcggugcgacuucugcggcaagggguaccaccugauguccuucccccagagcgccccgcacggcguggucuuccuccacgugacguacguccccgcccaggagaagaacuucaccaccgcccccgcgaucugccacgacgggaaggcccacuucccccgcgagggcguguucguguccaacgggacccacugguucgucacgcagcggaacuucuacgagccgcagaucaucaccaccgacaacaccuucgugagcggcaacugcgacguggucaucggcaucgugaacaacacgguguacgacccccugcagcccgagcuggacuccggcgggggcgggagcgacaucaucaagcuccugaacgagcaggucaacaaggagaugcaguccagcaaccuguacauguccaugagcuccuggugcuacacccacagccucgacggcgccgggcuguuccuguucgaccacgccgcggaggaguacgagcacgccaagaagcucaucaucuuccugaacgagaacaacgugcccgugcagcugaccuccaucagcgccccggagcacaaguucgagggccucacgcagaucuuccagaaggccuacgagcacgagcagcacaucuccgagagcaucaacaacaucguggaccacgccaucaaguccaaggaccacgcgaccuucaacuuccugcagugguacgucgccgagcagcacgaggaggaggugcuguucaaggacauccucgacaagaucgagcugaucgggaacgagaaccacggccuguaccucgccgaccaguacgugaaggggaucgccaagagccgcaaguccuga

SEQ ID NO: 11936 - RNA, 3948 nt, Artificial Sequence
  SARS-CoV-2/Wuhan/WIV05/2019__EPI_ISL_402128 spike protein CDS gc (1-1147)(T874C_S1055C) Ferritin construct
auguucguguuccugguccuccugccccuggugagcucccagugcgugaaccucaccacccgcacgcagcugccgcccgccuacaccaacagcuucacccggggcgucuacuaccccgacaagguguuccgcuccagcgugcugcacuccacccaggaccucuuccugcccuucuucagcaacgucacgugguuccacgccauccacguguccgggaccaacggcaccaagcgguucgacaacccggugcugcccuucaacgacggggucuacuucgcgagcaccgagaaguccaacaucauccgcggcuggaucuucgggacgacccucgacagcaagacccagucccugcugaucgugaacaacgccaccaacguggucaucaaggugugcgaguuccaguucugcaacgaccccuuccucggcguguacuaccacaagaacaacaagagcuggauggaguccgaguuccgggucuacagcuccgccaacaacugcacguucgaguacgugagccagcccuuccugauggaccuggagggcaagcaggggaacuucaagaaccuccgcgaguucguguucaagaacaucgacggcuacuucaagaucuacuccaagcacaccccgaucaaccugguccgggaccugccccagggguucagcgcccucgagccccugguggaccugcccaucggcaucaacaucacccgcuuccagacccuccuggcccugcaccgguccuaccucacgccgggggacagcagcuccggcuggaccgcgggcgccgccgccuacuacgugggguaccugcagccccgcaccuuccugcucaaguacaacgagaacggcaccaucacggacgcggucgacugcgcccuggacccccugagcgagaccaagugcacccucaaguccuucaccguggagaaggggaucuaccagacgagcaacuuccgggugcagcccaccgaguccaucguccgcuucccgaacaucaccaaccugugccccuucggcgagguguucaacgccacccgguucgccagcgucuacgccuggaaccgcaagcggaucuccaacugcguggcggacuacagcgugcuguacaacuccgccagcuucuccacguucaagugcuacggcgucagccccaccaagcucaacgaccugugcuucaccaacguguacgccgacuccuucgugauccgcggggacgagguccggcagaucgcccccggccagaccgggaagaucgccgacuacaacuacaagcugccggacgacuucacgggcugcgugaucgcguggaacagcaacaaccucgacuccaaggucgggggcaacuacaacuaccuguaccgccuguuccgcaagagcaaccucaagcccuucgagcgggacaucuccaccgagaucuaccaggccggcagcacccccugcaacgggguggagggcuucaacugcuacuucccccugcaguccuacggguuccagccgaccaacggcgugggguaccagcccuaccggguggucgugcugagcuucgagcuccugcacgcccccgccacggugugcggccccaagaaguccaccaaccuggucaagaacaagugcgugaacuucaacuucaacggccucaccgggaccggcgugcugaccgagagcaacaagaaguuccugccguuccagcaguucgggcgcgacaucgccgacacgaccgacgcgguccgcgacccccagacccuggagauccucgacaucacccccugcagcuucggcgggguguccgugaucacgccgggcaccaacaccagcaaccaggucgccgugcuguaccaggacgugaacugcaccgagguccccguggccauccacgccgaccagcugacgcccaccuggcggguguacuccaccggcagcaacgucuuccagacccgcgccgggugccucaucggcgcggagcacgugaacaacuccuacgagugcgacauccccaucggggccggcaucugcgccagcuaccagacgcagaccaacuccccgcggcgcgcccggagcguggcgucccagagcaucaucgccuacaccaugucccugggcgccgagaacagcgucgccuacuccaacaacagcaucgccauccccaccaacuucacgaucuccgugaccaccgagauccugcccgugagcaugaccaagacgagcgucgacugcaccauguacaucugcggggacuccaccgagugcagcaaccuccugcugcaguacggcuccuucugcacccagcucaaccgcgcgcugacggggaucgccguggagcaggacaagaacacccaggagguguucgcccaggucaagcagaucuacaagacgcccccgaucaaggacuucggcggguucaacuucagccagauccugcccgaccccuccaagcccagcaagcgguccuucaucgaggaccuccuguucaacaaggugacccuggccgacgccggcuucaucaagcaguacggcgacugccucggggacaucgcggcccgcgaccugaucugcgcccagaaguucaacggccugaccgugcucccgccccugcugaccgacgagaugaucgcccaguacugcagcgcccuccuggcggggaccaucacguccggcuggaccuucggggccggcgccgcccugcagauccccuucgcgaugcagauggccuaccgguucaacggcaucggggucacccagaacgugcucuacgagaaccagaagcugaucgccaaccaguucaacagcgccaucggcaagauccaggacucccugagcuccaccgccagcgcgcucgggaagcugcaggacguggucaaccagaacgcccaggcccugaacacgcucgugaagcagcuguccagcaacuucggcgccaucuccagcgugcugaacgacauccucucccgccuggacaaggucgaggccgaggugcagaucgaccggcugaucaccgggcgccuccagagccugcagaccuacgugacccagcagcugauccgggcggccgagauccgcgccagcgccaaccucgccgcgaccaagauguccgagugcguccugggccagagcaagcggguggacuucugcggcaagggguaccaccugauguccuucccccagugcgccccgcacggcguggucuuccuccacgugacguacguccccgcccaggagaagaacuucaccaccgcccccgcgaucugccacgacgggaaggcccacuucccccgcgagggcguguucguguccaacgggacccacugguucgucacgcagcggaacuucuacgagccgcagaucaucaccaccgacaacaccuucgugagcggcaacugcgacguggucaucggcaucgugaacaacacgguguacgacccccugcagcccgagcuggacuccggcgggggcgggagcgacaucaucaagcuccugaacgagcaggucaacaaggagaugcaguccagcaaccuguacauguccaugagcuccuggugcuacacccacagccucgacggcgccgggcuguuccuguucgaccacgccgcggaggaguacgagcacgccaagaagcucaucaucuuccugaacgagaacaacgugcccgugcagcugaccuccaucagcgccccggagcacaaguucgagggccucacgcagaucuuccagaaggccuacgagcacgagcagcacaucuccgagagcaucaacaacaucguggaccacgccaucaaguccaaggaccacgcgaccuucaacuuccugcagugguacgucgccgagcagcacgaggaggaggugcuguucaaggacauccucgacaagaucgagcugaucgggaacgagaaccacggccuguaccucgccgaccaguacgugaaggggaucgccaagagccgcaaguccuga

SEQ ID NO: 11937 - RNA, 3534 nt, Artificial Sequence
  SARS-CoV-2/Wuhan/WIV05/2019__EPI_ISL_402128 spike protein CDS gc (1-1147) Foldon construct
auguucguguuccugguccuccugccccuggugagcucccagugcgugaaccucaccacccgcacgcagcugccgcccgccuacaccaacagcuucacccggggcgucuacuaccccgacaagguguuccgcuccagcgugcugcacuccacccaggaccucuuccugcccuucuucagcaacgucacgugguuccacgccauccacguguccgggaccaacggcaccaagcgguucgacaacccggugcugcccuucaacgacggggucuacuucgcgagcaccgagaaguccaacaucauccgcggcuggaucuucgggacgacccucgacagcaagacccagucccugcugaucgugaacaacgccaccaacguggucaucaaggugugcgaguuccaguucugcaacgaccccuuccucggcguguacuaccacaagaacaacaagagcuggauggaguccgaguuccgggucuacagcuccgccaacaacugcacguucgaguacgugagccagcccuuccugauggaccuggagggcaagcaggggaacuucaagaaccuccgcgaguucguguucaagaacaucgacggcuacuucaagaucuacuccaagcacaccccgaucaaccugguccgggaccugccccagggguucagcgcccucgagccccugguggaccugcccaucggcaucaacaucacccgcuuccagacccuccuggcccugcaccgguccuaccucacgccgggggacagcagcuccggcuggaccgcgggcgccgccgccuacuacgugggguaccugcagccccgcaccuuccugcucaaguacaacgagaacggcaccaucacggacgcggucgacugcgcccuggacccccugagcgagaccaagugcacccucaaguccuucaccguggagaaggggaucuaccagacgagcaacuuccgggugcagcccaccgaguccaucguccgcuucccgaacaucaccaaccugugccccuucggcgagguguucaacgccacccgguucgccagcgucuacgccuggaaccgcaagcggaucuccaacugcguggcggacuacagcgugcuguacaacuccgccagcuucuccacguucaagugcuacggcgucagccccaccaagcucaacgaccugugcuucaccaacguguacgccgacuccuucgugauccgcggggacgagguccggcagaucgcccccggccagaccgggaagaucgccgacuacaacuacaagcugccggacgacuucacgggcugcgugaucgcguggaacagcaacaaccucgacuccaaggucgggggcaacuacaacuaccuguaccgccuguuccgcaagagcaaccucaagcccuucgagcgggacaucuccaccgagaucuaccaggccggcagcacccccugcaacgggguggagggcuucaacugcuacuucccccugcaguccuacggguuccagccgaccaacggcgugggguaccagcccuaccggguggucgugcugagcuucgagcuccugcacgcccccgccacggugugcggccccaagaaguccaccaaccuggucaagaacaagugcgugaacuucaacuucaacggccucaccgggaccggcgugcugaccgagagcaacaagaaguuccugccguuccagcaguucgggcgcgacaucgccgacacgaccgacgcgguccgcgacccccagacccuggagauccucgacaucacccccugcagcuucggcgggguguccgugaucacgccgggcaccaacaccagcaaccaggucgccgugcuguaccaggacgugaacugcaccgagguccccguggccauccacgccgaccagcugacgcccaccuggcggguguacuccaccggcagcaacgucuuccagacccgcgccgggugccucaucggcgcggagcacgugaacaacuccuacgagugcgacauccccaucggggccggcaucugcgccagcuaccagacgcagaccaacuccccgcggcgcgcccggagcguggcgucccagagcaucaucgccuacaccaugucccugggcgccgagaacagcgucgccuacuccaacaacagcaucgccauccccaccaacuucacgaucuccgugaccaccgagauccugcccgugagcaugaccaagacgagcgucgacugcaccauguacaucugcggggacuccaccgagugcagcaaccuccugcugcaguacggcuccuucugcacccagcucaaccgcgcgcugacggggaucgccguggagcaggacaagaacacccaggagguguucgcccaggucaagcagaucuacaagacgcccccgaucaaggacuucggcggguucaacuucagccagauccugcccgaccccuccaagcccagcaagcgguccuucaucgaggaccuccuguucaacaaggugacccuggccgacgccggcuucaucaagcaguacggcgacugccucggggacaucgcggcccgcgaccugaucugcgcccagaaguucaacggccugaccgugcucccgccccugcugaccgacgagaugaucgcccaguacaccagcgcccuccuggcggggaccaucacguccggcuggaccuucggggccggcgccgcccugcagauccccuucgcgaugcagauggccuaccgguucaacggcaucggggucacccagaacgugcucuacgagaaccagaagcugaucgccaaccaguucaacagcgccaucggcaagauccaggacucccugagcuccaccgccagcgcgcucgggaagcugcaggacguggucaaccagaacgcccaggcccugaacacgcucgugaagcagcuguccagcaacuucggcgccaucuccagcgugcugaacgacauccucucccgccuggacaaggucgaggccgaggugcagaucgaccggcugaucaccgggcgccuccagagccugcagaccuacgugacccagcagcugauccgggcggccgagauccgcgccagcgccaaccucgccgcgaccaagauguccgagugcguccugggccagagcaagcggguggacuucugcggcaagggguaccaccugauguccuucccccagagcgccccgcacggcguggucuuccuccacgugacguacguccccgcccaggagaagaacuucaccaccgcccccgcgaucugccacgacgggaaggcccacuucccccgcgagggcguguucguguccaacgggacccacugguucgucacgcagcggaacuucuacgagccgcagaucaucaccaccgacaacaccuucgugagcggcaacugcgacguggucaucggcaucgugaacaacacgguguacgacccccugcagcccgagcuggacuccggcgggagcggcuacauccccgaggccccgcgcgacgggcaggccuacgugcggaaggacggcgaguggguccugcucagcaccuuccuguga

SEQ ID NO: 11938 - RNA, 3534 nt, Artificial Sequence
  SARS-CoV-2/Wuhan/WIV05/2019__EPI_ISL_402128 spike protein CDS gc (1-1147)(K986P_V987P) Foldon construct
auguucguguuccugguccuccugccccuggugagcucccagugcgugaaccucaccacccgcacgcagcugccgcccgccuacaccaacagcuucacccggggcgucuacuaccccgacaagguguuccgcuccagcgugcugcacuccacccaggaccucuuccugcccuucuucagcaacgucacgugguuccacgccauccacguguccgggaccaacggcaccaagcgguucgacaacccggugcugcccuucaacgacggggucuacuucgcgagcaccgagaaguccaacaucauccgcggcuggaucuucgggacgacccucgacagcaagacccagucccugcugaucgugaacaacgccaccaacguggucaucaaggugugcgaguuccaguucugcaacgaccccuuccucggcguguacuaccacaagaacaacaagagcuggauggaguccgaguuccgggucuacagcuccgccaacaacugcacguucgaguacgugagccagcccuuccugauggaccuggagggcaagcaggggaacuucaagaaccuccgcgaguucguguucaagaacaucgacggcuacuucaagaucuacuccaagcacaccccgaucaaccugguccgggaccugccccagggguucagcgcccucgagccccugguggaccugcccaucggcaucaacaucacccgcuuccagacccuccuggcccugcaccgguccuaccucacgccgggggacagcagcuccggcuggaccgcgggcgccgccgccuacuacgugggguaccugcagccccgcaccuuccugcucaaguacaacgagaacggcaccaucacggacgcggucgacugcgcccuggacccccugagcgagaccaagugcacccucaaguccuucaccguggagaaggggaucuaccagacgagcaacuuccgggugcagcccaccgaguccaucguccgcuucccgaacaucaccaaccugugccccuucggcgagguguucaacgccacccgguucgccagcgucuacgccuggaaccgcaagcggaucuccaacugcguggcggacuacagcgugcuguacaacuccgccagcuucuccacguucaagugcuacggcgucagccccaccaagcucaacgaccugugcuucaccaacguguacgccgacuccuucgugauccgcggggacgagguccggcagaucgcccccggccagaccgggaagaucgccgacuacaacuacaagcugccggacgacuucacgggcugcgugaucgcguggaacagcaacaaccucgacuccaaggucgggggcaacuacaacuaccuguaccgccuguuccgcaagagcaaccucaagcccuucgagcgggacaucuccaccgagaucuaccaggccggcagcacccccugcaacgggguggagggcuucaacugcuacuucccccugcaguccuacggguuccagccgaccaacggcgugggguaccagcccuaccggguggucgugcugagcuucgagcuccugcacgcccccgccacggugugcggccccaagaaguccaccaaccuggucaagaacaagugcgugaacuucaacuucaacggccucaccgggaccggcgugcugaccgagagcaacaagaaguuccugccguuccagcaguucgggcgcgacaucgccgacacgaccgacgcgguccgcgacccccagacccuggagauccucgacaucacccccugcagcuucggcgggguguccgugaucacgccgggcaccaacaccagcaaccaggucgccgugcuguaccaggacgugaacugcaccgagguccccguggccauccacgccgaccagcugacgcccaccuggcggguguacuccaccggcagcaacgucuuccagacccgcgccgggugccucaucggcgcggagcacgugaacaacuccuacgagugcgacauccccaucggggccggcaucugcgccagcuaccagacgcagaccaacuccccgcggcgcgcccggagcguggcgucccagagcaucaucgccuacaccaugucccugggcgccgagaacagcgucgccuacuccaacaacagcaucgccauccccaccaacuucacgaucuccgugaccaccgagauccugcccgugagcaugaccaagacgagcgucgacugcaccauguacaucugcggggacuccaccgagugcagcaaccuccugcugcaguacggcuccuucugcacccagcucaaccgcgcgcugacggggaucgccguggagcaggacaagaacacccaggagguguucgcccaggucaagcagaucuacaagacgcccccgaucaaggacuucggcggguucaacuucagccagauccugcccgaccccuccaagcccagcaagcgguccuucaucgaggaccuccuguucaacaaggugacccuggccgacgccggcuucaucaagcaguacggcgacugccucggggacaucgcggcccgcgaccugaucugcgcccagaaguucaacggccugaccgugcucccgccccugcugaccgacgagaugaucgcccaguacaccagcgcccuccuggcggggaccaucacguccggcuggaccuucggggccggcgccgcccugcagauccccuucgcgaugcagauggccuaccgguucaacggcaucggggucacccagaacgugcucuacgagaaccagaagcugaucgccaaccaguucaacagcgccaucggcaagauccaggacucccugagcuccaccgccagcgcgcucgggaagcugcaggacguggucaaccagaacgcccaggcccugaacacgcucgugaagcagcuguccagcaacuucggcgccaucuccagcgugcugaacgacauccucucccgccuggacccgcccgaggccgaggugcagaucgaccggcugaucaccgggcgccuccagagccugcagaccuacgugacccagcagcugauccgggcggccgagauccgcgccagcgccaaccucgccgcgaccaagauguccgagugcguccugggccagagcaagcggguggacuucugcggcaagggguaccaccugauguccuucccccagagcgccccgcacggcguggucuuccuccacgugacguacguccccgcccaggagaagaacuucaccaccgcccccgcgaucugccacgacgggaaggcccacuucccccgcgagggcguguucguguccaacgggacccacugguucgucacgcagcggaacuucuacgagccgcagaucaucaccaccgacaacaccuucgugagcggcaacugcgacguggucaucggcaucgugaacaacacgguguacgacccccugcagcccgagcuggacuccggcgggagcggcuacauccccgaggccccgcgcgacgggcaggccuacgugcggaaggacggcgaguggguccugcucagcaccuuccuguga

SEQ ID NO: 11939 - RNA, 3534 nt, Artificial Sequence
  SARS-CoV-2/Wuhan/WIV05/2019__EPI_ISL_402128 spike protein CDS gc (1-1147)(K986P_V987P_T887WN_A1020W) Foldon construct
auguucguguuccugguccuccugccccuggugagcucccagugcgugaaccucaccacccgcacgcagcugccgcccgccuacaccaacagcuucacccggggcgucuacuaccccgacaagguguuccgcuccagcgugcugcacuccacccaggaccucuuccugcccuucuucagcaacgucacgugguuccacgccauccacguguccgggaccaacggcaccaagcgguucgacaacccggugcugcccuucaacgacggggucuacuucgcgagcaccgagaaguccaacaucauccgcggcuggaucuucgggacgacccucgacagcaagacccagucccugcugaucgugaacaacgccaccaacguggucaucaaggugugcgaguuccaguucugcaacgaccccuuccucggcguguacuaccacaagaacaacaagagcuggauggaguccgaguuccgggucuacagcuccgccaacaacugcacguucgaguacgugagccagcccuuccugauggaccuggagggcaagcaggggaacuucaagaaccuccgcgaguucguguucaagaacaucgacggcuacuucaagaucuacuccaagcacaccccgaucaaccugguccgggaccugccccagggguucagcgcccucgagccccugguggaccugcccaucggcaucaacaucacccgcuuccagacccuccuggcccugcaccgguccuaccucacgccgggggacagcagcuccggcuggaccgcgggcgccgccgccuacuacgugggguaccugcagccccgcaccuuccugcucaaguacaacgagaacggcaccaucacggacgcggucgacugcgcccuggacccccugagcgagaccaagugcacccucaaguccuucaccguggagaaggggaucuaccagacgagcaacuuccgggugcagcccaccgaguccaucguccgcuucccgaacaucaccaaccugugccccuucggcgagguguucaacgccacccgguucgccagcgucuacgccuggaaccgcaagcggaucuccaacugcguggcggacuacagcgugcuguacaacuccgccagcuucuccacguucaagugcuacggcgucagccccaccaagcucaacgaccugugcuucaccaacguguacgccgacuccuucgugauccgcggggacgagguccggcagaucgcccccggccagaccgggaagaucgccgacuacaacuacaagcugccggacgacuucacgggcugcgugaucgcguggaacagcaacaaccucgacuccaaggucgggggcaacuacaacuaccuguaccgccuguuccgcaagagcaaccucaagcccuucgagcgggacaucuccaccgagaucuaccaggccggcagcacccccugcaacgggguggagggcuucaacugcuacuucccccugcaguccuacggguuccagccgaccaacggcgugggguaccagcccuaccggguggucgugcugagcuucgagcuccugcacgcccccgccacggugugcggccccaagaaguccaccaaccuggucaagaacaagugcgugaacuucaacuucaacggccucaccgggaccggcgugcugaccgagagcaacaagaaguuccugccguuccagcaguucgggcgcgacaucgccgacacgaccgacgcgguccgcgacccccagacccuggagauccucgacaucacccccugcagcuucggcgggguguccgugaucacgccgggcaccaacaccagcaaccaggucgccgugcuguaccaggacgugaacugcaccgagguccccguggccauccacgccgaccagcugacgcccaccuggcggguguacuccaccggcagcaacgucuuccagacccgcgccgggugccucaucggcgcggagcacgugaacaacuccuacgagugcgacauccccaucggggccggcaucugcgccagcuaccagacgcagaccaacuccccgcggcgcgcccggagcguggcgucccagagcaucaucgccuacaccaugucccugggcgccgagaacagcgucgccuacuccaacaacagcaucgccauccccaccaacuucacgaucuccgugaccaccgagauccugcccgugagcaugaccaagacgagcgucgacugcaccauguacaucugcggggacuccaccgagugcagcaaccuccugcugcaguacggcuccuucugcacccagcucaaccgcgcgcugacggggaucgccguggagcaggacaagaacacccaggagguguucgcccaggucaagcagaucuacaagacgcccccgaucaaggacuucggcggguucaacuucagccagauccugcccgaccccuccaagcccagcaagcgguccuucaucgaggaccuccuguucaacaaggugacccuggccgacgccggcuucaucaagcaguacggcgacugccucggggacaucgcggcccgcgaccugaucugcgcccagaaguucaacggccugaccgugcucccgccccugcugaccgacgagaugaucgcccaguacaccagcgcccuccuggcggggaccaucacguccggcuggugguucggggccggcgccgcccugcagauccccuucgcgaugcagauggccuaccgguucaacggcaucggggucacccagaacgugcucuacgagaaccagaagcugaucgccaaccaguucaacagcgccaucggcaagauccaggacucccugagcuccaccgccagcgcgcucgggaagcugcaggacguggucaaccagaacgcccaggcccugaacacgcucgugaagcagcuguccagcaacuucggcgccaucuccagcgugcugaacgacauccucucccgccuggacccgcccgaggccgaggugcagaucgaccggcugaucaccgggcgccuccagagccugcagaccuacgugacccagcagcugauccgggcggccgagauccgcuggagcgccaaccucgccgcgaccaagauguccgagugcguccugggccagagcaagcggguggacuucugcggcaagggguaccaccugauguccuucccccagagcgccccgcacggcguggucuuccuccacgugacguacguccccgcccaggagaagaacuucaccaccgcccccgcgaucugccacgacgggaaggcccacuucccccgcgagggcguguucguguccaacgggacccacugguucgucacgcagcggaacuucuacgagccgcagaucaucaccaccgacaacaccuucgugagcggcaacugcgacguggucaucggcaucgugaacaacacgguguacgacccccugcagcccgagcuggacuccggcgggagcggcuacauccccgaggccccgcgcgacgggcaggccuacgugcggaaggacggcgaguggguccugcucagcaccuuccuguga

SEQ ID NO: 11940 - RNA, 3534 nt, Artificial Sequence
  SARS-CoV-2/Wuhan/WIV05/2019__EPI_ISL_402128 spike protein CDS gc (1-1147)(K986P_V987P_P1069F) Foldon construct
auguucguguuccugguccuccugccccuggugagcucccagugcgugaaccucaccacccgcacgcagcugccgcccgccuacaccaacagcuucacccggggcgucuacuaccccgacaagguguuccgcuccagcgugcugcacuccacccaggaccucuuccugcccuucuucagcaacgucacgugguuccacgccauccacguguccgggaccaacggcaccaagcgguucgacaacccggugcugcccuucaacgacggggucuacuucgcgagcaccgagaaguccaacaucauccgcggcuggaucuucgggacgacccucgacagcaagacccagucccugcugaucgugaacaacgccaccaacguggucaucaaggugugcgaguuccaguucugcaacgaccccuuccucggcguguacuaccacaagaacaacaagagcuggauggaguccgaguuccgggucuacagcuccgccaacaacugcacguucgaguacgugagccagcccuuccugauggaccuggagggcaagcaggggaacuucaagaaccuccgcgaguucguguucaagaacaucgacggcuacuucaagaucuacuccaagcacaccccgaucaaccugguccgggaccugccccagggguucagcgcccucgagccccugguggaccugcccaucggcaucaacaucacccgcuuccagacccuccuggcccugcaccgguccuaccucacgccgggggacagcagcuccggcuggaccgcgggcgccgccgccuacuacgugggguaccugcagccccgcaccuuccugcucaaguacaacgagaacggcaccaucacggacgcggucgacugcgcccuggacccccugagcgagaccaagugcacccucaaguccuucaccguggagaaggggaucuaccagacgagcaacuuccgggugcagcccaccgaguccaucguccgcuucccgaacaucaccaaccugugccccuucggcgagguguucaacgccacccgguucgccagcgucuacgccuggaaccgcaagcggaucuccaacugcguggcggacuacagcgugcuguacaacuccgccagcuucuccacguucaagugcuacggcgucagccccaccaagcucaacgaccugugcuucaccaacguguacgccgacuccuucgugauccgcggggacgagguccggcagaucgcccccggccagaccgggaagaucgccgacuacaacuacaagcugccggacgacuucacgggcugcgugaucgcguggaacagcaacaaccucgacuccaaggucgggggcaacuacaacuaccuguaccgccuguuccgcaagagcaaccucaagcccuucgagcgggacaucuccaccgagaucuaccaggccggcagcacccccugcaacgggguggagggcuucaacugcuacuucccccugcaguccuacggguuccagccgaccaacggcgugggguaccagcccuaccggguggucgugcugagcuucgagcuccugcacgcccccgccacggugugcggccccaagaaguccaccaaccuggucaagaacaagugcgugaacuucaacuucaacggccucaccgggaccggcgugcugaccgagagcaacaagaaguuccugccguuccagcaguucgggcgcgacaucgccgacacgaccgacgcgguccgcgacccccagacccuggagauccucgacaucacccccugcagcuucggcgggguguccgugaucacgccgggcaccaacaccagcaaccaggucgccgugcuguaccaggacgugaacugcaccgagguccccguggccauccacgccgaccagcugacgcccaccuggcggguguacuccaccggcagcaacgucuuccagacccgcgccgggugccucaucggcgcggagcacgugaacaacuccuacgagugcgacauccccaucggggccggcaucugcgccagcuaccagacgcagaccaacuccccgcggcgcgcccggagcguggcgucccagagcaucaucgccuacaccaugucccugggcgccgagaacagcgucgccuacuccaacaacagcaucgccauccccaccaacuucacgaucuccgugaccaccgagauccugcccgugagcaugaccaagacgagcgucgacugcaccauguacaucugcggggacuccaccgagugcagcaaccuccugcugcaguacggcuccuucugcacccagcucaaccgcgcgcugacggggaucgccguggagcaggacaagaacacccaggagguguucgcccaggucaagcagaucuacaagacgcccccgaucaaggacuucggcggguucaacuucagccagauccugcccgaccccuccaagcccagcaagcgguccuucaucgaggaccuccuguucaacaaggugacccuggccgacgccggcuucaucaagcaguacggcgacugccucggggacaucgcggcccgcgaccugaucugcgcccagaaguucaacggccugaccgugcucccgccccugcugaccgacgagaugaucgcccaguacaccagcgcccuccuggcggggaccaucacguccggcuggaccuucggggccggcgccgcccugcagauccccuucgcgaugcagauggccuaccgguucaacggcaucggggucacccagaacgugcucuacgagaaccagaagcugaucgccaaccaguucaacagcgccaucggcaagauccaggacucccugagcuccaccgccagcgcgcucgggaagcugcaggacguggucaaccagaacgcccaggcccugaacacgcucgugaagcagcuguccagcaacuucggcgccaucuccagcgugcugaacgacauccucucccgccuggacccgcccgaggccgaggugcagaucgaccggcugaucaccgggcgccuccagagccugcagaccuacgugacccagcagcugauccgggcggccgagauccgcgccagcgccaaccucgccgcgaccaagauguccgagugcguccugggccagagcaagcggguggacuucugcggcaagggguaccaccugauguccuucccccagagcgccccgcacggcguggucuuccuccacgugacguacgucuucgcccaggagaagaacuucaccaccgcccccgcgaucugccacgacgggaaggcccacuucccccgcgagggcguguucguguccaacgggacccacugguucgucacgcagcggaacuucuacgagccgcagaucaucaccaccgacaacaccuucgugagcggcaacugcgacguggucaucggcaucgugaacaacacgguguacgacccccugcagcccgagcuggacuccggcgggagcggcuacauccccgaggccccgcgcgacgggcaggccuacgugcggaaggacggcgaguggguccugcucagcaccuuccuguga

SEQ ID NO: 11941 - RNA, 3534 nt, Artificial Sequence
  SARS-CoV-2/Wuhan/WIV05/2019__EPI_ISL_402128 spike protein CDS gc (1-1147)(K986P_V987P_ H1048Q_H1064N_ H1083N_H1101N) Foldon construct
auguucguguuccugguccuccugccccuggugagcucccagugcgugaaccucaccacccgcacgcagcugccgcccgccuacaccaacagcuucacccggggcgucuacuaccccgacaagguguuccgcuccagcgugcugcacuccacccaggaccucuuccugcccuucuucagcaacgucacgugguuccacgccauccacguguccgggaccaacggcaccaagcgguucgacaacccggugcugcccuucaacgacggggucuacuucgcgagcaccgagaaguccaacaucauccgcggcuggaucuucgggacgacccucgacagcaagacccagucccugcugaucgugaacaacgccaccaacguggucaucaaggugugcgaguuccaguucugcaacgaccccuuccucggcguguacuaccacaagaacaacaagagcuggauggaguccgaguuccgggucuacagcuccgccaacaacugcacguucgaguacgugagccagcccuuccugauggaccuggagggcaagcaggggaacuucaagaaccuccgcgaguucguguucaagaacaucgacggcuacuucaagaucuacuccaagcacaccccgaucaaccugguccgggaccugccccagggguucagcgcccucgagccccugguggaccugcccaucggcaucaacaucacccgcuuccagacccuccuggcccugcaccgguccuaccucacgccgggggacagcagcuccggcuggaccgcgggcgccgccgccuacuacgugggguaccugcagccccgcaccuuccugcucaaguacaacgagaacggcaccaucacggacgcggucgacugcgcccuggacccccugagcgagaccaagugcacccucaaguccuucaccguggagaaggggaucuaccagacgagcaacuuccgggugcagcccaccgaguccaucguccgcuucccgaacaucaccaaccugugccccuucggcgagguguucaacgccacccgguucgccagcgucuacgccuggaaccgcaagcggaucuccaacugcguggcggacuacagcgugcuguacaacuccgccagcuucuccacguucaagugcuacggcgucagccccaccaagcucaacgaccugugcuucaccaacguguacgccgacuccuucgugauccgcggggacgagguccggcagaucgcccccggccagaccgggaagaucgccgacuacaacuacaagcugccggacgacuucacgggcugcgugaucgcguggaacagcaacaaccucgacuccaaggucgggggcaacuacaacuaccuguaccgccuguuccgcaagagcaaccucaagcccuucgagcgggacaucuccaccgagaucuaccaggccggcagcacccccugcaacgggguggagggcuucaacugcuacuucccccugcaguccuacggguuccagccgaccaacggcgugggguaccagcccuaccggguggucgugcugagcuucgagcuccugcacgcccccgccacggugugcggccccaagaaguccaccaaccuggucaagaacaagugcgugaacuucaacuucaacggccucaccgggaccggcgugcugaccgagagcaacaagaaguuccugccguuccagcaguucgggcgcgacaucgccgacacgaccgacgcgguccgcgacccccagacccuggagauccucgacaucacccccugcagcuucggcgggguguccgugaucacgccgggcaccaacaccagcaaccaggucgccgugcuguaccaggacgugaacugcaccgagguccccguggccauccacgccgaccagcugacgcccaccuggcggguguacuccaccggcagcaacgucuuccagacccgcgccgggugccucaucggcgcggagcacgugaacaacuccuacgagugcgacauccccaucggggccggcaucugcgccagcuaccagacgcagaccaacuccccgcggcgcgcccggagcguggcgucccagagcaucaucgccuacaccaugucccugggcgccgagaacagcgucgccuacuccaacaacagcaucgccauccccaccaacuucacgaucuccgugaccaccgagauccugcccgugagcaugaccaagacgagcgucgacugcaccauguacaucugcggggacuccaccgagugcagcaaccuccugcugcaguacggcuccuucugcacccagcucaaccgcgcgcugacggggaucgccguggagcaggacaagaacacccaggagguguucgcccaggucaagcagaucuacaagacgcccccgaucaaggacuucggcggguucaacuucagccagauccugcccgaccccuccaagcccagcaagcgguccuucaucgaggaccuccuguucaacaaggugacccuggccgacgccggcuucaucaagcaguacggcgacugccucggggacaucgcggcccgcgaccugaucugcgcccagaaguucaacggccugaccgugcucccgccccugcugaccgacgagaugaucgcccaguacaccagcgcccuccuggcggggaccaucacguccggcuggaccuucggggccggcgccgcccugcagauccccuucgcgaugcagauggccuaccgguucaacggcaucggggucacccagaacgugcucuacgagaaccagaagcugaucgccaaccaguucaacagcgccaucggcaagauccaggacucccugagcuccaccgccagcgcgcucgggaagcugcaggacguggucaaccagaacgcccaggcccugaacacgcucgugaagcagcuguccagcaacuucggcgccaucuccagcgugcugaacgacauccucucccgccuggacccgcccgaggccgaggugcagaucgaccggcugaucaccgggcgccuccagagccugcagaccuacgugacccagcagcugauccgggcggccgagauccgcgccagcgccaaccucgccgcgaccaagauguccgagugcguccugggccagagcaagcggguggacuucugcggcaagggguaccagcugauguccuucccccagagcgccccgcacggcguggucuuccucaacgugacguacguccccgcccaggagaagaacuucaccaccgcccccgcgaucugcaacgacgggaaggcccacuucccccgcgagggcguguucguguccaacgggaccaacugguucgucacgcagcggaacuucuacgagccgcagaucaucaccaccgacaacaccuucgugagcggcaacugcgacguggucaucggcaucgugaacaacacgguguacgacccccugcagcccgagcuggacuccggcgggagcggcuacauccccgaggccccgcgcgacgggcaggccuacgugcggaaggacggcgaguggguccugcucagcaccuuccuguga

SEQ ID NO: 11942 - RNA, 3534 nt, Artificial Sequence
  SARS-CoV-2/Wuhan/WIV05/2019__EPI_ISL_402128 spike protein CDS gc (1-1147)(I712C_T1077C) Foldon construct
auguucguguuccugguccuccugccccuggugagcucccagugcgugaaccucaccacccgcacgcagcugccgcccgccuacaccaacagcuucacccggggcgucuacuaccccgacaagguguuccgcuccagcgugcugcacuccacccaggaccucuuccugcccuucuucagcaacgucacgugguuccacgccauccacguguccgggaccaacggcaccaagcgguucgacaacccggugcugcccuucaacgacggggucuacuucgcgagcaccgagaaguccaacaucauccgcggcuggaucuucgggacgacccucgacagcaagacccagucccugcugaucgugaacaacgccaccaacguggucaucaaggugugcgaguuccaguucugcaacgaccccuuccucggcguguacuaccacaagaacaacaagagcuggauggaguccgaguuccgggucuacagcuccgccaacaacugcacguucgaguacgugagccagcccuuccugauggaccuggagggcaagcaggggaacuucaagaaccuccgcgaguucguguucaagaacaucgacggcuacuucaagaucuacuccaagcacaccccgaucaaccugguccgggaccugccccagggguucagcgcccucgagccccugguggaccugcccaucggcaucaacaucacccgcuuccagacccuccuggcccugcaccgguccuaccucacgccgggggacagcagcuccggcuggaccgcgggcgccgccgccuacuacgugggguaccugcagccccgcaccuuccugcucaaguacaacgagaacggcaccaucacggacgcggucgacugcgcccuggacccccugagcgagaccaagugcacccucaaguccuucaccguggagaaggggaucuaccagacgagcaacuuccgggugcagcccaccgaguccaucguccgcuucccgaacaucaccaaccugugccccuucggcgagguguucaacgccacccgguucgccagcgucuacgccuggaaccgcaagcggaucuccaacugcguggcggacuacagcgugcuguacaacuccgccagcuucuccacguucaagugcuacggcgucagccccaccaagcucaacgaccugugcuucaccaacguguacgccgacuccuucgugauccgcggggacgagguccggcagaucgcccccggccagaccgggaagaucgccgacuacaacuacaagcugccggacgacuucacgggcugcgugaucgcguggaacagcaacaaccucgacuccaaggucgggggcaacuacaacuaccuguaccgccuguuccgcaagagcaaccucaagcccuucgagcgggacaucuccaccgagaucuaccaggccggcagcacccccugcaacgggguggagggcuucaacugcuacuucccccugcaguccuacggguuccagccgaccaacggcgugggguaccagcccuaccggguggucgugcugagcuucgagcuccugcacgcccccgccacggugugcggccccaagaaguccaccaaccuggucaagaacaagugcgugaacuucaacuucaacggccucaccgggaccggcgugcugaccgagagcaacaagaaguuccugccguuccagcaguucgggcgcgacaucgccgacacgaccgacgcgguccgcgacccccagacccuggagauccucgacaucacccccugcagcuucggcgggguguccgugaucacgccgggcaccaacaccagcaaccaggucgccgugcuguaccaggacgugaacugcaccgagguccccguggccauccacgccgaccagcugacgcccaccuggcggguguacuccaccggcagcaacgucuuccagacccgcgccgggugccucaucggcgcggagcacgugaacaacuccuacgagugcgacauccccaucggggccggcaucugcgccagcuaccagacgcagaccaacuccccgcggcgcgcccggagcguggcgucccagagcaucaucgccuacaccaugucccugggcgccgagaacagcgucgccuacuccaacaacagcugcgccauccccaccaacuucacgaucuccgugaccaccgagauccugcccgugagcaugaccaagacgagcgucgacugcaccauguacaucugcggggacuccaccgagugcagcaaccuccugcugcaguacggcuccuucugcacccagcucaaccgcgcgcugacggggaucgccguggagcaggacaagaacacccaggagguguucgcccaggucaagcagaucuacaagacgcccccgaucaaggacuucggcggguucaacuucagccagauccugcccgaccccuccaagcccagcaagcgguccuucaucgaggaccuccuguucaacaaggugacccuggccgacgccggcuucaucaagcaguacggcgacugccucggggacaucgcggcccgcgaccugaucugcgcccagaaguucaacggccugaccgugcucccgccccugcugaccgacgagaugaucgcccaguacaccagcgcccuccuggcggggaccaucacguccggcuggaccuucggggccggcgccgcccugcagauccccuucgcgaugcagauggccuaccgguucaacggcaucggggucacccagaacgugcucuacgagaaccagaagcugaucgccaaccaguucaacagcgccaucggcaagauccaggacucccugagcuccaccgccagcgcgcucgggaagcugcaggacguggucaaccagaacgcccaggcccugaacacgcucgugaagcagcuguccagcaacuucggcgccaucuccagcgugcugaacgacauccucucccgccuggacaaggucgaggccgaggugcagaucgaccggcugaucaccgggcgccuccagagccugcagaccuacgugacccagcagcugauccgggcggccgagauccgcgccagcgccaaccucgccgcgaccaagauguccgagugcguccugggccagagcaagcggguggacuucugcggcaagggguaccaccugauguccuucccccagagcgccccgcacggcguggucuuccuccacgugacguacguccccgcccaggagaagaacuucaccugcgcccccgcgaucugccacgacgggaaggcccacuucccccgcgagggcguguucguguccaacgggacccacugguucgucacgcagcggaacuucuacgagccgcagaucaucaccaccgacaacaccuucgugagcggcaacugcgacguggucaucggcaucgugaacaacacgguguacgacccccugcagcccgagcuggacuccggcgggagcggcuacauccccgaggccccgcgcgacgggcaggccuacgugcggaaggacggcgaguggguccugcucagcaccuuccuguga

SEQ ID NO: 11943 - RNA, 3534 nt, Artificial Sequence
  SARS-CoV-2/Wuhan/WIV05/2019__EPI_ISL_402128 spike protein CDS gc (1-1147)(I714C_Y1110C) Foldon construct
auguucguguuccugguccuccugccccuggugagcucccagugcgugaaccucaccacccgcacgcagcugccgcccgccuacaccaacagcuucacccggggcgucuacuaccccgacaagguguuccgcuccagcgugcugcacuccacccaggaccucuuccugcccuucuucagcaacgucacgugguuccacgccauccacguguccgggaccaacggcaccaagcgguucgacaacccggugcugcccuucaacgacggggucuacuucgcgagcaccgagaaguccaacaucauccgcggcuggaucuucgggacgacccucgacagcaagacccagucccugcugaucgugaacaacgccaccaacguggucaucaaggugugcgaguuccaguucugcaacgaccccuuccucggcguguacuaccacaagaacaacaagagcuggauggaguccgaguuccgggucuacagcuccgccaacaacugcacguucgaguacgugagccagcccuuccugauggaccuggagggcaagcaggggaacuucaagaaccuccgcgaguucguguucaagaacaucgacggcuacuucaagaucuacuccaagcacaccccgaucaaccugguccgggaccugccccagggguucagcgcccucgagccccugguggaccugcccaucggcaucaacaucacccgcuuccagacccuccuggcccugcaccgguccuaccucacgccgggggacagcagcuccggcuggaccgcgggcgccgccgccuacuacgugggguaccugcagccccgcaccuuccugcucaaguacaacgagaacggcaccaucacggacgcggucgacugcgcccuggacccccugagcgagaccaagugcacccucaaguccuucaccguggagaaggggaucuaccagacgagcaacuuccgggugcagcccaccgaguccaucguccgcuucccgaacaucaccaaccugugccccuucggcgagguguucaacgccacccgguucgccagcgucuacgccuggaaccgcaagcggaucuccaacugcguggcggacuacagcgugcuguacaacuccgccagcuucuccacguucaagugcuacggcgucagccccaccaagcucaacgaccugugcuucaccaacguguacgccgacuccuucgugauccgcggggacgagguccggcagaucgcccccggccagaccgggaagaucgccgacuacaacuacaagcugccggacgacuucacgggcugcgugaucgcguggaacagcaacaaccucgacuccaaggucgggggcaacuacaacuaccuguaccgccuguuccgcaagagcaaccucaagcccuucgagcgggacaucuccaccgagaucuaccaggccggcagcacccccugcaacgggguggagggcuucaacugcuacuucccccugcaguccuacggguuccagccgaccaacggcgugggguaccagcccuaccggguggucgugcugagcuucgagcuccugcacgcccccgccacggugugcggccccaagaaguccaccaaccuggucaagaacaagugcgugaacuucaacuucaacggccucaccgggaccggcgugcugaccgagagcaacaagaaguuccugccguuccagcaguucgggcgcgacaucgccgacacgaccgacgcgguccgcgacccccagacccuggagauccucgacaucacccccugcagcuucggcgggguguccgugaucacgccgggcaccaacaccagcaaccaggucgccgugcuguaccaggacgugaacugcaccgagguccccguggccauccacgccgaccagcugacgcccaccuggcggguguacuccaccggcagcaacgucuuccagacccgcgccgggugccucaucggcgcggagcacgugaacaacuccuacgagugcgacauccccaucggggccggcaucugcgccagcuaccagacgcagaccaacuccccgcggcgcgcccggagcguggcgucccagagcaucaucgccuacaccaugucccugggcgccgagaacagcgucgccuacuccaacaacagcaucgccugccccaccaacuucacgaucuccgugaccaccgagauccugcccgugagcaugaccaagacgagcgucgacugcaccauguacaucugcggggacuccaccgagugcagcaaccuccugcugcaguacggcuccuucugcacccagcucaaccgcgcgcugacggggaucgccguggagcaggacaagaacacccaggagguguucgcccaggucaagcagaucuacaagacgcccccgaucaaggacuucggcggguucaacuucagccagauccugcccgaccccuccaagcccagcaagcgguccuucaucgaggaccuccuguucaacaaggugacccuggccgacgccggcuucaucaagcaguacggcgacugccucggggacaucgcggcccgcgaccugaucugcgcccagaaguucaacggccugaccgugcucccgccccugcugaccgacgagaugaucgcccaguacaccagcgcccuccuggcggggaccaucacguccggcuggaccuucggggccggcgccgcccugcagauccccuucgcgaugcagauggccuaccgguucaacggcaucggggucacccagaacgugcucuacgagaaccagaagcugaucgccaaccaguucaacagcgccaucggcaagauccaggacucccugagcuccaccgccagcgcgcucgggaagcugcaggacguggucaaccagaacgcccaggcccugaacacgcucgugaagcagcuguccagcaacuucggcgccaucuccagcgugcugaacgacauccucucccgccuggacaaggucgaggccgaggugcagaucgaccggcugaucaccgggcgccuccagagccugcagaccuacgugacccagcagcugauccgggcggccgagauccgcgccagcgccaaccucgccgcgaccaagauguccgagugcguccugggccagagcaagcggguggacuucugcggcaagggguaccaccugauguccuucccccagagcgccccgcacggcguggucuuccuccacgugacguacguccccgcccaggagaagaacuucaccaccgcccccgcgaucugccacgacgggaaggcccacuucccccgcgagggcguguucguguccaacgggacccacugguucgucacgcagcggaacuucugcgagccgcagaucaucaccaccgacaacaccuucgugagcggcaacugcgacguggucaucggcaucgugaacaacacgguguacgacccccugcagcccgagcuggacuccggcgggagcggcuacauccccgaggccccgcgcgacgggcaggccuacgugcggaaggacggcgaguggguccugcucagcaccuuccuguga

SEQ ID NO: 11944 - RNA, 3534 nt, Artificial Sequence
  SARS-CoV-2/Wuhan/WIV05/2019__EPI_ISL_402128 spike protein CDS gc (1-1147)(P715C_P1069C) Foldon construct
auguucguguuccugguccuccugccccuggugagcucccagugcgugaaccucaccacccgcacgcagcugccgcccgccuacaccaacagcuucacccggggcgucuacuaccccgacaagguguuccgcuccagcgugcugcacuccacccaggaccucuuccugcccuucuucagcaacgucacgugguuccacgccauccacguguccgggaccaacggcaccaagcgguucgacaacccggugcugcccuucaacgacggggucuacuucgcgagcaccgagaaguccaacaucauccgcggcuggaucuucgggacgacccucgacagcaagacccagucccugcugaucgugaacaacgccaccaacguggucaucaaggugugcgaguuccaguucugcaacgaccccuuccucggcguguacuaccacaagaacaacaagagcuggauggaguccgaguuccgggucuacagcuccgccaacaacugcacguucgaguacgugagccagcccuuccugauggaccuggagggcaagcaggggaacuucaagaaccuccgcgaguucguguucaagaacaucgacggcuacuucaagaucuacuccaagcacaccccgaucaaccugguccgggaccugccccagggguucagcgcccucgagccccugguggaccugcccaucggcaucaacaucacccgcuuccagacccuccuggcccugcaccgguccuaccucacgccgggggacagcagcuccggcuggaccgcgggcgccgccgccuacuacgugggguaccugcagccccgcaccuuccugcucaaguacaacgagaacggcaccaucacggacgcggucgacugcgcccuggacccccugagcgagaccaagugcacccucaaguccuucaccguggagaaggggaucuaccagacgagcaacuuccgggugcagcccaccgaguccaucguccgcuucccgaacaucaccaaccugugccccuucggcgagguguucaacgccacccgguucgccagcgucuacgccuggaaccgcaagcggaucuccaacugcguggcggacuacagcgugcuguacaacuccgccagcuucuccacguucaagugcuacggcgucagccccaccaagcucaacgaccugugcuucaccaacguguacgccgacuccuucgugauccgcggggacgagguccggcagaucgcccccggccagaccgggaagaucgccgacuacaacuacaagcugccggacgacuucacgggcugcgugaucgcguggaacagcaacaaccucgacuccaaggucgggggcaacuacaacuaccuguaccgccuguuccgcaagagcaaccucaagcccuucgagcgggacaucuccaccgagaucuaccaggccggcagcacccccugcaacgggguggagggcuucaacugcuacuucccccugcaguccuacggguuccagccgaccaacggcgugggguaccagcccuaccggguggucgugcugagcuucgagcuccugcacgcccccgccacggugugcggccccaagaaguccaccaaccuggucaagaacaagugcgugaacuucaacuucaacggccucaccgggaccggcgugcugaccgagagcaacaagaaguuccugccguuccagcaguucgggcgcgacaucgccgacacgaccgacgcgguccgcgacccccagacccuggagauccucgacaucacccccugcagcuucggcgggguguccgugaucacgccgggcaccaacaccagcaaccaggucgccgugcuguaccaggacgugaacugcaccgagguccccguggccauccacgccgaccagcugacgcccaccuggcggguguacuccaccggcagcaacgucuuccagacccgcgccgggugccucaucggcgcggagcacgugaacaacuccuacgagugcgacauccccaucggggccggcaucugcgccagcuaccagacgcagaccaacuccccgcggcgcgcccggagcguggcgucccagagcaucaucgccuacaccaugucccugggcgccgagaacagcgucgccuacuccaacaacagcaucgccaucugcaccaacuucacgaucuccgugaccaccgagauccugcccgugagcaugaccaagacgagcgucgacugcaccauguacaucugcggggacuccaccgagugcagcaaccuccugcugcaguacggcuccuucugcacccagcucaaccgcgcgcugacggggaucgccguggagcaggacaagaacacccaggagguguucgcccaggucaagcagaucuacaagacgcccccgaucaaggacuucggcggguucaacuucagccagauccugcccgaccccuccaagcccagcaagcgguccuucaucgaggaccuccuguucaacaaggugacccuggccgacgccggcuucaucaagcaguacggcgacugccucggggacaucgcggcccgcgaccugaucugcgcccagaaguucaacggccugaccgugcucccgccccugcugaccgacgagaugaucgcccaguacaccagcgcccuccuggcggggaccaucacguccggcuggaccuucggggccggcgccgcccugcagauccccuucgcgaugcagauggccuaccgguucaacggcaucggggucacccagaacgugcucuacgagaaccagaagcugaucgccaaccaguucaacagcgccaucggcaagauccaggacucccugagcuccaccgccagcgcgcucgggaagcugcaggacguggucaaccagaacgcccaggcccugaacacgcucgugaagcagcuguccagcaacuucggcgccaucuccagcgugcugaacgacauccucucccgccuggacaaggucgaggccgaggugcagaucgaccggcugaucaccgggcgccuccagagccugcagaccuacgugacccagcagcugauccgggcggccgagauccgcgccagcgccaaccucgccgcgaccaagauguccgagugcguccugggccagagcaagcggguggacuucugcggcaagggguaccaccugauguccuucccccagagcgccccgcacggcguggucuuccuccacgugacguacgucugcgcccaggagaagaacuucaccaccgcccccgcgaucugccacgacgggaaggcccacuucccccgcgagggcguguucguguccaacgggacccacugguucgucacgcagcggaacuucuacgagccgcagaucaucaccaccgacaacaccuucgugagcggcaacugcgacguggucaucggcaucgugaacaacacgguguacgacccccugcagcccgagcuggacuccggcgggagcggcuacauccccgaggccccgcgcgacgggcaggccuacgugcggaaggacggcgaguggguccugcucagcaccuuccuguga

SEQ ID NO: 11945 - RNA, 3534 nt, Artificial Sequence
  SARS-CoV-2/Wuhan/WIV05/2019__EPI_ISL_402128 spike protein CDS gc (1-1147)(G889C_L1034C) Foldon construct
auguucguguuccugguccuccugccccuggugagcucccagugcgugaaccucaccacccgcacgcagcugccgcccgccuacaccaacagcuucacccggggcgucuacuaccccgacaagguguuccgcuccagcgugcugcacuccacccaggaccucuuccugcccuucuucagcaacgucacgugguuccacgccauccacguguccgggaccaacggcaccaagcgguucgacaacccggugcugcccuucaacgacggggucuacuucgcgagcaccgagaaguccaacaucauccgcggcuggaucuucgggacgacccucgacagcaagacccagucccugcugaucgugaacaacgccaccaacguggucaucaaggugugcgaguuccaguucugcaacgaccccuuccucggcguguacuaccacaagaacaacaagagcuggauggaguccgaguuccgggucuacagcuccgccaacaacugcacguucgaguacgugagccagcccuuccugauggaccuggagggcaagcaggggaacuucaagaaccuccgcgaguucguguucaagaacaucgacggcuacuucaagaucuacuccaagcacaccccgaucaaccugguccgggaccugccccagggguucagcgcccucgagccccugguggaccugcccaucggcaucaacaucacccgcuuccagacccuccuggcccugcaccgguccuaccucacgccgggggacagcagcuccggcuggaccgcgggcgccgccgccuacuacgugggguaccugcagccccgcaccuuccugcucaaguacaacgagaacggcaccaucacggacgcggucgacugcgcccuggacccccugagcgagaccaagugcacccucaaguccuucaccguggagaaggggaucuaccagacgagcaacuuccgggugcagcccaccgaguccaucguccgcuucccgaacaucaccaaccugugccccuucggcgagguguucaacgccacccgguucgccagcgucuacgccuggaaccgcaagcggaucuccaacugcguggcggacuacagcgugcuguacaacuccgccagcuucuccacguucaagugcuacggcgucagccccaccaagcucaacgaccugugcuucaccaacguguacgccgacuccuucgugauccgcggggacgagguccggcagaucgcccccggccagaccgggaagaucgccgacuacaacuacaagcugccggacgacuucacgggcugcgugaucgcguggaacagcaacaaccucgacuccaaggucgggggcaacuacaacuaccuguaccgccuguuccgcaagagcaaccucaagcccuucgagcgggacaucuccaccgagaucuaccaggccggcagcacccccugcaacgggguggagggcuucaacugcuacuucccccugcaguccuacggguuccagccgaccaacggcgugggguaccagcccuaccggguggucgugcugagcuucgagcuccugcacgcccccgccacggugugcggccccaagaaguccaccaaccuggucaagaacaagugcgugaacuucaacuucaacggccucaccgggaccggcgugcugaccgagagcaacaagaaguuccugccguuccagcaguucgggcgcgacaucgccgacacgaccgacgcgguccgcgacccccagacccuggagauccucgacaucacccccugcagcuucggcgggguguccgugaucacgccgggcaccaacaccagcaaccaggucgccgugcuguaccaggacgugaacugcaccgagguccccguggccauccacgccgaccagcugacgcccaccuggcggguguacuccaccggcagcaacgucuuccagacccgcgccgggugccucaucggcgcggagcacgugaacaacuccuacgagugcgacauccccaucggggccggcaucugcgccagcuaccagacgcagaccaacuccccgcggcgcgcccggagcguggcgucccagagcaucaucgccuacaccaugucccugggcgccgagaacagcgucgccuacuccaacaacagcaucgccauccccaccaacuucacgaucuccgugaccaccgagauccugcccgugagcaugaccaagacgagcgucgacugcaccauguacaucugcggggacuccaccgagugcagcaaccuccugcugcaguacggcuccuucugcacccagcucaaccgcgcgcugacggggaucgccguggagcaggacaagaacacccaggagguguucgcccaggucaagcagaucuacaagacgcccccgaucaaggacuucggcggguucaacuucagccagauccugcccgaccccuccaagcccagcaagcgguccuucaucgaggaccuccuguucaacaaggugacccuggccgacgccggcuucaucaagcaguacggcgacugccucggggacaucgcggcccgcgaccugaucugcgcccagaaguucaacggccugaccgugcucccgccccugcugaccgacgagaugaucgcccaguacaccagcgcccuccuggcggggaccaucacguccggcuggaccuucugcgccggcgccgcccugcagauccccuucgcgaugcagauggccuaccgguucaacggcaucggggucacccagaacgugcucuacgagaaccagaagcugaucgccaaccaguucaacagcgccaucggcaagauccaggacucccugagcuccaccgccagcgcgcucgggaagcugcaggacguggucaaccagaacgcccaggcccugaacacgcucgugaagcagcuguccagcaacuucggcgccaucuccagcgugcugaacgacauccucucccgccuggacaaggucgaggccgaggugcagaucgaccggcugaucaccgggcgccuccagagccugcagaccuacgugacccagcagcugauccgggcggccgagauccgcgccagcgccaaccucgccgcgaccaagauguccgagugcgucugcggccagagcaagcggguggacuucugcggcaagggguaccaccugauguccuucccccagagcgccccgcacggcguggucuuccuccacgugacguacguccccgcccaggagaagaacuucaccaccgcccccgcgaucugccacgacgggaaggcccacuucccccgcgagggcguguucguguccaacgggacccacugguucgucacgcagcggaacuucuacgagccgcagaucaucaccaccgacaacaccuucgugagcggcaacugcgacguggucaucggcaucgugaacaacacgguguacgacccccugcagcccgagcuggacuccggcgggagcggcuacauccccgaggccccgcgcgacgggcaggccuacgugcggaaggacggcgaguggguccugcucagcaccuuccuguga

SEQ ID NO: 11946 - RNA, 3534 nt, Artificial Sequence
  SARS-CoV-2/Wuhan/WIV05/2019__EPI_ISL_402128 spike protein CDS gc (1-1147)(I909C_Y1047C) Foldon construct
auguucguguuccugguccuccugccccuggugagcucccagugcgugaaccucaccacccgcacgcagcugccgcccgccuacaccaacagcuucacccggggcgucuacuaccccgacaagguguuccgcuccagcgugcugcacuccacccaggaccucuuccugcccuucuucagcaacgucacgugguuccacgccauccacguguccgggaccaacggcaccaagcgguucgacaacccggugcugcccuucaacgacggggucuacuucgcgagcaccgagaaguccaacaucauccgcggcuggaucuucgggacgacccucgacagcaagacccagucccugcugaucgugaacaacgccaccaacguggucaucaaggugugcgaguuccaguucugcaacgaccccuuccucggcguguacuaccacaagaacaacaagagcuggauggaguccgaguuccgggucuacagcuccgccaacaacugcacguucgaguacgugagccagcccuuccugauggaccuggagggcaagcaggggaacuucaagaaccuccgcgaguucguguucaagaacaucgacggcuacuucaagaucuacuccaagcacaccccgaucaaccugguccgggaccugccccagggguucagcgcccucgagccccugguggaccugcccaucggcaucaacaucacccgcuuccagacccuccuggcccugcaccgguccuaccucacgccgggggacagcagcuccggcuggaccgcgggcgccgccgccuacuacgugggguaccugcagccccgcaccuuccugcucaaguacaacgagaacggcaccaucacggacgcggucgacugcgcccuggacccccugagcgagaccaagugcacccucaaguccuucaccguggagaaggggaucuaccagacgagcaacuuccgggugcagcccaccgaguccaucguccgcuucccgaacaucaccaaccugugccccuucggcgagguguucaacgccacccgguucgccagcgucuacgccuggaaccgcaagcggaucuccaacugcguggcggacuacagcgugcuguacaacuccgccagcuucuccacguucaagugcuacggcgucagccccaccaagcucaacgaccugugcuucaccaacguguacgccgacuccuucgugauccgcggggacgagguccggcagaucgcccccggccagaccgggaagaucgccgacuacaacuacaagcugccggacgacuucacgggcugcgugaucgcguggaacagcaacaaccucgacuccaaggucgggggcaacuacaacuaccuguaccgccuguuccgcaagagcaaccucaagcccuucgagcgggacaucuccaccgagaucuaccaggccggcagcacccccugcaacgggguggagggcuucaacugcuacuucccccugcaguccuacggguuccagccgaccaacggcgugggguaccagcccuaccggguggucgugcugagcuucgagcuccugcacgcccccgccacggugugcggccccaagaaguccaccaaccuggucaagaacaagugcgugaacuucaacuucaacggccucaccgggaccggcgugcugaccgagagcaacaagaaguuccugccguuccagcaguucgggcgcgacaucgccgacacgaccgacgcgguccgcgacccccagacccuggagauccucgacaucacccccugcagcuucggcgggguguccgugaucacgccgggcaccaacaccagcaaccaggucgccgugcuguaccaggacgugaacugcaccgagguccccguggccauccacgccgaccagcugacgcccaccuggcggguguacuccaccggcagcaacgucuuccagacccgcgccgggugccucaucggcgcggagcacgugaacaacuccuacgagugcgacauccccaucggggccggcaucugcgccagcuaccagacgcagaccaacuccccgcggcgcgcccggagcguggcgucccagagcaucaucgccuacaccaugucccugggcgccgagaacagcgucgccuacuccaacaacagcaucgccauccccaccaacuucacgaucuccgugaccaccgagauccugcccgugagcaugaccaagacgagcgucgacugcaccauguacaucugcggggacuccaccgagugcagcaaccuccugcugcaguacggcuccuucugcacccagcucaaccgcgcgcugacggggaucgccguggagcaggacaagaacacccaggagguguucgcccaggucaagcagaucuacaagacgcccccgaucaaggacuucggcggguucaacuucagccagauccugcccgaccccuccaagcccagcaagcgguccuucaucgaggaccuccuguucaacaaggugacccuggccgacgccggcuucaucaagcaguacggcgacugccucggggacaucgcggcccgcgaccugaucugcgcccagaaguucaacggccugaccgugcucccgccccugcugaccgacgagaugaucgcccaguacaccagcgcccuccuggcggggaccaucacguccggcuggaccuucggggccggcgccgcccugcagauccccuucgcgaugcagauggccuaccgguucaacggcugcggggucacccagaacgugcucuacgagaaccagaagcugaucgccaaccaguucaacagcgccaucggcaagauccaggacucccugagcuccaccgccagcgcgcucgggaagcugcaggacguggucaaccagaacgcccaggcccugaacacgcucgugaagcagcuguccagcaacuucggcgccaucuccagcgugcugaacgacauccucucccgccuggacaaggucgaggccgaggugcagaucgaccggcugaucaccgggcgccuccagagccugcagaccuacgugacccagcagcugauccgggcggccgagauccgcgccagcgccaaccucgccgcgaccaagauguccgagugcguccugggccagagcaagcggguggacuucugcggcaaggggugccaccugauguccuucccccagagcgccccgcacggcguggucuuccuccacgugacguacguccccgcccaggagaagaacuucaccaccgcccccgcgaucugccacgacgggaaggcccacuucccccgcgagggcguguucguguccaacgggacccacugguucgucacgcagcggaacuucuacgagccgcagaucaucaccaccgacaacaccuucgugagcggcaacugcgacguggucaucggcaucgugaacaacacgguguacgacccccugcagcccgagcuggacuccggcgggagcggcuacauccccgaggccccgcgcgacgggcaggccuacgugcggaaggacggcgaguggguccugcucagcaccuuccuguga

SEQ ID NO: 11947 - RNA, 3534 nt, Artificial Sequence
  SARS-CoV-2/Wuhan/WIV05/2019__EPI_ISL_402128 spike protein CDS gc (1-1147)(Q965C_S1003C) Foldon construct
auguucguguuccugguccuccugccccuggugagcucccagugcgugaaccucaccacccgcacgcagcugccgcccgccuacaccaacagcuucacccggggcgucuacuaccccgacaagguguuccgcuccagcgugcugcacuccacccaggaccucuuccugcccuucuucagcaacgucacgugguuccacgccauccacguguccgggaccaacggcaccaagcgguucgacaacccggugcugcccuucaacgacggggucuacuucgcgagcaccgagaaguccaacaucauccgcggcuggaucuucgggacgacccucgacagcaagacccagucccugcugaucgugaacaacgccaccaacguggucaucaaggugugcgaguuccaguucugcaacgaccccuuccucggcguguacuaccacaagaacaacaagagcuggauggaguccgaguuccgggucuacagcuccgccaacaacugcacguucgaguacgugagccagcccuuccugauggaccuggagggcaagcaggggaacuucaagaaccuccgcgaguucguguucaagaacaucgacggcuacuucaagaucuacuccaagcacaccccgaucaaccugguccgggaccugccccagggguucagcgcccucgagccccugguggaccugcccaucggcaucaacaucacccgcuuccagacccuccuggcccugcaccgguccuaccucacgccgggggacagcagcuccggcuggaccgcgggcgccgccgccuacuacgugggguaccugcagccccgcaccuuccugcucaaguacaacgagaacggcaccaucacggacgcggucgacugcgcccuggacccccugagcgagaccaagugcacccucaaguccuucaccguggagaaggggaucuaccagacgagcaacuuccgggugcagcccaccgaguccaucguccgcuucccgaacaucaccaaccugugccccuucggcgagguguucaacgccacccgguucgccagcgucuacgccuggaaccgcaagcggaucuccaacugcguggcggacuacagcgugcuguacaacuccgccagcuucuccacguucaagugcuacggcgucagccccaccaagcucaacgaccugugcuucaccaacguguacgccgacuccuucgugauccgcggggacgagguccggcagaucgcccccggccagaccgggaagaucgccgacuacaacuacaagcugccggacgacuucacgggcugcgugaucgcguggaacagcaacaaccucgacuccaaggucgggggcaacuacaacuaccuguaccgccuguuccgcaagagcaaccucaagcccuucgagcgggacaucuccaccgagaucuaccaggccggcagcacccccugcaacgggguggagggcuucaacugcuacuucccccugcaguccuacggguuccagccgaccaacggcgugggguaccagcccuaccggguggucgugcugagcuucgagcuccugcacgcccccgccacggugugcggccccaagaaguccaccaaccuggucaagaacaagugcgugaacuucaacuucaacggccucaccgggaccggcgugcugaccgagagcaacaagaaguuccugccguuccagcaguucgggcgcgacaucgccgacacgaccgacgcgguccgcgacccccagacccuggagauccucgacaucacccccugcagcuucggcgggguguccgugaucacgccgggcaccaacaccagcaaccaggucgccgugcuguaccaggacgugaacugcaccgagguccccguggccauccacgccgaccagcugacgcccaccuggcggguguacuccaccggcagcaacgucuuccagacccgcgccgggugccucaucggcgcggagcacgugaacaacuccuacgagugcgacauccccaucggggccggcaucugcgccagcuaccagacgcagaccaacuccccgcggcgcgcccggagcguggcgucccagagcaucaucgccuacaccaugucccugggcgccgagaacagcgucgccuacuccaacaacagcaucgccauccccaccaacuucacgaucuccgugaccaccgagauccugcccgugagcaugaccaagacgagcgucgacugcaccauguacaucugcggggacuccaccgagugcagcaaccuccugcugcaguacggcuccuucugcacccagcucaaccgcgcgcugacggggaucgccguggagcaggacaagaacacccaggagguguucgcccaggucaagcagaucuacaagacgcccccgaucaaggacuucggcggguucaacuucagccagauccugcccgaccccuccaagcccagcaagcgguccuucaucgaggaccuccuguucaacaaggugacccuggccgacgccggcuucaucaagcaguacggcgacugccucggggacaucgcggcccgcgaccugaucugcgcccagaaguucaacggccugaccgugcucccgccccugcugaccgacgagaugaucgcccaguacaccagcgcccuccuggcggggaccaucacguccggcuggaccuucggggccggcgccgcccugcagauccccuucgcgaugcagauggccuaccgguucaacggcaucggggucacccagaacgugcucuacgagaaccagaagcugaucgccaaccaguucaacagcgccaucggcaagauccaggacucccugagcuccaccgccagcgcgcucgggaagcugcaggacguggucaaccagaacgcccaggcccugaacacgcucgugaagugccuguccagcaacuucggcgccaucuccagcgugcugaacgacauccucucccgccuggacaaggucgaggccgaggugcagaucgaccggcugaucaccgggcgccuccagugccugcagaccuacgugacccagcagcugauccgggcggccgagauccgcgccagcgccaaccucgccgcgaccaagauguccgagugcguccugggccagagcaagcggguggacuucugcggcaagggguaccaccugauguccuucccccagagcgccccgcacggcguggucuuccuccacgugacguacguccccgcccaggagaagaacuucaccaccgcccccgcgaucugccacgacgggaaggcccacuucccccgcgagggcguguucguguccaacgggacccacugguucgucacgcagcggaacuucuacgagccgcagaucaucaccaccgacaacaccuucgugagcggcaacugcgacguggucaucggcaucgugaacaacacgguguacgacccccugcagcccgagcuggacuccggcgggagcggcuacauccccgaggccccgcgcgacgggcaggccuacgugcggaaggacggcgaguggguccugcucagcaccuuccuguga

SEQ ID NO: 11948 - RNA, 3534 nt, Artificial Sequence
  SARS-CoV-2/Wuhan/WIV05/2019__EPI_ISL_402128 spike protein CDS gc (1-1147)(F970C_G999C) Foldon construct
auguucguguuccugguccuccugccccuggugagcucccagugcgugaaccucaccacccgcacgcagcugccgcccgccuacaccaacagcuucacccggggcgucuacuaccccgacaagguguuccgcuccagcgugcugcacuccacccaggaccucuuccugcccuucuucagcaacgucacgugguuccacgccauccacguguccgggaccaacggcaccaagcgguucgacaacccggugcugcccuucaacgacggggucuacuucgcgagcaccgagaaguccaacaucauccgcggcuggaucuucgggacgacccucgacagcaagacccagucccugcugaucgugaacaacgccaccaacguggucaucaaggugugcgaguuccaguucugcaacgaccccuuccucggcguguacuaccacaagaacaacaagagcuggauggaguccgaguuccgggucuacagcuccgccaacaacugcacguucgaguacgugagccagcccuuccugauggaccuggagggcaagcaggggaacuucaagaaccuccgcgaguucguguucaagaacaucgacggcuacuucaagaucuacuccaagcacaccccgaucaaccugguccgggaccugccccagggguucagcgcccucgagccccugguggaccugcccaucggcaucaacaucacccgcuuccagacccuccuggcccugcaccgguccuaccucacgccgggggacagcagcuccggcuggaccgcgggcgccgccgccuacuacgugggguaccugcagccccgcaccuuccugcucaaguacaacgagaacggcaccaucacggacgcggucgacugcgcccuggacccccugagcgagaccaagugcacccucaaguccuucaccguggagaaggggaucuaccagacgagcaacuuccgggugcagcccaccgaguccaucguccgcuucccgaacaucaccaaccugugccccuucggcgagguguucaacgccacccgguucgccagcgucuacgccuggaaccgcaagcggaucuccaacugcguggcggacuacagcgugcuguacaacuccgccagcuucuccacguucaagugcuacggcgucagccccaccaagcucaacgaccugugcuucaccaacguguacgccgacuccuucgugauccgcggggacgagguccggcagaucgcccccggccagaccgggaagaucgccgacuacaacuacaagcugccggacgacuucacgggcugcgugaucgcguggaacagcaacaaccucgacuccaaggucgggggcaacuacaacuaccuguaccgccuguuccgcaagagcaaccucaagcccuucgagcgggacaucuccaccgagaucuaccaggccggcagcacccccugcaacgggguggagggcuucaacugcuacuucccccugcaguccuacggguuccagccgaccaacggcgugggguaccagcccuaccggguggucgugcugagcuucgagcuccugcacgcccccgccacggugugcggccccaagaaguccaccaaccuggucaagaacaagugcgugaacuucaacuucaacggccucaccgggaccggcgugcugaccgagagcaacaagaaguuccugccguuccagcaguucgggcgcgacaucgccgacacgaccgacgcgguccgcgacccccagacccuggagauccucgacaucacccccugcagcuucggcgggguguccgugaucacgccgggcaccaacaccagcaaccaggucgccgugcuguaccaggacgugaacugcaccgagguccccguggccauccacgccgaccagcugacgcccaccuggcggguguacuccaccggcagcaacgucuuccagacccgcgccgggugccucaucggcgcggagcacgugaacaacuccuacgagugcgacauccccaucggggccggcaucugcgccagcuaccagacgcagaccaacuccccgcggcgcgcccggagcguggcgucccagagcaucaucgccuacaccaugucccugggcgccgagaacagcgucgccuacuccaacaacagcaucgccauccccaccaacuucacgaucuccgugaccaccgagauccugcccgugagcaugaccaagacgagcgucgacugcaccauguacaucugcggggacuccaccgagugcagcaaccuccugcugcaguacggcuccuucugcacccagcucaaccgcgcgcugacggggaucgccguggagcaggacaagaacacccaggagguguucgcccaggucaagcagaucuacaagacgcccccgaucaaggacuucggcggguucaacuucagccagauccugcccgaccccuccaagcccagcaagcgguccuucaucgaggaccuccuguucaacaaggugacccuggccgacgccggcuucaucaagcaguacggcgacugccucggggacaucgcggcccgcgaccugaucugcgcccagaaguucaacggccugaccgugcucccgccccugcugaccgacgagaugaucgcccaguacaccagcgcccuccuggcggggaccaucacguccggcuggaccuucggggccggcgccgcccugcagauccccuucgcgaugcagauggccuaccgguucaacggcaucggggucacccagaacgugcucuacgagaaccagaagcugaucgccaaccaguucaacagcgccaucggcaagauccaggacucccugagcuccaccgccagcgcgcucgggaagcugcaggacguggucaaccagaacgcccaggcccugaacacgcucgugaagcagcuguccagcaacugcggcgccaucuccagcgugcugaacgacauccucucccgccuggacaaggucgaggccgaggugcagaucgaccggcugaucaccugucgccuccagagccugcagaccuacgugacccagcagcugauccgggcggccgagauccgcgccagcgccaaccucgccgcgaccaagauguccgagugcguccugggccagagcaagcggguggacuucugcggcaagggguaccaccugauguccuucccccagagcgccccgcacggcguggucuuccuccacgugacguacguccccgcccaggagaagaacuucaccaccgcccccgcgaucugccacgacgggaaggcccacuucccccgcgagggcguguucguguccaacgggacccacugguucgucacgcagcggaacuucuacgagccgcagaucaucaccaccgacaacaccuucgugagcggcaacugcgacguggucaucggcaucgugaacaacacgguguacgacccccugcagcccgagcuggacuccggcgggagcggcuacauccccgaggccccgcgcgacgggcaggccuacgugcggaaggacggcgaguggguccugcucagcaccuuccuguga

SEQ ID NO: 11949 - RNA, 3534 nt, Artificial Sequence
  SARS-CoV-2/Wuhan/WIV05/2019__EPI_ISL_402128 spike protein CDS gc (1-1147)(A972C_R995C) Foldon construct
auguucguguuccugguccuccugccccuggugagcucccagugcgugaaccucaccacccgcacgcagcugccgcccgccuacaccaacagcuucacccggggcgucuacuaccccgacaagguguuccgcuccagcgugcugcacuccacccaggaccucuuccugcccuucuucagcaacgucacgugguuccacgccauccacguguccgggaccaacggcaccaagcgguucgacaacccggugcugcccuucaacgacggggucuacuucgcgagcaccgagaaguccaacaucauccgcggcuggaucuucgggacgacccucgacagcaagacccagucccugcugaucgugaacaacgccaccaacguggucaucaaggugugcgaguuccaguucugcaacgaccccuuccucggcguguacuaccacaagaacaacaagagcuggauggaguccgaguuccgggucuacagcuccgccaacaacugcacguucgaguacgugagccagcccuuccugauggaccuggagggcaagcaggggaacuucaagaaccuccgcgaguucguguucaagaacaucgacggcuacuucaagaucuacuccaagcacaccccgaucaaccugguccgggaccugccccagggguucagcgcccucgagccccugguggaccugcccaucggcaucaacaucacccgcuuccagacccuccuggcccugcaccgguccuaccucacgccgggggacagcagcuccggcuggaccgcgggcgccgccgccuacuacgugggguaccugcagccccgcaccuuccugcucaaguacaacgagaacggcaccaucacggacgcggucgacugcgcccuggacccccugagcgagaccaagugcacccucaaguccuucaccguggagaaggggaucuaccagacgagcaacuuccgggugcagcccaccgaguccaucguccgcuucccgaacaucaccaaccugugccccuucggcgagguguucaacgccacccgguucgccagcgucuacgccuggaaccgcaagcggaucuccaacugcguggcggacuacagcgugcuguacaacuccgccagcuucuccacguucaagugcuacggcgucagccccaccaagcucaacgaccugugcuucaccaacguguacgccgacuccuucgugauccgcggggacgagguccggcagaucgcccccggccagaccgggaagaucgccgacuacaacuacaagcugccggacgacuucacgggcugcgugaucgcguggaacagcaacaaccucgacuccaaggucgggggcaacuacaacuaccuguaccgccuguuccgcaagagcaaccucaagcccuucgagcgggacaucuccaccgagaucuaccaggccggcagcacccccugcaacgggguggagggcuucaacugcuacuucccccugcaguccuacggguuccagccgaccaacggcgugggguaccagcccuaccggguggucgugcugagcuucgagcuccugcacgcccccgccacggugugcggccccaagaaguccaccaaccuggucaagaacaagugcgugaacuucaacuucaacggccucaccgggaccggcgugcugaccgagagcaacaagaaguuccugccguuccagcaguucgggcgcgacaucgccgacacgaccgacgcgguccgcgacccccagacccuggagauccucgacaucacccccugcagcuucggcgggguguccgugaucacgccgggcaccaacaccagcaaccaggucgccgugcuguaccaggacgugaacugcaccgagguccccguggccauccacgccgaccagcugacgcccaccuggcggguguacuccaccggcagcaacgucuuccagacccgcgccgggugccucaucggcgcggagcacgugaacaacuccuacgagugcgacauccccaucggggccggcaucugcgccagcuaccagacgcagaccaacuccccgcggcgcgcccggagcguggcgucccagagcaucaucgccuacaccaugucccugggcgccgagaacagcgucgccuacuccaacaacagcaucgccauccccaccaacuucacgaucuccgugaccaccgagauccugcccgugagcaugaccaagacgagcgucgacugcaccauguacaucugcggggacuccaccgagugcagcaaccuccugcugcaguacggcuccuucugcacccagcucaaccgcgcgcugacggggaucgccguggagcaggacaagaacacccaggagguguucgcccaggucaagcagaucuacaagacgcccccgaucaaggacuucggcggguucaacuucagccagauccugcccgaccccuccaagcccagcaagcgguccuucaucgaggaccuccuguucaacaaggugacccuggccgacgccggcuucaucaagcaguacggcgacugccucggggacaucgcggcccgcgaccugaucugcgcccagaaguucaacggccugaccgugcucccgccccugcugaccgacgagaugaucgcccaguacaccagcgcccuccuggcggggaccaucacguccggcuggaccuucggggccggcgccgcccugcagauccccuucgcgaugcagauggccuaccgguucaacggcaucggggucacccagaacgugcucuacgagaaccagaagcugaucgccaaccaguucaacagcgccaucggcaagauccaggacucccugagcuccaccgccagcgcgcucgggaagcugcaggacguggucaaccagaacgcccaggcccugaacacgcucgugaagcagcuguccagcaacuucggcugcaucuccagcgugcugaacgacauccucucccgccuggacaaggucgaggccgaggugcagaucgacugccugaucaccgggcgccuccagagccugcagaccuacgugacccagcagcugauccgggcggccgagauccgcgccagcgccaaccucgccgcgaccaagauguccgagugcguccugggccagagcaagcggguggacuucugcggcaagggguaccaccugauguccuucccccagagcgccccgcacggcguggucuuccuccacgugacguacguccccgcccaggagaagaacuucaccaccgcccccgcgaucugccacgacgggaaggcccacuucccccgcgagggcguguucguguccaacgggacccacugguucgucacgcagcggaacuucuacgagccgcagaucaucaccaccgacaacaccuucgugagcggcaacugcgacguggucaucggcaucgugaacaacacgguguacgacccccugcagcccgagcuggacuccggcgggagcggcuacauccccgaggccccgcgcgacgggcaggccuacgugcggaaggacggcgaguggguccugcucagcaccuuccuguga

SEQ ID NO: 11950 - RNA, 3534 nt, Artificial Sequence
  SARS-CoV-2/Wuhan/WIV05/2019__EPI_ISL_402128 spike protein CDS gc (1-1147)(A890C_V1040C) Foldon construct
auguucguguuccugguccuccugccccuggugagcucccagugcgugaaccucaccacccgcacgcagcugccgcccgccuacaccaacagcuucacccggggcgucuacuaccccgacaagguguuccgcuccagcgugcugcacuccacccaggaccucuuccugcccuucuucagcaacgucacgugguuccacgccauccacguguccgggaccaacggcaccaagcgguucgacaacccggugcugcccuucaacgacggggucuacuucgcgagcaccgagaaguccaacaucauccgcggcuggaucuucgggacgacccucgacagcaagacccagucccugcugaucgugaacaacgccaccaacguggucaucaaggugugcgaguuccaguucugcaacgaccccuuccucggcguguacuaccacaagaacaacaagagcuggauggaguccgaguuccgggucuacagcuccgccaacaacugcacguucgaguacgugagccagcccuuccugauggaccuggagggcaagcaggggaacuucaagaaccuccgcgaguucguguucaagaacaucgacggcuacuucaagaucuacuccaagcacaccccgaucaaccugguccgggaccugccccagggguucagcgcccucgagccccugguggaccugcccaucggcaucaacaucacccgcuuccagacccuccuggcccugcaccgguccuaccucacgccgggggacagcagcuccggcuggaccgcgggcgccgccgccuacuacgugggguaccugcagccccgcaccuuccugcucaaguacaacgagaacggcaccaucacggacgcggucgacugcgcccuggacccccugagcgagaccaagugcacccucaaguccuucaccguggagaaggggaucuaccagacgagcaacuuccgggugcagcccaccgaguccaucguccgcuucccgaacaucaccaaccugugccccuucggcgagguguucaacgccacccgguucgccagcgucuacgccuggaaccgcaagcggaucuccaacugcguggcggacuacagcgugcuguacaacuccgccagcuucuccacguucaagugcuacggcgucagccccaccaagcucaacgaccugugcuucaccaacguguacgccgacuccuucgugauccgcggggacgagguccggcagaucgcccccggccagaccgggaagaucgccgacuacaacuacaagcugccggacgacuucacgggcugcgugaucgcguggaacagcaacaaccucgacuccaaggucgggggcaacuacaacuaccuguaccgccuguuccgcaagagcaaccucaagcccuucgagcgggacaucuccaccgagaucuaccaggccggcagcacccccugcaacgggguggagggcuucaacugcuacuucccccugcaguccuacggguuccagccgaccaacggcgugggguaccagcccuaccggguggucgugcugagcuucgagcuccugcacgcccccgccacggugugcggccccaagaaguccaccaaccuggucaagaacaagugcgugaacuucaacuucaacggccucaccgggaccggcgugcugaccgagagcaacaagaaguuccugccguuccagcaguucgggcgcgacaucgccgacacgaccgacgcgguccgcgacccccagacccuggagauccucgacaucacccccugcagcuucggcgggguguccgugaucacgccgggcaccaacaccagcaaccaggucgccgugcuguaccaggacgugaacugcaccgagguccccguggccauccacgccgaccagcugacgcccaccuggcggguguacuccaccggcagcaacgucuuccagacccgcgccgggugccucaucggcgcggagcacgugaacaacuccuacgagugcgacauccccaucggggccggcaucugcgccagcuaccagacgcagaccaacuccccgcggcgcgcccggagcguggcgucccagagcaucaucgccuacaccaugucccugggcgccgagaacagcgucgccuacuccaacaacagcaucgccauccccaccaacuucacgaucuccgugaccaccgagauccugcccgugagcaugaccaagacgagcgucgacugcaccauguacaucugcggggacuccaccgagugcagcaaccuccugcugcaguacggcuccuucugcacccagcucaaccgcgcgcugacggggaucgccguggagcaggacaagaacacccaggagguguucgcccaggucaagcagaucuacaagacgcccccgaucaaggacuucggcggguucaacuucagccagauccugcccgaccccuccaagcccagcaagcgguccuucaucgaggaccuccuguucaacaaggugacccuggccgacgccggcuucaucaagcaguacggcgacugccucggggacaucgcggcccgcgaccugaucugcgcccagaaguucaacggccugaccgugcucccgccccugcugaccgacgagaugaucgcccaguacaccagcgcccuccuggcggggaccaucacguccggcuggaccuucgggugcggcgccgcccugcagauccccuucgcgaugcagauggccuaccgguucaacggcaucggggucacccagaacgugcucuacgagaaccagaagcugaucgccaaccaguucaacagcgccaucggcaagauccaggacucccugagcuccaccgccagcgcgcucgggaagcugcaggacguggucaaccagaacgcccaggcccugaacacgcucgugaagcagcuguccagcaacuucggcgccaucuccagcgugcugaacgacauccucucccgccuggacaaggucgaggccgaggugcagaucgaccggcugaucaccgggcgccuccagagccugcagaccuacgugacccagcagcugauccgggcggccgagauccgcgccagcgccaaccucgccgcgaccaagauguccgagugcguccugggccagagcaagcggugcgacuucugcggcaagggguaccaccugauguccuucccccagagcgccccgcacggcguggucuuccuccacgugacguacguccccgcccaggagaagaacuucaccaccgcccccgcgaucugccacgacgggaaggcccacuucccccgcgagggcguguucguguccaacgggacccacugguucgucacgcagcggaacuucuacgagccgcagaucaucaccaccgacaacaccuucgugagcggcaacugcgacguggucaucggcaucgugaacaacacgguguacgacccccugcagcccgagcuggacuccggcgggagcggcuacauccccgaggccccgcgcgacgggcaggccuacgugcggaaggacggcgaguggguccugcucagcaccuuccuguga

SEQ ID NO: 11951 - RNA, 3534 nt, Artificial Sequence
  SARS-CoV-2/Wuhan/WIV05/2019__EPI_ISL_402128 spike protein CDS gc (1-1147)(T874C_S1055C) Foldon construct
auguucguguuccugguccuccugccccuggugagcucccagugcgugaaccucaccacccgcacgcagcugccgcccgccuacaccaacagcuucacccggggcgucuacuaccccgacaagguguuccgcuccagcgugcugcacuccacccaggaccucuuccugcccuucuucagcaacgucacgugguuccacgccauccacguguccgggaccaacggcaccaagcgguucgacaacccggugcugcccuucaacgacggggucuacuucgcgagcaccgagaaguccaacaucauccgcggcuggaucuucgggacgacccucgacagcaagacccagucccugcugaucgugaacaacgccaccaacguggucaucaaggugugcgaguuccaguucugcaacgaccccuuccucggcguguacuaccacaagaacaacaagagcuggauggaguccgaguuccgggucuacagcuccgccaacaacugcacguucgaguacgugagccagcccuuccugauggaccuggagggcaagcaggggaacuucaagaaccuccgcgaguucguguucaagaacaucgacggcuacuucaagaucuacuccaagcacaccccgaucaaccugguccgggaccugccccagggguucagcgcccucgagccccugguggaccugcccaucggcaucaacaucacccgcuuccagacccuccuggcccugcaccgguccuaccucacgccgggggacagcagcuccggcuggaccgcgggcgccgccgccuacuacgugggguaccugcagccccgcaccuuccugcucaaguacaacgagaacggcaccaucacggacgcggucgacugcgcccuggacccccugagcgagaccaagugcacccucaaguccuucaccguggagaaggggaucuaccagacgagcaacuuccgggugcagcccaccgaguccaucguccgcuucccgaacaucaccaaccugugccccuucggcgagguguucaacgccacccgguucgccagcgucuacgccuggaaccgcaagcggaucuccaacugcguggcggacuacagcgugcuguacaacuccgccagcuucuccacguucaagugcuacggcgucagccccaccaagcucaacgaccugugcuucaccaacguguacgccgacuccuucgugauccgcggggacgagguccggcagaucgcccccggccagaccgggaagaucgccgacuacaacuacaagcugccggacgacuucacgggcugcgugaucgcguggaacagcaacaaccucgacuccaaggucgggggcaacuacaacuaccuguaccgccuguuccgcaagagcaaccucaagcccuucgagcgggacaucuccaccgagaucuaccaggccggcagcacccccugcaacgggguggagggcuucaacugcuacuucccccugcaguccuacggguuccagccgaccaacggcgugggguaccagcccuaccggguggucgugcugagcuucgagcuccugcacgcccccgccacggugugcggccccaagaaguccaccaaccuggucaagaacaagugcgugaacuucaacuucaacggccucaccgggaccggcgugcugaccgagagcaacaagaaguuccugccguuccagcaguucgggcgcgacaucgccgacacgaccgacgcgguccgcgacccccagacccuggagauccucgacaucacccccugcagcuucggcgggguguccgugaucacgccgggcaccaacaccagcaaccaggucgccgugcuguaccaggacgugaacugcaccgagguccccguggccauccacgccgaccagcugacgcccaccuggcggguguacuccaccggcagcaacgucuuccagacccgcgccgggugccucaucggcgcggagcacgugaacaacuccuacgagugcgacauccccaucggggccggcaucugcgccagcuaccagacgcagaccaacuccccgcggcgcgcccggagcguggcgucccagagcaucaucgccuacaccaugucccugggcgccgagaacagcgucgccuacuccaacaacagcaucgccauccccaccaacuucacgaucuccgugaccaccgagauccugcccgugagcaugaccaagacgagcgucgacugcaccauguacaucugcggggacuccaccgagugcagcaaccuccugcugcaguacggcuccuucugcacccagcucaaccgcgcgcugacggggaucgccguggagcaggacaagaacacccaggagguguucgcccaggucaagcagaucuacaagacgcccccgaucaaggacuucggcggguucaacuucagccagauccugcccgaccccuccaagcccagcaagcgguccuucaucgaggaccuccuguucaacaaggugacccuggccgacgccggcuucaucaagcaguacggcgacugccucggggacaucgcggcccgcgaccugaucugcgcccagaaguucaacggccugaccgugcucccgccccugcugaccgacgagaugaucgcccaguacugcagcgcccuccuggcggggaccaucacguccggcuggaccuucggggccggcgccgcccugcagauccccuucgcgaugcagauggccuaccgguucaacggcaucggggucacccagaacgugcucuacgagaaccagaagcugaucgccaaccaguucaacagcgccaucggcaagauccaggacucccugagcuccaccgccagcgcgcucgggaagcugcaggacguggucaaccagaacgcccaggcccugaacacgcucgugaagcagcuguccagcaacuucggcgccaucuccagcgugcugaacgacauccucucccgccuggacaaggucgaggccgaggugcagaucgaccggcugaucaccgggcgccuccagagccugcagaccuacgugacccagcagcugauccgggcggccgagauccgcgccagcgccaaccucgccgcgaccaagauguccgagugcguccugggccagagcaagcggguggacuucugcggcaagggguaccaccugauguccuucccccagugcgccccgcacggcguggucuuccuccacgugacguacguccccgcccaggagaagaacuucaccaccgcccccgcgaucugccacgacgggaaggcccacuucccccgcgagggcguguucguguccaacgggacccacugguucgucacgcagcggaacuucuacgagccgcagaucaucaccaccgacaacaccuucgugagcggcaacugcgacguggucaucggcaucgugaacaacacgguguacgacccccugcagcccgagcuggacuccggcgggagcggcuacauccccgaggccccgcgcgacgggcaggccuacgugcggaaggacggcgaguggguccugcucagcaccuuccuguga

SEQ ID NO: 11952 - RNA, 3906 nt, Artificial Sequence
  SARS-CoV-2/Wuhan/WIV05/2019__EPI_ISL_402128 spike protein CDS gc (1-1147) WhcAg construct
auguucguguuccugguccuccugccccuggugagcucccagugcgugaaccucaccacccgcacgcagcugccgcccgccuacaccaacagcuucacccggggcgucuacuaccccgacaagguguuccgcuccagcgugcugcacuccacccaggaccucuuccugcccuucuucagcaacgucacgugguuccacgccauccacguguccgggaccaacggcaccaagcgguucgacaacccggugcugcccuucaacgacggggucuacuucgcgagcaccgagaaguccaacaucauccgcggcuggaucuucgggacgacccucgacagcaagacccagucccugcugaucgugaacaacgccaccaacguggucaucaaggugugcgaguuccaguucugcaacgaccccuuccucggcguguacuaccacaagaacaacaagagcuggauggaguccgaguuccgggucuacagcuccgccaacaacugcacguucgaguacgugagccagcccuuccugauggaccuggagggcaagcaggggaacuucaagaaccuccgcgaguucguguucaagaacaucgacggcuacuucaagaucuacuccaagcacaccccgaucaaccugguccgggaccugccccagggguucagcgcccucgagccccugguggaccugcccaucggcaucaacaucacccgcuuccagacccuccuggcccugcaccgguccuaccucacgccgggggacagcagcuccggcuggaccgcgggcgccgccgccuacuacgugggguaccugcagccccgcaccuuccugcucaaguacaacgagaacggcaccaucacggacgcggucgacugcgcccuggacccccugagcgagaccaagugcacccucaaguccuucaccguggagaaggggaucuaccagacgagcaacuuccgggugcagcccaccgaguccaucguccgcuucccgaacaucaccaaccugugccccuucggcgagguguucaacgccacccgguucgccagcgucuacgccuggaaccgcaagcggaucuccaacugcguggcggacuacagcgugcuguacaacuccgccagcuucuccacguucaagugcuacggcgucagccccaccaagcucaacgaccugugcuucaccaacguguacgccgacuccuucgugauccgcggggacgagguccggcagaucgcccccggccagaccgggaagaucgccgacuacaacuacaagcugccggacgacuucacgggcugcgugaucgcguggaacagcaacaaccucgacuccaaggucgggggcaacuacaacuaccuguaccgccuguuccgcaagagcaaccucaagcccuucgagcgggacaucuccaccgagaucuaccaggccggcagcacccccugcaacgggguggagggcuucaacugcuacuucccccugcaguccuacggguuccagccgaccaacggcgugggguaccagcccuaccggguggucgugcugagcuucgagcuccugcacgcccccgccacggugugcggccccaagaaguccaccaaccuggucaagaacaagugcgugaacuucaacuucaacggccucaccgggaccggcgugcugaccgagagcaacaagaaguuccugccguuccagcaguucgggcgcgacaucgccgacacgaccgacgcgguccgcgacccccagacccuggagauccucgacaucacccccugcagcuucggcgggguguccgugaucacgccgggcaccaacaccagcaaccaggucgccgugcuguaccaggacgugaacugcaccgagguccccguggccauccacgccgaccagcugacgcccaccuggcggguguacuccaccggcagcaacgucuuccagacccgcgccgggugccucaucggcgcggagcacgugaacaacuccuacgagugcgacauccccaucggggccggcaucugcgccagcuaccagacgcagaccaacuccccgcggcgcgcccggagcguggcgucccagagcaucaucgccuacaccaugucccugggcgccgagaacagcgucgccuacuccaacaacagcaucgccauccccaccaacuucacgaucuccgugaccaccgagauccugcccgugagcaugaccaagacgagcgucgacugcaccauguacaucugcggggacuccaccgagugcagcaaccuccugcugcaguacggcuccuucugcacccagcucaaccgcgcgcugacggggaucgccguggagcaggacaagaacacccaggagguguucgcccaggucaagcagaucuacaagacgcccccgaucaaggacuucggcggguucaacuucagccagauccugcccgaccccuccaagcccagcaagcgguccuucaucgaggaccuccuguucaacaaggugacccuggccgacgccggcuucaucaagcaguacggcgacugccucggggacaucgcggcccgcgaccugaucugcgcccagaaguucaacggccugaccgugcucccgccccugcugaccgacgagaugaucgcccaguacaccagcgcccuccuggcggggaccaucacguccggcuggaccuucggggccggcgccgcccugcagauccccuucgcgaugcagauggccuaccgguucaacggcaucggggucacccagaacgugcucuacgagaaccagaagcugaucgccaaccaguucaacagcgccaucggcaagauccaggacucccugagcuccaccgccagcgcgcucgggaagcugcaggacguggucaaccagaacgcccaggcccugaacacgcucgugaagcagcuguccagcaacuucggcgccaucuccagcgugcugaacgacauccucucccgccuggacaaggucgaggccgaggugcagaucgaccggcugaucaccgggcgccuccagagccugcagaccuacgugacccagcagcugauccgggcggccgagauccgcgccagcgccaaccucgccgcgaccaagauguccgagugcguccugggccagagcaagcggguggacuucugcggcaagggguaccaccugauguccuucccccagagcgccccgcacggcguggucuuccuccacgugacguacguccccgcccaggagaagaacuucaccaccgcccccgcgaucugccacgacgggaaggcccacuucccccgcgagggcguguucguguccaacgggacccacugguucgucacgcagcggaacuucuacgagccgcagaucaucaccaccgacaacaccuucgugagcggcaacugcgacguggucaucggcaucgugaacaacacgguguacgacccccugcagcccgagcuggacuccggcgggggcgggagcgacaucgaccccuacaaggaguucggcagcuccuaccagcugcucaacuuccugccccuggacuucuuccccgaccucaacgcccugguggacaccgccaccgcgcuguacgaggaggagcucacggggcgcgagcacugcagcccccaccacaccgccauccggcaggcccuggucugcugggacgagcugaccaagcucaucgccuggauguccagcaacaucaccuccgagcagguccgcacgaucaucgugaaccacgucaacgacaccuggggccugaaggugcggcagagccugugguuccaccucuccugccugaccuucgggcagcacaccgugcaggaguuccuggucagcuucggcguguggauccgcacgcccgccccguaccggccgcccaacgcgccgauccucuccacccugccggagcacaccgugaucugcuga

SEQ ID NO: 11953 - RNA, 3906 nt, Artificial Sequence
  SARS-CoV-2/Wuhan/WIV05/2019__EPI_ISL_402128 spike protein CDS gc (1-1147)(K986P_V987P) WhcAg construct
auguucguguuccugguccuccugccccuggugagcucccagugcgugaaccucaccacccgcacgcagcugccgcccgccuacaccaacagcuucacccggggcgucuacuaccccgacaagguguuccgcuccagcgugcugcacuccacccaggaccucuuccugcccuucuucagcaacgucacgugguuccacgccauccacguguccgggaccaacggcaccaagcgguucgacaacccggugcugcccuucaacgacggggucuacuucgcgagcaccgagaaguccaacaucauccgcggcuggaucuucgggacgacccucgacagcaagacccagucccugcugaucgugaacaacgccaccaacguggucaucaaggugugcgaguuccaguucugcaacgaccccuuccucggcguguacuaccacaagaacaacaagagcuggauggaguccgaguuccgggucuacagcuccgccaacaacugcacguucgaguacgugagccagcccuuccugauggaccuggagggcaagcaggggaacuucaagaaccuccgcgaguucguguucaagaacaucgacggcuacuucaagaucuacuccaagcacaccccgaucaaccugguccgggaccugccccagggguucagcgcccucgagccccugguggaccugcccaucggcaucaacaucacccgcuuccagacccuccuggcccugcaccgguccuaccucacgccgggggacagcagcuccggcuggaccgcgggcgccgccgccuacuacgugggguaccugcagccccgcaccuuccugcucaaguacaacgagaacggcaccaucacggacgcggucgacugcgcccuggacccccugagcgagaccaagugcacccucaaguccuucaccguggagaaggggaucuaccagacgagcaacuuccgggugcagcccaccgaguccaucguccgcuucccgaacaucaccaaccugugccccuucggcgagguguucaacgccacccgguucgccagcgucuacgccuggaaccgcaagcggaucuccaacugcguggcggacuacagcgugcuguacaacuccgccagcuucuccacguucaagugcuacggcgucagccccaccaagcucaacgaccugugcuucaccaacguguacgccgacuccuucgugauccgcggggacgagguccggcagaucgcccccggccagaccgggaagaucgccgacuacaacuacaagcugccggacgacuucacgggcugcgugaucgcguggaacagcaacaaccucgacuccaaggucgggggcaacuacaacuaccuguaccgccuguuccgcaagagcaaccucaagcccuucgagcgggacaucuccaccgagaucuaccaggccggcagcacccccugcaacgggguggagggcuucaacugcuacuucccccugcaguccuacggguuccagccgaccaacggcgugggguaccagcccuaccggguggucgugcugagcuucgagcuccugcacgcccccgccacggugugcggccccaagaaguccaccaaccuggucaagaacaagugcgugaacuucaacuucaacggccucaccgggaccggcgugcugaccgagagcaacaagaaguuccugccguuccagcaguucgggcgcgacaucgccgacacgaccgacgcgguccgcgacccccagacccuggagauccucgacaucacccccugcagcuucggcgggguguccgugaucacgccgggcaccaacaccagcaaccaggucgccgugcuguaccaggacgugaacugcaccgagguccccguggccauccacgccgaccagcugacgcccaccuggcggguguacuccaccggcagcaacgucuuccagacccgcgccgggugccucaucggcgcggagcacgugaacaacuccuacgagugcgacauccccaucggggccggcaucugcgccagcuaccagacgcagaccaacuccccgcggcgcgcccggagcguggcgucccagagcaucaucgccuacaccaugucccugggcgccgagaacagcgucgccuacuccaacaacagcaucgccauccccaccaacuucacgaucuccgugaccaccgagauccugcccgugagcaugaccaagacgagcgucgacugcaccauguacaucugcggggacuccaccgagugcagcaaccuccugcugcaguacggcuccuucugcacccagcucaaccgcgcgcugacggggaucgccguggagcaggacaagaacacccaggagguguucgcccaggucaagcagaucuacaagacgcccccgaucaaggacuucggcggguucaacuucagccagauccugcccgaccccuccaagcccagcaagcgguccuucaucgaggaccuccuguucaacaaggugacccuggccgacgccggcuucaucaagcaguacggcgacugccucggggacaucgcggcccgcgaccugaucugcgcccagaaguucaacggccugaccgugcucccgccccugcugaccgacgagaugaucgcccaguacaccagcgcccuccuggcggggaccaucacguccggcuggaccuucggggccggcgccgcccugcagauccccuucgcgaugcagauggccuaccgguucaacggcaucggggucacccagaacgugcucuacgagaaccagaagcugaucgccaaccaguucaacagcgccaucggcaagauccaggacucccugagcuccaccgccagcgcgcucgggaagcugcaggacguggucaaccagaacgcccaggcccugaacacgcucgugaagcagcuguccagcaacuucggcgccaucuccagcgugcugaacgacauccucucccgccuggacccgcccgaggccgaggugcagaucgaccggcugaucaccgggcgccuccagagccugcagaccuacgugacccagcagcugauccgggcggccgagauccgcgccagcgccaaccucgccgcgaccaagauguccgagugcguccugggccagagcaagcggguggacuucugcggcaagggguaccaccugauguccuucccccagagcgccccgcacggcguggucuuccuccacgugacguacguccccgcccaggagaagaacuucaccaccgcccccgcgaucugccacgacgggaaggcccacuucccccgcgagggcguguucguguccaacgggacccacugguucgucacgcagcggaacuucuacgagccgcagaucaucaccaccgacaacaccuucgugagcggcaacugcgacguggucaucggcaucgugaacaacacgguguacgacccccugcagcccgagcuggacuccggcgggggcgggagcgacaucgaccccuacaaggaguucggcagcuccuaccagcugcucaacuuccugccccuggacuucuuccccgaccucaacgcccugguggacaccgccaccgcgcuguacgaggaggagcucacggggcgcgagcacugcagcccccaccacaccgccauccggcaggcccuggucugcugggacgagcugaccaagcucaucgccuggauguccagcaacaucaccuccgagcagguccgcacgaucaucgugaaccacgucaacgacaccuggggccugaaggugcggcagagccugugguuccaccucuccugccugaccuucgggcagcacaccgugcaggaguuccuggucagcuucggcguguggauccgcacgcccgccccguaccggccgcccaacgcgccgauccucuccacccugccggagcacaccgugaucugcuga

SEQ ID NO: 11954 - RNA, 3906 nt, Artificial Sequence
  SARS-CoV-2/Wuhan/WIV05/2019__EPI_ISL_402128 spike protein CDS gc (1-1147)(K986P_V987P_T887WN_A1020W) WhcAg construct
auguucguguuccugguccuccugccccuggugagcucccagugcgugaaccucaccacccgcacgcagcugccgcccgccuacaccaacagcuucacccggggcgucuacuaccccgacaagguguuccgcuccagcgugcugcacuccacccaggaccucuuccugcccuucuucagcaacgucacgugguuccacgccauccacguguccgggaccaacggcaccaagcgguucgacaacccggugcugcccuucaacgacggggucuacuucgcgagcaccgagaaguccaacaucauccgcggcuggaucuucgggacgacccucgacagcaagacccagucccugcugaucgugaacaacgccaccaacguggucaucaaggugugcgaguuccaguucugcaacgaccccuuccucggcguguacuaccacaagaacaacaagagcuggauggaguccgaguuccgggucuacagcuccgccaacaacugcacguucgaguacgugagccagcccuuccugauggaccuggagggcaagcaggggaacuucaagaaccuccgcgaguucguguucaagaacaucgacggcuacuucaagaucuacuccaagcacaccccgaucaaccugguccgggaccugccccagggguucagcgcccucgagccccugguggaccugcccaucggcaucaacaucacccgcuuccagacccuccuggcccugcaccgguccuaccucacgccgggggacagcagcuccggcuggaccgcgggcgccgccgccuacuacgugggguaccugcagccccgcaccuuccugcucaaguacaacgagaacggcaccaucacggacgcggucgacugcgcccuggacccccugagcgagaccaagugcacccucaaguccuucaccguggagaaggggaucuaccagacgagcaacuuccgggugcagcccaccgaguccaucguccgcuucccgaacaucaccaaccugugccccuucggcgagguguucaacgccacccgguucgccagcgucuacgccuggaaccgcaagcggaucuccaacugcguggcggacuacagcgugcuguacaacuccgccagcuucuccacguucaagugcuacggcgucagccccaccaagcucaacgaccugugcuucaccaacguguacgccgacuccuucgugauccgcggggacgagguccggcagaucgcccccggccagaccgggaagaucgccgacuacaacuacaagcugccggacgacuucacgggcugcgugaucgcguggaacagcaacaaccucgacuccaaggucgggggcaacuacaacuaccuguaccgccuguuccgcaagagcaaccucaagcccuucgagcgggacaucuccaccgagaucuaccaggccggcagcacccccugcaacgggguggagggcuucaacugcuacuucccccugcaguccuacggguuccagccgaccaacggcgugggguaccagcccuaccggguggucgugcugagcuucgagcuccugcacgcccccgccacggugugcggccccaagaaguccaccaaccuggucaagaacaagugcgugaacuucaacuucaacggccucaccgggaccggcgugcugaccgagagcaacaagaaguuccugccguuccagcaguucgggcgcgacaucgccgacacgaccgacgcgguccgcgacccccagacccuggagauccucgacaucacccccugcagcuucggcgggguguccgugaucacgccgggcaccaacaccagcaaccaggucgccgugcuguaccaggacgugaacugcaccgagguccccguggccauccacgccgaccagcugacgcccaccuggcggguguacuccaccggcagcaacgucuuccagacccgcgccgggugccucaucggcgcggagcacgugaacaacuccuacgagugcgacauccccaucggggccggcaucugcgccagcuaccagacgcagaccaacuccccgcggcgcgcccggagcguggcgucccagagcaucaucgccuacaccaugucccugggcgccgagaacagcgucgccuacuccaacaacagcaucgccauccccaccaacuucacgaucuccgugaccaccgagauccugcccgugagcaugaccaagacgagcgucgacugcaccauguacaucugcggggacuccaccgagugcagcaaccuccugcugcaguacggcuccuucugcacccagcucaaccgcgcgcugacggggaucgccguggagcaggacaagaacacccaggagguguucgcccaggucaagcagaucuacaagacgcccccgaucaaggacuucggcggguucaacuucagccagauccugcccgaccccuccaagcccagcaagcgguccuucaucgaggaccuccuguucaacaaggugacccuggccgacgccggcuucaucaagcaguacggcgacugccucggggacaucgcggcccgcgaccugaucugcgcccagaaguucaacggccugaccgugcucccgccccugcugaccgacgagaugaucgcccaguacaccagcgcccuccuggcggggaccaucacguccggcuggugguucggggccggcgccgcccugcagauccccuucgcgaugcagauggccuaccgguucaacggcaucggggucacccagaacgugcucuacgagaaccagaagcugaucgccaaccaguucaacagcgccaucggcaagauccaggacucccugagcuccaccgccagcgcgcucgggaagcugcaggacguggucaaccagaacgcccaggcccugaacacgcucgugaagcagcuguccagcaacuucggcgccaucuccagcgugcugaacgacauccucucccgccuggacccgcccgaggccgaggugcagaucgaccggcugaucaccgggcgccuccagagccugcagaccuacgugacccagcagcugauccgggcggccgagauccgcuggagcgccaaccucgccgcgaccaagauguccgagugcguccugggccagagcaagcggguggacuucugcggcaagggguaccaccugauguccuucccccagagcgccccgcacggcguggucuuccuccacgugacguacguccccgcccaggagaagaacuucaccaccgcccccgcgaucugccacgacgggaaggcccacuucccccgcgagggcguguucguguccaacgggacccacugguucgucacgcagcggaacuucuacgagccgcagaucaucaccaccgacaacaccuucgugagcggcaacugcgacguggucaucggcaucgugaacaacacgguguacgacccccugcagcccgagcuggacuccggcgggggcgggagcgacaucgaccccuacaaggaguucggcagcuccuaccagcugcucaacuuccugccccuggacuucuuccccgaccucaacgcccugguggacaccgccaccgcgcuguacgaggaggagcucacggggcgcgagcacugcagcccccaccacaccgccauccggcaggcccuggucugcugggacgagcugaccaagcucaucgccuggauguccagcaacaucaccuccgagcagguccgcacgaucaucgugaaccacgucaacgacaccuggggccugaaggugcggcagagccugugguuccaccucuccugccugaccuucgggcagcacaccgugcaggaguuccuggucagcuucggcguguggauccgcacgcccgccccguaccggccgcccaacgcgccgauccucuccacccugccggagcacaccgugaucugcuga

SEQ ID NO: 11955 - RNA, 3906 nt, Artificial Sequence
  SARS-CoV-2/Wuhan/WIV05/2019__EPI_ISL_402128 spike protein CDS gc (1-1147)(K986P_V987P_P1069F) WhcAg construct
auguucguguuccugguccuccugccccuggugagcucccagugcgugaaccucaccacccgcacgcagcugccgcccgccuacaccaacagcuucacccggggcgucuacuaccccgacaagguguuccgcuccagcgugcugcacuccacccaggaccucuuccugcccuucuucagcaacgucacgugguuccacgccauccacguguccgggaccaacggcaccaagcgguucgacaacccggugcugcccuucaacgacggggucuacuucgcgagcaccgagaaguccaacaucauccgcggcuggaucuucgggacgacccucgacagcaagacccagucccugcugaucgugaacaacgccaccaacguggucaucaaggugugcgaguuccaguucugcaacgaccccuuccucggcguguacuaccacaagaacaacaagagcuggauggaguccgaguuccgggucuacagcuccgccaacaacugcacguucgaguacgugagccagcccuuccugauggaccuggagggcaagcaggggaacuucaagaaccuccgcgaguucguguucaagaacaucgacggcuacuucaagaucuacuccaagcacaccccgaucaaccugguccgggaccugccccagggguucagcgcccucgagccccugguggaccugcccaucggcaucaacaucacccgcuuccagacccuccuggcccugcaccgguccuaccucacgccgggggacagcagcuccggcuggaccgcgggcgccgccgccuacuacgugggguaccugcagccccgcaccuuccugcucaaguacaacgagaacggcaccaucacggacgcggucgacugcgcccuggacccccugagcgagaccaagugcacccucaaguccuucaccguggagaaggggaucuaccagacgagcaacuuccgggugcagcccaccgaguccaucguccgcuucccgaacaucaccaaccugugccccuucggcgagguguucaacgccacccgguucgccagcgucuacgccuggaaccgcaagcggaucuccaacugcguggcggacuacagcgugcuguacaacuccgccagcuucuccacguucaagugcuacggcgucagccccaccaagcucaacgaccugugcuucaccaacguguacgccgacuccuucgugauccgcggggacgagguccggcagaucgcccccggccagaccgggaagaucgccgacuacaacuacaagcugccggacgacuucacgggcugcgugaucgcguggaacagcaacaaccucgacuccaaggucgggggcaacuacaacuaccuguaccgccuguuccgcaagagcaaccucaagcccuucgagcgggacaucuccaccgagaucuaccaggccggcagcacccccugcaacgggguggagggcuucaacugcuacuucccccugcaguccuacggguuccagccgaccaacggcgugggguaccagcccuaccggguggucgugcugagcuucgagcuccugcacgcccccgccacggugugcggccccaagaaguccaccaaccuggucaagaacaagugcgugaacuucaacuucaacggccucaccgggaccggcgugcugaccgagagcaacaagaaguuccugccguuccagcaguucgggcgcgacaucgccgacacgaccgacgcgguccgcgacccccagacccuggagauccucgacaucacccccugcagcuucggcgggguguccgugaucacgccgggcaccaacaccagcaaccaggucgccgugcuguaccaggacgugaacugcaccgagguccccguggccauccacgccgaccagcugacgcccaccuggcggguguacuccaccggcagcaacgucuuccagacccgcgccgggugccucaucggcgcggagcacgugaacaacuccuacgagugcgacauccccaucggggccggcaucugcgccagcuaccagacgcagaccaacuccccgcggcgcgcccggagcguggcgucccagagcaucaucgccuacaccaugucccugggcgccgagaacagcgucgccuacuccaacaacagcaucgccauccccaccaacuucacgaucuccgugaccaccgagauccugcccgugagcaugaccaagacgagcgucgacugcaccauguacaucugcggggacuccaccgagugcagcaaccuccugcugcaguacggcuccuucugcacccagcucaaccgcgcgcugacggggaucgccguggagcaggacaagaacacccaggagguguucgcccaggucaagcagaucuacaagacgcccccgaucaaggacuucggcggguucaacuucagccagauccugcccgaccccuccaagcccagcaagcgguccuucaucgaggaccuccuguucaacaaggugacccuggccgacgccggcuucaucaagcaguacggcgacugccucggggacaucgcggcccgcgaccugaucugcgcccagaaguucaacggccugaccgugcucccgccccugcugaccgacgagaugaucgcccaguacaccagcgcccuccuggcggggaccaucacguccggcuggaccuucggggccggcgccgcccugcagauccccuucgcgaugcagauggccuaccgguucaacggcaucggggucacccagaacgugcucuacgagaaccagaagcugaucgccaaccaguucaacagcgccaucggcaagauccaggacucccugagcuccaccgccagcgcgcucgggaagcugcaggacguggucaaccagaacgcccaggcccugaacacgcucgugaagcagcuguccagcaacuucggcgccaucuccagcgugcugaacgacauccucucccgccuggacccgcccgaggccgaggugcagaucgaccggcugaucaccgggcgccuccagagccugcagaccuacgugacccagcagcugauccgggcggccgagauccgcgccagcgccaaccucgccgcgaccaagauguccgagugcguccugggccagagcaagcggguggacuucugcggcaagggguaccaccugauguccuucccccagagcgccccgcacggcguggucuuccuccacgugacguacgucuucgcccaggagaagaacuucaccaccgcccccgcgaucugccacgacgggaaggcccacuucccccgcgagggcguguucguguccaacgggacccacugguucgucacgcagcggaacuucuacgagccgcagaucaucaccaccgacaacaccuucgugagcggcaacugcgacguggucaucggcaucgugaacaacacgguguacgacccccugcagcccgagcuggacuccggcgggggcgggagcgacaucgaccccuacaaggaguucggcagcuccuaccagcugcucaacuuccugccccuggacuucuuccccgaccucaacgcccugguggacaccgccaccgcgcuguacgaggaggagcucacggggcgcgagcacugcagcccccaccacaccgccauccggcaggcccuggucugcugggacgagcugaccaagcucaucgccuggauguccagcaacaucaccuccgagcagguccgcacgaucaucgugaaccacgucaacgacaccuggggccugaaggugcggcagagccugugguuccaccucuccugccugaccuucgggcagcacaccgugcaggaguuccuggucagcuucggcguguggauccgcacgcccgccccguaccggccgcccaacgcgccgauccucuccacccugccggagcacaccgugaucugcuga

SEQ ID NO: 11956 - RNA, 3906 nt, Artificial Sequence
  SARS-CoV-2/Wuhan/WIV05/2019__EPI_ISL_402128 spike protein CDS gc (1-1147)(K986P_V987P_ H1048Q_H1064N_ H1083N_H1101N) WhcAg construct
auguucguguuccugguccuccugccccuggugagcucccagugcgugaaccucaccacccgcacgcagcugccgcccgccuacaccaacagcuucacccggggcgucuacuaccccgacaagguguuccgcuccagcgugcugcacuccacccaggaccucuuccugcccuucuucagcaacgucacgugguuccacgccauccacguguccgggaccaacggcaccaagcgguucgacaacccggugcugcccuucaacgacggggucuacuucgcgagcaccgagaaguccaacaucauccgcggcuggaucuucgggacgacccucgacagcaagacccagucccugcugaucgugaacaacgccaccaacguggucaucaaggugugcgaguuccaguucugcaacgaccccuuccucggcguguacuaccacaagaacaacaagagcuggauggaguccgaguuccgggucuacagcuccgccaacaacugcacguucgaguacgugagccagcccuuccugauggaccuggagggcaagcaggggaacuucaagaaccuccgcgaguucguguucaagaacaucgacggcuacuucaagaucuacuccaagcacaccccgaucaaccugguccgggaccugccccagggguucagcgcccucgagccccugguggaccugcccaucggcaucaacaucacccgcuuccagacccuccuggcccugcaccgguccuaccucacgccgggggacagcagcuccggcuggaccgcgggcgccgccgccuacuacgugggguaccugcagccccgcaccuuccugcucaaguacaacgagaacggcaccaucacggacgcggucgacugcgcccuggacccccugagcgagaccaagugcacccucaaguccuucaccguggagaaggggaucuaccagacgagcaacuuccgggugcagcccaccgaguccaucguccgcuucccgaacaucaccaaccugugccccuucggcgagguguucaacgccacccgguucgccagcgucuacgccuggaaccgcaagcggaucuccaacugcguggcggacuacagcgugcuguacaacuccgccagcuucuccacguucaagugcuacggcgucagccccaccaagcucaacgaccugugcuucaccaacguguacgccgacuccuucgugauccgcggggacgagguccggcagaucgcccccggccagaccgggaagaucgccgacuacaacuacaagcugccggacgacuucacgggcugcgugaucgcguggaacagcaacaaccucgacuccaaggucgggggcaacuacaacuaccuguaccgccuguuccgcaagagcaaccucaagcccuucgagcgggacaucuccaccgagaucuaccaggccggcagcacccccugcaacgggguggagggcuucaacugcuacuucccccugcaguccuacggguuccagccgaccaacggcgugggguaccagcccuaccggguggucgugcugagcuucgagcuccugcacgcccccgccacggugugcggccccaagaaguccaccaaccuggucaagaacaagugcgugaacuucaacuucaacggccucaccgggaccggcgugcugaccgagagcaacaagaaguuccugccguuccagcaguucgggcgcgacaucgccgacacgaccgacgcgguccgcgacccccagacccuggagauccucgacaucacccccugcagcuucggcgggguguccgugaucacgccgggcaccaacaccagcaaccaggucgccgugcuguaccaggacgugaacugcaccgagguccccguggccauccacgccgaccagcugacgcccaccuggcggguguacuccaccggcagcaacgucuuccagacccgcgccgggugccucaucggcgcggagcacgugaacaacuccuacgagugcgacauccccaucggggccggcaucugcgccagcuaccagacgcagaccaacuccccgcggcgcgcccggagcguggcgucccagagcaucaucgccuacaccaugucccugggcgccgagaacagcgucgccuacuccaacaacagcaucgccauccccaccaacuucacgaucuccgugaccaccgagauccugcccgugagcaugaccaagacgagcgucgacugcaccauguacaucugcggggacuccaccgagugcagcaaccuccugcugcaguacggcuccuucugcacccagcucaaccgcgcgcugacggggaucgccguggagcaggacaagaacacccaggagguguucgcccaggucaagcagaucuacaagacgcccccgaucaaggacuucggcggguucaacuucagccagauccugcccgaccccuccaagcccagcaagcgguccuucaucgaggaccuccuguucaacaaggugacccuggccgacgccggcuucaucaagcaguacggcgacugccucggggacaucgcggcccgcgaccugaucugcgcccagaaguucaacggccugaccgugcucccgccccugcugaccgacgagaugaucgcccaguacaccagcgcccuccuggcggggaccaucacguccggcuggaccuucggggccggcgccgcccugcagauccccuucgcgaugcagauggccuaccgguucaacggcaucggggucacccagaacgugcucuacgagaaccagaagcugaucgccaaccaguucaacagcgccaucggcaagauccaggacucccugagcuccaccgccagcgcgcucgggaagcugcaggacguggucaaccagaacgcccaggcccugaacacgcucgugaagcagcuguccagcaacuucggcgccaucuccagcgugcugaacgacauccucucccgccuggacccgcccgaggccgaggugcagaucgaccggcugaucaccgggcgccuccagagccugcagaccuacgugacccagcagcugauccgggcggccgagauccgcgccagcgccaaccucgccgcgaccaagauguccgagugcguccugggccagagcaagcggguggacuucugcggcaagggguaccagcugauguccuucccccagagcgccccgcacggcguggucuuccucaacgugacguacguccccgcccaggagaagaacuucaccaccgcccccgcgaucugcaacgacgggaaggcccacuucccccgcgagggcguguucguguccaacgggaccaacugguucgucacgcagcggaacuucuacgagccgcagaucaucaccaccgacaacaccuucgugagcggcaacugcgacguggucaucggcaucgugaacaacacgguguacgacccccugcagcccgagcuggacuccggcgggggcgggagcgacaucgaccccuacaaggaguucggcagcuccuaccagcugcucaacuuccugccccuggacuucuuccccgaccucaacgcccugguggacaccgccaccgcgcuguacgaggaggagcucacggggcgcgagcacugcagcccccaccacaccgccauccggcaggcccuggucugcugggacgagcugaccaagcucaucgccuggauguccagcaacaucaccuccgagcagguccgcacgaucaucgugaaccacgucaacgacaccuggggccugaaggugcggcagagccugugguuccaccucuccugccugaccuucgggcagcacaccgugcaggaguuccuggucagcuucggcguguggauccgcacgcccgccccguaccggccgcccaacgcgccgauccucuccacccugccggagcacaccgugaucugcuga

SEQ ID NO: 11957 - RNA, 3906 nt, Artificial Sequence
  SARS-CoV-2/Wuhan/WIV05/2019__EPI_ISL_402128 spike protein CDS gc (1-1147)(I712C_T1077C) WhcAg construct
auguucguguuccugguccuccugccccuggugagcucccagugcgugaaccucaccacccgcacgcagcugccgcccgccuacaccaacagcuucacccggggcgucuacuaccccgacaagguguuccgcuccagcgugcugcacuccacccaggaccucuuccugcccuucuucagcaacgucacgugguuccacgccauccacguguccgggaccaacggcaccaagcgguucgacaacccggugcugcccuucaacgacggggucuacuucgcgagcaccgagaaguccaacaucauccgcggcuggaucuucgggacgacccucgacagcaagacccagucccugcugaucgugaacaacgccaccaacguggucaucaaggugugcgaguuccaguucugcaacgaccccuuccucggcguguacuaccacaagaacaacaagagcuggauggaguccgaguuccgggucuacagcuccgccaacaacugcacguucgaguacgugagccagcccuuccugauggaccuggagggcaagcaggggaacuucaagaaccuccgcgaguucguguucaagaacaucgacggcuacuucaagaucuacuccaagcacaccccgaucaaccugguccgggaccugccccagggguucagcgcccucgagccccugguggaccugcccaucggcaucaacaucacccgcuuccagacccuccuggcccugcaccgguccuaccucacgccgggggacagcagcuccggcuggaccgcgggcgccgccgccuacuacgugggguaccugcagccccgcaccuuccugcucaaguacaacgagaacggcaccaucacggacgcggucgacugcgcccuggacccccugagcgagaccaagugcacccucaaguccuucaccguggagaaggggaucuaccagacgagcaacuuccgggugcagcccaccgaguccaucguccgcuucccgaacaucaccaaccugugccccuucggcgagguguucaacgccacccgguucgccagcgucuacgccuggaaccgcaagcggaucuccaacugcguggcggacuacagcgugcuguacaacuccgccagcuucuccacguucaagugcuacggcgucagccccaccaagcucaacgaccugugcuucaccaacguguacgccgacuccuucgugauccgcggggacgagguccggcagaucgcccccggccagaccgggaagaucgccgacuacaacuacaagcugccggacgacuucacgggcugcgugaucgcguggaacagcaacaaccucgacuccaaggucgggggcaacuacaacuaccuguaccgccuguuccgcaagagcaaccucaagcccuucgagcgggacaucuccaccgagaucuaccaggccggcagcacccccugcaacgggguggagggcuucaacugcuacuucccccugcaguccuacggguuccagccgaccaacggcgugggguaccagcccuaccggguggucgugcugagcuucgagcuccugcacgcccccgccacggugugcggccccaagaaguccaccaaccuggucaagaacaagugcgugaacuucaacuucaacggccucaccgggaccggcgugcugaccgagagcaacaagaaguuccugccguuccagcaguucgggcgcgacaucgccgacacgaccgacgcgguccgcgacccccagacccuggagauccucgacaucacccccugcagcuucggcgggguguccgugaucacgccgggcaccaacaccagcaaccaggucgccgugcuguaccaggacgugaacugcaccgagguccccguggccauccacgccgaccagcugacgcccaccuggcggguguacuccaccggcagcaacgucuuccagacccgcgccgggugccucaucggcgcggagcacgugaacaacuccuacgagugcgacauccccaucggggccggcaucugcgccagcuaccagacgcagaccaacuccccgcggcgcgcccggagcguggcgucccagagcaucaucgccuacaccaugucccugggcgccgagaacagcgucgccuacuccaacaacagcugcgccauccccaccaacuucacgaucuccgugaccaccgagauccugcccgugagcaugaccaagacgagcgucgacugcaccauguacaucugcggggacuccaccgagugcagcaaccuccugcugcaguacggcuccuucugcacccagcucaaccgcgcgcugacggggaucgccguggagcaggacaagaacacccaggagguguucgcccaggucaagcagaucuacaagacgcccccgaucaaggacuucggcggguucaacuucagccagauccugcccgaccccuccaagcccagcaagcgguccuucaucgaggaccuccuguucaacaaggugacccuggccgacgccggcuucaucaagcaguacggcgacugccucggggacaucgcggcccgcgaccugaucugcgcccagaaguucaacggccugaccgugcucccgccccugcugaccgacgagaugaucgcccaguacaccagcgcccuccuggcggggaccaucacguccggcuggaccuucggggccggcgccgcccugcagauccccuucgcgaugcagauggccuaccgguucaacggcaucggggucacccagaacgugcucuacgagaaccagaagcugaucgccaaccaguucaacagcgccaucggcaagauccaggacucccugagcuccaccgccagcgcgcucgggaagcugcaggacguggucaaccagaacgcccaggcccugaacacgcucgugaagcagcuguccagcaacuucggcgccaucuccagcgugcugaacgacauccucucccgccuggacaaggucgaggccgaggugcagaucgaccggcugaucaccgggcgccuccagagccugcagaccuacgugacccagcagcugauccgggcggccgagauccgcgccagcgccaaccucgccgcgaccaagauguccgagugcguccugggccagagcaagcggguggacuucugcggcaagggguaccaccugauguccuucccccagagcgccccgcacggcguggucuuccuccacgugacguacguccccgcccaggagaagaacuucaccugcgcccccgcgaucugccacgacgggaaggcccacuucccccgcgagggcguguucguguccaacgggacccacugguucgucacgcagcggaacuucuacgagccgcagaucaucaccaccgacaacaccuucgugagcggcaacugcgacguggucaucggcaucgugaacaacacgguguacgacccccugcagcccgagcuggacuccggcgggggcgggagcgacaucgaccccuacaaggaguucggcagcuccuaccagcugcucaacuuccugccccuggacuucuuccccgaccucaacgcccugguggacaccgccaccgcgcuguacgaggaggagcucacggggcgcgagcacugcagcccccaccacaccgccauccggcaggcccuggucugcugggacgagcugaccaagcucaucgccuggauguccagcaacaucaccuccgagcagguccgcacgaucaucgugaaccacgucaacgacaccuggggccugaaggugcggcagagccugugguuccaccucuccugccugaccuucgggcagcacaccgugcaggaguuccuggucagcuucggcguguggauccgcacgcccgccccguaccggccgcccaacgcgccgauccucuccacccugccggagcacaccgugaucugcuga

SEQ ID NO: 11958 - RNA, 3906 nt, Artificial Sequence
  SARS-CoV-2/Wuhan/WIV05/2019__EPI_ISL_402128 spike protein CDS gc (1-1147)(I714C_Y1110C) WhcAg construct
auguucguguuccugguccuccugccccuggugagcucccagugcgugaaccucaccacccgcacgcagcugccgcccgccuacaccaacagcuucacccggggcgucuacuaccccgacaagguguuccgcuccagcgugcugcacuccacccaggaccucuuccugcccuucuucagcaacgucacgugguuccacgccauccacguguccgggaccaacggcaccaagcgguucgacaacccggugcugcccuucaacgacggggucuacuucgcgagcaccgagaaguccaacaucauccgcggcuggaucuucgggacgacccucgacagcaagacccagucccugcugaucgugaacaacgccaccaacguggucaucaaggugugcgaguuccaguucugcaacgaccccuuccucggcguguacuaccacaagaacaacaagagcuggauggaguccgaguuccgggucuacagcuccgccaacaacugcacguucgaguacgugagccagcccuuccugauggaccuggagggcaagcaggggaacuucaagaaccuccgcgaguucguguucaagaacaucgacggcuacuucaagaucuacuccaagcacaccccgaucaaccugguccgggaccugccccagggguucagcgcccucgagccccugguggaccugcccaucggcaucaacaucacccgcuuccagacccuccuggcccugcaccgguccuaccucacgccgggggacagcagcuccggcuggaccgcgggcgccgccgccuacuacgugggguaccugcagccccgcaccuuccugcucaaguacaacgagaacggcaccaucacggacgcggucgacugcgcccuggacccccugagcgagaccaagugcacccucaaguccuucaccguggagaaggggaucuaccagacgagcaacuuccgggugcagcccaccgaguccaucguccgcuucccgaacaucaccaaccugugccccuucggcgagguguucaacgccacccgguucgccagcgucuacgccuggaaccgcaagcggaucuccaacugcguggcggacuacagcgugcuguacaacuccgccagcuucuccacguucaagugcuacggcgucagccccaccaagcucaacgaccugugcuucaccaacguguacgccgacuccuucgugauccgcggggacgagguccggcagaucgcccccggccagaccgggaagaucgccgacuacaacuacaagcugccggacgacuucacgggcugcgugaucgcguggaacagcaacaaccucgacuccaaggucgggggcaacuacaacuaccuguaccgccuguuccgcaagagcaaccucaagcccuucgagcgggacaucuccaccgagaucuaccaggccggcagcacccccugcaacgggguggagggcuucaacugcuacuucccccugcaguccuacggguuccagccgaccaacggcgugggguaccagcccuaccggguggucgugcugagcuucgagcuccugcacgcccccgccacggugugcggccccaagaaguccaccaaccuggucaagaacaagugcgugaacuucaacuucaacggccucaccgggaccggcgugcugaccgagagcaacaagaaguuccugccguuccagcaguucgggcgcgacaucgccgacacgaccgacgcgguccgcgacccccagacccuggagauccucgacaucacccccugcagcuucggcgggguguccgugaucacgccgggcaccaacaccagcaaccaggucgccgugcuguaccaggacgugaacugcaccgagguccccguggccauccacgccgaccagcugacgcccaccuggcggguguacuccaccggcagcaacgucuuccagacccgcgccgggugccucaucggcgcggagcacgugaacaacuccuacgagugcgacauccccaucggggccggcaucugcgccagcuaccagacgcagaccaacuccccgcggcgcgcccggagcguggcgucccagagcaucaucgccuacaccaugucccugggcgccgagaacagcgucgccuacuccaacaacagcaucgccugccccaccaacuucacgaucuccgugaccaccgagauccugcccgugagcaugaccaagacgagcgucgacugcaccauguacaucugcggggacuccaccgagugcagcaaccuccugcugcaguacggcuccuucugcacccagcucaaccgcgcgcugacggggaucgccguggagcaggacaagaacacccaggagguguucgcccaggucaagcagaucuacaagacgcccccgaucaaggacuucggcggguucaacuucagccagauccugcccgaccccuccaagcccagcaagcgguccuucaucgaggaccuccuguucaacaaggugacccuggccgacgccggcuucaucaagcaguacggcgacugccucggggacaucgcggcccgcgaccugaucugcgcccagaaguucaacggccugaccgugcucccgccccugcugaccgacgagaugaucgcccaguacaccagcgcccuccuggcggggaccaucacguccggcuggaccuucggggccggcgccgcccugcagauccccuucgcgaugcagauggccuaccgguucaacggcaucggggucacccagaacgugcucuacgagaaccagaagcugaucgccaaccaguucaacagcgccaucggcaagauccaggacucccugagcuccaccgccagcgcgcucgggaagcugcaggacguggucaaccagaacgcccaggcccugaacacgcucgugaagcagcuguccagcaacuucggcgccaucuccagcgugcugaacgacauccucucccgccuggacaaggucgaggccgaggugcagaucgaccggcugaucaccgggcgccuccagagccugcagaccuacgugacccagcagcugauccgggcggccgagauccgcgccagcgccaaccucgccgcgaccaagauguccgagugcguccugggccagagcaagcggguggacuucugcggcaagggguaccaccugauguccuucccccagagcgccccgcacggcguggucuuccuccacgugacguacguccccgcccaggagaagaacuucaccaccgcccccgcgaucugccacgacgggaaggcccacuucccccgcgagggcguguucguguccaacgggacccacugguucgucacgcagcggaacuucugcgagccgcagaucaucaccaccgacaacaccuucgugagcggcaacugcgacguggucaucggcaucgugaacaacacgguguacgacccccugcagcccgagcuggacuccggcgggggcgggagcgacaucgaccccuacaaggaguucggcagcuccuaccagcugcucaacuuccugccccuggacuucuuccccgaccucaacgcccugguggacaccgccaccgcgcuguacgaggaggagcucacggggcgcgagcacugcagcccccaccacaccgccauccggcaggcccuggucugcugggacgagcugaccaagcucaucgccuggauguccagcaacaucaccuccgagcagguccgcacgaucaucgugaaccacgucaacgacaccuggggccugaaggugcggcagagccugugguuccaccucuccugccugaccuucgggcagcacaccgugcaggaguuccuggucagcuucggcguguggauccgcacgcccgccccguaccggccgcccaacgcgccgauccucuccacccugccggagcacaccgugaucugcuga

SEQ ID NO: 11959 - RNA, 3906 nt, Artificial Sequence
  SARS-CoV-2/Wuhan/WIV05/2019__EPI_ISL_402128 spike protein CDS gc (1-1147)(P715C_P1069C) WhcAg construct
auguucguguuccugguccuccugccccuggugagcucccagugcgugaaccucaccacccgcacgcagcugccgcccgccuacaccaacagcuucacccggggcgucuacuaccccgacaagguguuccgcuccagcgugcugcacuccacccaggaccucuuccugcccuucuucagcaacgucacgugguuccacgccauccacguguccgggaccaacggcaccaagcgguucgacaacccggugcugcccuucaacgacggggucuacuucgcgagcaccgagaaguccaacaucauccgcggcuggaucuucgggacgacccucgacagcaagacccagucccugcugaucgugaacaacgccaccaacguggucaucaaggugugcgaguuccaguucugcaacgaccccuuccucggcguguacuaccacaagaacaacaagagcuggauggaguccgaguuccgggucuacagcuccgccaacaacugcacguucgaguacgugagccagcccuuccugauggaccuggagggcaagcaggggaacuucaagaaccuccgcgaguucguguucaagaacaucgacggcuacuucaagaucuacuccaagcacaccccgaucaaccugguccgggaccugccccagggguucagcgcccucgagccccugguggaccugcccaucggcaucaacaucacccgcuuccagacccuccuggcccugcaccgguccuaccucacgccgggggacagcagcuccggcuggaccgcgggcgccgccgccuacuacgugggguaccugcagccccgcaccuuccugcucaaguacaacgagaacggcaccaucacggacgcggucgacugcgcccuggacccccugagcgagaccaagugcacccucaaguccuucaccguggagaaggggaucuaccagacgagcaacuuccgggugcagcccaccgaguccaucguccgcuucccgaacaucaccaaccugugccccuucggcgagguguucaacgccacccgguucgccagcgucuacgccuggaaccgcaagcggaucuccaacugcguggcggacuacagcgugcuguacaacuccgccagcuucuccacguucaagugcuacggcgucagccccaccaagcucaacgaccugugcuucaccaacguguacgccgacuccuucgugauccgcggggacgagguccggcagaucgcccccggccagaccgggaagaucgccgacuacaacuacaagcugccggacgacuucacgggcugcgugaucgcguggaacagcaacaaccucgacuccaaggucgggggcaacuacaacuaccuguaccgccuguuccgcaagagcaaccucaagcccuucgagcgggacaucuccaccgagaucuaccaggccggcagcacccccugcaacgggguggagggcuucaacugcuacuucccccugcaguccuacggguuccagccgaccaacggcgugggguaccagcccuaccggguggucgugcugagcuucgagcuccugcacgcccccgccacggugugcggccccaagaaguccaccaaccuggucaagaacaagugcgugaacuucaacuucaacggccucaccgggaccggcgugcugaccgagagcaacaagaaguuccugccguuccagcaguucgggcgcgacaucgccgacacgaccgacgcgguccgcgacccccagacccuggagauccucgacaucacccccugcagcuucggcgggguguccgugaucacgccgggcaccaacaccagcaaccaggucgccgugcuguaccaggacgugaacugcaccgagguccccguggccauccacgccgaccagcugacgcccaccuggcggguguacuccaccggcagcaacgucuuccagacccgcgccgggugccucaucggcgcggagcacgugaacaacuccuacgagugcgacauccccaucggggccggcaucugcgccagcuaccagacgcagaccaacuccccgcggcgcgcccggagcguggcgucccagagcaucaucgccuacaccaugucccugggcgccgagaacagcgucgccuacuccaacaacagcaucgccaucugcaccaacuucacgaucuccgugaccaccgagauccugcccgugagcaugaccaagacgagcgucgacugcaccauguacaucugcggggacuccaccgagugcagcaaccuccugcugcaguacggcuccuucugcacccagcucaaccgcgcgcugacggggaucgccguggagcaggacaagaacacccaggagguguucgcccaggucaagcagaucuacaagacgcccccgaucaaggacuucggcggguucaacuucagccagauccugcccgaccccuccaagcccagcaagcgguccuucaucgaggaccuccuguucaacaaggugacccuggccgacgccggcuucaucaagcaguacggcgacugccucggggacaucgcggcccgcgaccugaucugcgcccagaaguucaacggccugaccgugcucccgccccugcugaccgacgagaugaucgcccaguacaccagcgcccuccuggcggggaccaucacguccggcuggaccuucggggccggcgccgcccugcagauccccuucgcgaugcagauggccuaccgguucaacggcaucggggucacccagaacgugcucuacgagaaccagaagcugaucgccaaccaguucaacagcgccaucggcaagauccaggacucccugagcuccaccgccagcgcgcucgggaagcugcaggacguggucaaccagaacgcccaggcccugaacacgcucgugaagcagcuguccagcaacuucggcgccaucuccagcgugcugaacgacauccucucccgccuggacaaggucgaggccgaggugcagaucgaccggcugaucaccgggcgccuccagagccugcagaccuacgugacccagcagcugauccgggcggccgagauccgcgccagcgccaaccucgccgcgaccaagauguccgagugcguccugggccagagcaagcggguggacuucugcggcaagggguaccaccugauguccuucccccagagcgccccgcacggcguggucuuccuccacgugacguacgucugcgcccaggagaagaacuucaccaccgcccccgcgaucugccacgacgggaaggcccacuucccccgcgagggcguguucguguccaacgggacccacugguucgucacgcagcggaacuucuacgagccgcagaucaucaccaccgacaacaccuucgugagcggcaacugcgacguggucaucggcaucgugaacaacacgguguacgacccccugcagcccgagcuggacuccggcgggggcgggagcgacaucgaccccuacaaggaguucggcagcuccuaccagcugcucaacuuccugccccuggacuucuuccccgaccucaacgcccugguggacaccgccaccgcgcuguacgaggaggagcucacggggcgcgagcacugcagcccccaccacaccgccauccggcaggcccuggucugcugggacgagcugaccaagcucaucgccuggauguccagcaacaucaccuccgagcagguccgcacgaucaucgugaaccacgucaacgacaccuggggccugaaggugcggcagagccugugguuccaccucuccugccugaccuucgggcagcacaccgugcaggaguuccuggucagcuucggcguguggauccgcacgcccgccccguaccggccgcccaacgcgccgauccucuccacccugccggagcacaccgugaucugcuga

SEQ ID NO: 11960 - RNA, 3906 nt, Artificial Sequence
  SARS-CoV-2/Wuhan/WIV05/2019__EPI_ISL_402128 spike protein CDS gc (1-1147)(G889C_L1034C) WhcAg construct
auguucguguuccugguccuccugccccuggugagcucccagugcgugaaccucaccacccgcacgcagcugccgcccgccuacaccaacagcuucacccggggcgucuacuaccccgacaagguguuccgcuccagcgugcugcacuccacccaggaccucuuccugcccuucuucagcaacgucacgugguuccacgccauccacguguccgggaccaacggcaccaagcgguucgacaacccggugcugcccuucaacgacggggucuacuucgcgagcaccgagaaguccaacaucauccgcggcuggaucuucgggacgacccucgacagcaagacccagucccugcugaucgugaacaacgccaccaacguggucaucaaggugugcgaguuccaguucugcaacgaccccuuccucggcguguacuaccacaagaacaacaagagcuggauggaguccgaguuccgggucuacagcuccgccaacaacugcacguucgaguacgugagccagcccuuccugauggaccuggagggcaagcaggggaacuucaagaaccuccgcgaguucguguucaagaacaucgacggcuacuucaagaucuacuccaagcacaccccgaucaaccugguccgggaccugccccagggguucagcgcccucgagccccugguggaccugcccaucggcaucaacaucacccgcuuccagacccuccuggcccugcaccgguccuaccucacgccgggggacagcagcuccggcuggaccgcgggcgccgccgccuacuacgugggguaccugcagccccgcaccuuccugcucaaguacaacgagaacggcaccaucacggacgcggucgacugcgcccuggacccccugagcgagaccaagugcacccucaaguccuucaccguggagaaggggaucuaccagacgagcaacuuccgggugcagcccaccgaguccaucguccgcuucccgaacaucaccaaccugugccccuucggcgagguguucaacgccacccgguucgccagcgucuacgccuggaaccgcaagcggaucuccaacugcguggcggacuacagcgugcuguacaacuccgccagcuucuccacguucaagugcuacggcgucagccccaccaagcucaacgaccugugcuucaccaacguguacgccgacuccuucgugauccgcggggacgagguccggcagaucgcccccggccagaccgggaagaucgccgacuacaacuacaagcugccggacgacuucacgggcugcgugaucgcguggaacagcaacaaccucgacuccaaggucgggggcaacuacaacuaccuguaccgccuguuccgcaagagcaaccucaagcccuucgagcgggacaucuccaccgagaucuaccaggccggcagcacccccugcaacgggguggagggcuucaacugcuacuucccccugcaguccuacggguuccagccgaccaacggcgugggguaccagcccuaccggguggucgugcugagcuucgagcuccugcacgcccccgccacggugugcggccccaagaaguccaccaaccuggucaagaacaagugcgugaacuucaacuucaacggccucaccgggaccggcgugcugaccgagagcaacaagaaguuccugccguuccagcaguucgggcgcgacaucgccgacacgaccgacgcgguccgcgacccccagacccuggagauccucgacaucacccccugcagcuucggcgggguguccgugaucacgccgggcaccaacaccagcaaccaggucgccgugcuguaccaggacgugaacugcaccgagguccccguggccauccacgccgaccagcugacgcccaccuggcggguguacuccaccggcagcaacgucuuccagacccgcgccgggugccucaucggcgcggagcacgugaacaacuccuacgagugcgacauccccaucggggccggcaucugcgccagcuaccagacgcagaccaacuccccgcggcgcgcccggagcguggcgucccagagcaucaucgccuacaccaugucccugggcgccgagaacagcgucgccuacuccaacaacagcaucgccauccccaccaacuucacgaucuccgugaccaccgagauccugcccgugagcaugaccaagacgagcgucgacugcaccauguacaucugcggggacuccaccgagugcagcaaccuccugcugcaguacggcuccuucugcacccagcucaaccgcgcgcugacggggaucgccguggagcaggacaagaacacccaggagguguucgcccaggucaagcagaucuacaagacgcccccgaucaaggacuucggcggguucaacuucagccagauccugcccgaccccuccaagcccagcaagcgguccuucaucgaggaccuccuguucaacaaggugacccuggccgacgccggcuucaucaagcaguacggcgacugccucggggacaucgcggcccgcgaccugaucugcgcccagaaguucaacggccugaccgugcucccgccccugcugaccgacgagaugaucgcccaguacaccagcgcccuccuggcggggaccaucacguccggcuggaccuucugcgccggcgccgcccugcagauccccuucgcgaugcagauggccuaccgguucaacggcaucggggucacccagaacgugcucuacgagaaccagaagcugaucgccaaccaguucaacagcgccaucggcaagauccaggacucccugagcuccaccgccagcgcgcucgggaagcugcaggacguggucaaccagaacgcccaggcccugaacacgcucgugaagcagcuguccagcaacuucggcgccaucuccagcgugcugaacgacauccucucccgccuggacaaggucgaggccgaggugcagaucgaccggcugaucaccgggcgccuccagagccugcagaccuacgugacccagcagcugauccgggcggccgagauccgcgccagcgccaaccucgccgcgaccaagauguccgagugcgucugcggccagagcaagcggguggacuucugcggcaagggguaccaccugauguccuucccccagagcgccccgcacggcguggucuuccuccacgugacguacguccccgcccaggagaagaacuucaccaccgcccccgcgaucugccacgacgggaaggcccacuucccccgcgagggcguguucguguccaacgggacccacugguucgucacgcagcggaacuucuacgagccgcagaucaucaccaccgacaacaccuucgugagcggcaacugcgacguggucaucggcaucgugaacaacacgguguacgacccccugcagcccgagcuggacuccggcgggggcgggagcgacaucgaccccuacaaggaguucggcagcuccuaccagcugcucaacuuccugccccuggacuucuuccccgaccucaacgcccugguggacaccgccaccgcgcuguacgaggaggagcucacggggcgcgagcacugcagcccccaccacaccgccauccggcaggcccuggucugcugggacgagcugaccaagcucaucgccuggauguccagcaacaucaccuccgagcagguccgcacgaucaucgugaaccacgucaacgacaccuggggccugaaggugcggcagagccugugguuccaccucuccugccugaccuucgggcagcacaccgugcaggaguuccuggucagcuucggcguguggauccgcacgcccgccccguaccggccgcccaacgcgccgauccucuccacccugccggagcacaccgugaucugcuga

SEQ ID NO: 11961 - RNA, 3906 nt, Artificial Sequence
  SARS-CoV-2/Wuhan/WIV05/2019__EPI_ISL_402128 spike protein CDS gc (1-1147)(I909C_Y1047C) WhcAg construct
auguucguguuccugguccuccugccccuggugagcucccagugcgugaaccucaccacccgcacgcagcugccgcccgccuacaccaacagcuucacccggggcgucuacuaccccgacaagguguuccgcuccagcgugcugcacuccacccaggaccucuuccugcccuucuucagcaacgucacgugguuccacgccauccacguguccgggaccaacggcaccaagcgguucgacaacccggugcugcccuucaacgacggggucuacuucgcgagcaccgagaaguccaacaucauccgcggcuggaucuucgggacgacccucgacagcaagacccagucccugcugaucgugaacaacgccaccaacguggucaucaaggugugcgaguuccaguucugcaacgaccccuuccucggcguguacuaccacaagaacaacaagagcuggauggaguccgaguuccgggucuacagcuccgccaacaacugcacguucgaguacgugagccagcccuuccugauggaccuggagggcaagcaggggaacuucaagaaccuccgcgaguucguguucaagaacaucgacggcuacuucaagaucuacuccaagcacaccccgaucaaccugguccgggaccugccccagggguucagcgcccucgagccccugguggaccugcccaucggcaucaacaucacccgcuuccagacccuccuggcccugcaccgguccuaccucacgccgggggacagcagcuccggcuggaccgcgggcgccgccgccuacuacgugggguaccugcagccccgcaccuuccugcucaaguacaacgagaacggcaccaucacggacgcggucgacugcgcccuggacccccugagcgagaccaagugcacccucaaguccuucaccguggagaaggggaucuaccagacgagcaacuuccgggugcagcccaccgaguccaucguccgcuucccgaacaucaccaaccugugccccuucggcgagguguucaacgccacccgguucgccagcgucuacgccuggaaccgcaagcggaucuccaacugcguggcggacuacagcgugcuguacaacuccgccagcuucuccacguucaagugcuacggcgucagccccaccaagcucaacgaccugugcuucaccaacguguacgccgacuccuucgugauccgcggggacgagguccggcagaucgcccccggccagaccgggaagaucgccgacuacaacuacaagcugccggacgacuucacgggcugcgugaucgcguggaacagcaacaaccucgacuccaaggucgggggcaacuacaacuaccuguaccgccuguuccgcaagagcaaccucaagcccuucgagcgggacaucuccaccgagaucuaccaggccggcagcacccccugcaacgggguggagggcuucaacugcuacuucccccugcaguccuacggguuccagccgaccaacggcgugggguaccagcccuaccggguggucgugcugagcuucgagcuccugcacgcccccgccacggugugcggccccaagaaguccaccaaccuggucaagaacaagugcgugaacuucaacuucaacggccucaccgggaccggcgugcugaccgagagcaacaagaaguuccugccguuccagcaguucgggcgcgacaucgccgacacgaccgacgcgguccgcgacccccagacccuggagauccucgacaucacccccugcagcuucggcgggguguccgugaucacgccgggcaccaacaccagcaaccaggucgccgugcuguaccaggacgugaacugcaccgagguccccguggccauccacgccgaccagcugacgcccaccuggcggguguacuccaccggcagcaacgucuuccagacccgcgccgggugccucaucggcgcggagcacgugaacaacuccuacgagugcgacauccccaucggggccggcaucugcgccagcuaccagacgcagaccaacuccccgcggcgcgcccggagcguggcgucccagagcaucaucgccuacaccaugucccugggcgccgagaacagcgucgccuacuccaacaacagcaucgccauccccaccaacuucacgaucuccgugaccaccgagauccugcccgugagcaugaccaagacgagcgucgacugcaccauguacaucugcggggacuccaccgagugcagcaaccuccugcugcaguacggcuccuucugcacccagcucaaccgcgcgcugacggggaucgccguggagcaggacaagaacacccaggagguguucgcccaggucaagcagaucuacaagacgcccccgaucaaggacuucggcggguucaacuucagccagauccugcccgaccccuccaagcccagcaagcgguccuucaucgaggaccuccuguucaacaaggugacccuggccgacgccggcuucaucaagcaguacggcgacugccucggggacaucgcggcccgcgaccugaucugcgcccagaaguucaacggccugaccgugcucccgccccugcugaccgacgagaugaucgcccaguacaccagcgcccuccuggcggggaccaucacguccggcuggaccuucggggccggcgccgcccugcagauccccuucgcgaugcagauggccuaccgguucaacggcugcggggucacccagaacgugcucuacgagaaccagaagcugaucgccaaccaguucaacagcgccaucggcaagauccaggacucccugagcuccaccgccagcgcgcucgggaagcugcaggacguggucaaccagaacgcccaggcccugaacacgcucgugaagcagcuguccagcaacuucggcgccaucuccagcgugcugaacgacauccucucccgccuggacaaggucgaggccgaggugcagaucgaccggcugaucaccgggcgccuccagagccugcagaccuacgugacccagcagcugauccgggcggccgagauccgcgccagcgccaaccucgccgcgaccaagauguccgagugcguccugggccagagcaagcggguggacuucugcggcaaggggugccaccugauguccuucccccagagcgccccgcacggcguggucuuccuccacgugacguacguccccgcccaggagaagaacuucaccaccgcccccgcgaucugccacgacgggaaggcccacuucccccgcgagggcguguucguguccaacgggacccacugguucgucacgcagcggaacuucuacgagccgcagaucaucaccaccgacaacaccuucgugagcggcaacugcgacguggucaucggcaucgugaacaacacgguguacgacccccugcagcccgagcuggacuccggcgggggcgggagcgacaucgaccccuacaaggaguucggcagcuccuaccagcugcucaacuuccugccccuggacuucuuccccgaccucaacgcccugguggacaccgccaccgcgcuguacgaggaggagcucacggggcgcgagcacugcagcccccaccacaccgccauccggcaggcccuggucugcugggacgagcugaccaagcucaucgccuggauguccagcaacaucaccuccgagcagguccgcacgaucaucgugaaccacgucaacgacaccuggggccugaaggugcggcagagccugugguuccaccucuccugccugaccuucgggcagcacaccgugcaggaguuccuggucagcuucggcguguggauccgcacgcccgccccguaccggccgcccaacgcgccgauccucuccacccugccggagcacaccgugaucugcuga

SEQ ID NO: 11962 - RNA, 3906 nt, Artificial Sequence
  SARS-CoV-2/Wuhan/WIV05/2019__EPI_ISL_402128 spike protein CDS gc (1-1147)(Q965C_S1003C) WhcAg construct
auguucguguuccugguccuccugccccuggugagcucccagugcgugaaccucaccacccgcacgcagcugccgcccgccuacaccaacagcuucacccggggcgucuacuaccccgacaagguguuccgcuccagcgugcugcacuccacccaggaccucuuccugcccuucuucagcaacgucacgugguuccacgccauccacguguccgggaccaacggcaccaagcgguucgacaacccggugcugcccuucaacgacggggucuacuucgcgagcaccgagaaguccaacaucauccgcggcuggaucuucgggacgacccucgacagcaagacccagucccugcugaucgugaacaacgccaccaacguggucaucaaggugugcgaguuccaguucugcaacgaccccuuccucggcguguacuaccacaagaacaacaagagcuggauggaguccgaguuccgggucuacagcuccgccaacaacugcacguucgaguacgugagccagcccuuccugauggaccuggagggcaagcaggggaacuucaagaaccuccgcgaguucguguucaagaacaucgacggcuacuucaagaucuacuccaagcacaccccgaucaaccugguccgggaccugccccagggguucagcgcccucgagccccugguggaccugcccaucggcaucaacaucacccgcuuccagacccuccuggcccugcaccgguccuaccucacgccgggggacagcagcuccggcuggaccgcgggcgccgccgccuacuacgugggguaccugcagccccgcaccuuccugcucaaguacaacgagaacggcaccaucacggacgcggucgacugcgcccuggacccccugagcgagaccaagugcacccucaaguccuucaccguggagaaggggaucuaccagacgagcaacuuccgggugcagcccaccgaguccaucguccgcuucccgaacaucaccaaccugugccccuucggcgagguguucaacgccacccgguucgccagcgucuacgccuggaaccgcaagcggaucuccaacugcguggcggacuacagcgugcuguacaacuccgccagcuucuccacguucaagugcuacggcgucagccccaccaagcucaacgaccugugcuucaccaacguguacgccgacuccuucgugauccgcggggacgagguccggcagaucgcccccggccagaccgggaagaucgccgacuacaacuacaagcugccggacgacuucacgggcugcgugaucgcguggaacagcaacaaccucgacuccaaggucgggggcaacuacaacuaccuguaccgccuguuccgcaagagcaaccucaagcccuucgagcgggacaucuccaccgagaucuaccaggccggcagcacccccugcaacgggguggagggcuucaacugcuacuucccccugcaguccuacggguuccagccgaccaacggcgugggguaccagcccuaccggguggucgugcugagcuucgagcuccugcacgcccccgccacggugugcggccccaagaaguccaccaaccuggucaagaacaagugcgugaacuucaacuucaacggccucaccgggaccggcgugcugaccgagagcaacaagaaguuccugccguuccagcaguucgggcgcgacaucgccgacacgaccgacgcgguccgcgacccccagacccuggagauccucgacaucacccccugcagcuucggcgggguguccgugaucacgccgggcaccaacaccagcaaccaggucgccgugcuguaccaggacgugaacugcaccgagguccccguggccauccacgccgaccagcugacgcccaccuggcggguguacuccaccggcagcaacgucuuccagacccgcgccgggugccucaucggcgcggagcacgugaacaacuccuacgagugcgacauccccaucggggccggcaucugcgccagcuaccagacgcagaccaacuccccgcggcgcgcccggagcguggcgucccagagcaucaucgccuacaccaugucccugggcgccgagaacagcgucgccuacuccaacaacagcaucgccauccccaccaacuucacgaucuccgugaccaccgagauccugcccgugagcaugaccaagacgagcgucgacugcaccauguacaucugcggggacuccaccgagugcagcaaccuccugcugcaguacggcuccuucugcacccagcucaaccgcgcgcugacggggaucgccguggagcaggacaagaacacccaggagguguucgcccaggucaagcagaucuacaagacgcccccgaucaaggacuucggcggguucaacuucagccagauccugcccgaccccuccaagcccagcaagcgguccuucaucgaggaccuccuguucaacaaggugacccuggccgacgccggcuucaucaagcaguacggcgacugccucggggacaucgcggcccgcgaccugaucugcgcccagaaguucaacggccugaccgugcucccgccccugcugaccgacgagaugaucgcccaguacaccagcgcccuccuggcggggaccaucacguccggcuggaccuucggggccggcgccgcccugcagauccccuucgcgaugcagauggccuaccgguucaacggcaucggggucacccagaacgugcucuacgagaaccagaagcugaucgccaaccaguucaacagcgccaucggcaagauccaggacucccugagcuccaccgccagcgcgcucgggaagcugcaggacguggucaaccagaacgcccaggcccugaacacgcucgugaagugccuguccagcaacuucggcgccaucuccagcgugcugaacgacauccucucccgccuggacaaggucgaggccgaggugcagaucgaccggcugaucaccgggcgccuccagugccugcagaccuacgugacccagcagcugauccgggcggccgagauccgcgccagcgccaaccucgccgcgaccaagauguccgagugcguccugggccagagcaagcggguggacuucugcggcaagggguaccaccugauguccuucccccagagcgccccgcacggcguggucuuccuccacgugacguacguccccgcccaggagaagaacuucaccaccgcccccgcgaucugccacgacgggaaggcccacuucccccgcgagggcguguucguguccaacgggacccacugguucgucacgcagcggaacuucuacgagccgcagaucaucaccaccgacaacaccuucgugagcggcaacugcgacguggucaucggcaucgugaacaacacgguguacgacccccugcagcccgagcuggacuccggcgggggcgggagcgacaucgaccccuacaaggaguucggcagcuccuaccagcugcucaacuuccugccccuggacuucuuccccgaccucaacgcccugguggacaccgccaccgcgcuguacgaggaggagcucacggggcgcgagcacugcagcccccaccacaccgccauccggcaggcccuggucugcugggacgagcugaccaagcucaucgccuggauguccagcaacaucaccuccgagcagguccgcacgaucaucgugaaccacgucaacgacaccuggggccugaaggugcggcagagccugugguuccaccucuccugccugaccuucgggcagcacaccgugcaggaguuccuggucagcuucggcguguggauccgcacgcccgccccguaccggccgcccaacgcgccgauccucuccacccugccggagcacaccgugaucugcuga

SEQ ID NO: 11963 - RNA, 3906 nt, Artificial Sequence
  SARS-CoV-2/Wuhan/WIV05/2019__EPI_ISL_402128 spike protein CDS gc (1-1147)(F970C_G999C) WhcAg construct
auguucguguuccugguccuccugccccuggugagcucccagugcgugaaccucaccacccgcacgcagcugccgcccgccuacaccaacagcuucacccggggcgucuacuaccccgacaagguguuccgcuccagcgugcugcacuccacccaggaccucuuccugcccuucuucagcaacgucacgugguuccacgccauccacguguccgggaccaacggcaccaagcgguucgacaacccggugcugcccuucaacgacggggucuacuucgcgagcaccgagaaguccaacaucauccgcggcuggaucuucgggacgacccucgacagcaagacccagucccugcugaucgugaacaacgccaccaacguggucaucaaggugugcgaguuccaguucugcaacgaccccuuccucggcguguacuaccacaagaacaacaagagcuggauggaguccgaguuccgggucuacagcuccgccaacaacugcacguucgaguacgugagccagcccuuccugauggaccuggagggcaagcaggggaacuucaagaaccuccgcgaguucguguucaagaacaucgacggcuacuucaagaucuacuccaagcacaccccgaucaaccugguccgggaccugccccagggguucagcgcccucgagccccugguggaccugcccaucggcaucaacaucacccgcuuccagacccuccuggcccugcaccgguccuaccucacgccgggggacagcagcuccggcuggaccgcgggcgccgccgccuacuacgugggguaccugcagccccgcaccuuccugcucaaguacaacgagaacggcaccaucacggacgcggucgacugcgcccuggacccccugagcgagaccaagugcacccucaaguccuucaccguggagaaggggaucuaccagacgagcaacuuccgggugcagcccaccgaguccaucguccgcuucccgaacaucaccaaccugugccccuucggcgagguguucaacgccacccgguucgccagcgucuacgccuggaaccgcaagcggaucuccaacugcguggcggacuacagcgugcuguacaacuccgccagcuucuccacguucaagugcuacggcgucagccccaccaagcucaacgaccugugcuucaccaacguguacgccgacuccuucgugauccgcggggacgagguccggcagaucgcccccggccagaccgggaagaucgccgacuacaacuacaagcugccggacgacuucacgggcugcgugaucgcguggaacagcaacaaccucgacuccaaggucgggggcaacuacaacuaccuguaccgccuguuccgcaagagcaaccucaagcccuucgagcgggacaucuccaccgagaucuaccaggccggcagcacccccugcaacgggguggagggcuucaacugcuacuucccccugcaguccuacggguuccagccgaccaacggcgugggguaccagcccuaccggguggucgugcugagcuucgagcuccugcacgcccccgccacggugugcggccccaagaaguccaccaaccuggucaagaacaagugcgugaacuucaacuucaacggccucaccgggaccggcgugcugaccgagagcaacaagaaguuccugccguuccagcaguucgggcgcgacaucgccgacacgaccgacgcgguccgcgacccccagacccuggagauccucgacaucacccccugcagcuucggcgggguguccgugaucacgccgggcaccaacaccagcaaccaggucgccgugcuguaccaggacgugaacugcaccgagguccccguggccauccacgccgaccagcugacgcccaccuggcggguguacuccaccggcagcaacgucuuccagacccgcgccgggugccucaucggcgcggagcacgugaacaacuccuacgagugcgacauccccaucggggccggcaucugcgccagcuaccagacgcagaccaacuccccgcggcgcgcccggagcguggcgucccagagcaucaucgccuacaccaugucccugggcgccgagaacagcgucgccuacuccaacaacagcaucgccauccccaccaacuucacgaucuccgugaccaccgagauccugcccgugagcaugaccaagacgagcgucgacugcaccauguacaucugcggggacuccaccgagugcagcaaccuccugcugcaguacggcuccuucugcacccagcucaaccgcgcgcugacggggaucgccguggagcaggacaagaacacccaggagguguucgcccaggucaagcagaucuacaagacgcccccgaucaaggacuucggcggguucaacuucagccagauccugcccgaccccuccaagcccagcaagcgguccuucaucgaggaccuccuguucaacaaggugacccuggccgacgccggcuucaucaagcaguacggcgacugccucggggacaucgcggcccgcgaccugaucugcgcccagaaguucaacggccugaccgugcucccgccccugcugaccgacgagaugaucgcccaguacaccagcgcccuccuggcggggaccaucacguccggcuggaccuucggggccggcgccgcccugcagauccccuucgcgaugcagauggccuaccgguucaacggcaucggggucacccagaacgugcucuacgagaaccagaagcugaucgccaaccaguucaacagcgccaucggcaagauccaggacucccugagcuccaccgccagcgcgcucgggaagcugcaggacguggucaaccagaacgcccaggcccugaacacgcucgugaagcagcuguccagcaacugcggcgccaucuccagcgugcugaacgacauccucucccgccuggacaaggucgaggccgaggugcagaucgaccggcugaucaccugucgccuccagagccugcagaccuacgugacccagcagcugauccgggcggccgagauccgcgccagcgccaaccucgccgcgaccaagauguccgagugcguccugggccagagcaagcggguggacuucugcggcaagggguaccaccugauguccuucccccagagcgccccgcacggcguggucuuccuccacgugacguacguccccgcccaggagaagaacuucaccaccgcccccgcgaucugccacgacgggaaggcccacuucccccgcgagggcguguucguguccaacgggacccacugguucgucacgcagcggaacuucuacgagccgcagaucaucaccaccgacaacaccuucgugagcggcaacugcgacguggucaucggcaucgugaacaacacgguguacgacccccugcagcccgagcuggacuccggcgggggcgggagcgacaucgaccccuacaaggaguucggcagcuccuaccagcugcucaacuuccugccccuggacuucuuccccgaccucaacgcccugguggacaccgccaccgcgcuguacgaggaggagcucacggggcgcgagcacugcagcccccaccacaccgccauccggcaggcccuggucugcugggacgagcugaccaagcucaucgccuggauguccagcaacaucaccuccgagcagguccgcacgaucaucgugaaccacgucaacgacaccuggggccugaaggugcggcagagccugugguuccaccucuccugccugaccuucgggcagcacaccgugcaggaguuccuggucagcuucggcguguggauccgcacgcccgccccguaccggccgcccaacgcgccgauccucuccacccugccggagcacaccgugaucugcuga

SEQ ID NO: 11964 - RNA, 3906 nt, Artificial Sequence
  SARS-CoV-2/Wuhan/WIV05/2019__EPI_ISL_402128 spike protein CDS gc (1-1147)(A972C_R995C) WhcAg construct
auguucguguuccugguccuccugccccuggugagcucccagugcgugaaccucaccacccgcacgcagcugccgcccgccuacaccaacagcuucacccggggcgucuacuaccccgacaagguguuccgcuccagcgugcugcacuccacccaggaccucuuccugcccuucuucagcaacgucacgugguuccacgccauccacguguccgggaccaacggcaccaagcgguucgacaacccggugcugcccuucaacgacggggucuacuucgcgagcaccgagaaguccaacaucauccgcggcuggaucuucgggacgacccucgacagcaagacccagucccugcugaucgugaacaacgccaccaacguggucaucaaggugugcgaguuccaguucugcaacgaccccuuccucggcguguacuaccacaagaacaacaagagcuggauggaguccgaguuccgggucuacagcuccgccaacaacugcacguucgaguacgugagccagcccuuccugauggaccuggagggcaagcaggggaacuucaagaaccuccgcgaguucguguucaagaacaucgacggcuacuucaagaucuacuccaagcacaccccgaucaaccugguccgggaccugccccagggguucagcgcccucgagccccugguggaccugcccaucggcaucaacaucacccgcuuccagacccuccuggcccugcaccgguccuaccucacgccgggggacagcagcuccggcuggaccgcgggcgccgccgccuacuacgugggguaccugcagccccgcaccuuccugcucaaguacaacgagaacggcaccaucacggacgcggucgacugcgcccuggacccccugagcgagaccaagugcacccucaaguccuucaccguggagaaggggaucuaccagacgagcaacuuccgggugcagcccaccgaguccaucguccgcuucccgaacaucaccaaccugugccccuucggcgagguguucaacgccacccgguucgccagcgucuacgccuggaaccgcaagcggaucuccaacugcguggcggacuacagcgugcuguacaacuccgccagcuucuccacguucaagugcuacggcgucagccccaccaagcucaacgaccugugcuucaccaacguguacgccgacuccuucgugauccgcggggacgagguccggcagaucgcccccggccagaccgggaagaucgccgacuacaacuacaagcugccggacgacuucacgggcugcgugaucgcguggaacagcaacaaccucgacuccaaggucgggggcaacuacaacuaccuguaccgccuguuccgcaagagcaaccucaagcccuucgagcgggacaucuccaccgagaucuaccaggccggcagcacccccugcaacgggguggagggcuucaacugcuacuucccccugcaguccuacggguuccagccgaccaacggcgugggguaccagcccuaccggguggucgugcugagcuucgagcuccugcacgcccccgccacggugugcggccccaagaaguccaccaaccuggucaagaacaagugcgugaacuucaacuucaacggccucaccgggaccggcgugcugaccgagagcaacaagaaguuccugccguuccagcaguucgggcgcgacaucgccgacacgaccgacgcgguccgcgacccccagacccuggagauccucgacaucacccccugcagcuucggcgggguguccgugaucacgccgggcaccaacaccagcaaccaggucgccgugcuguaccaggacgugaacugcaccgagguccccguggccauccacgccgaccagcugacgcccaccuggcggguguacuccaccggcagcaacgucuuccagacccgcgccgggugccucaucggcgcggagcacgugaacaacuccuacgagugcgacauccccaucggggccggcaucugcgccagcuaccagacgcagaccaacuccccgcggcgcgcccggagcguggcgucccagagcaucaucgccuacaccaugucccugggcgccgagaacagcgucgccuacuccaacaacagcaucgccauccccaccaacuucacgaucuccgugaccaccgagauccugcccgugagcaugaccaagacgagcgucgacugcaccauguacaucugcggggacuccaccgagugcagcaaccuccugcugcaguacggcuccuucugcacccagcucaaccgcgcgcugacggggaucgccguggagcaggacaagaacacccaggagguguucgcccaggucaagcagaucuacaagacgcccccgaucaaggacuucggcggguucaacuucagccagauccugcccgaccccuccaagcccagcaagcgguccuucaucgaggaccuccuguucaacaaggugacccuggccgacgccggcuucaucaagcaguacggcgacugccucggggacaucgcggcccgcgaccugaucugcgcccagaaguucaacggccugaccgugcucccgccccugcugaccgacgagaugaucgcccaguacaccagcgcccuccuggcggggaccaucacguccggcuggaccuucggggccggcgccgcccugcagauccccuucgcgaugcagauggccuaccgguucaacggcaucggggucacccagaacgugcucuacgagaaccagaagcugaucgccaaccaguucaacagcgccaucggcaagauccaggacucccugagcuccaccgccagcgcgcucgggaagcugcaggacguggucaaccagaacgcccaggcccugaacacgcucgugaagcagcuguccagcaacuucggcugcaucuccagcgugcugaacgacauccucucccgccuggacaaggucgaggccgaggugcagaucgacugccugaucaccgggcgccuccagagccugcagaccuacgugacccagcagcugauccgggcggccgagauccgcgccagcgccaaccucgccgcgaccaagauguccgagugcguccugggccagagcaagcggguggacuucugcggcaagggguaccaccugauguccuucccccagagcgccccgcacggcguggucuuccuccacgugacguacguccccgcccaggagaagaacuucaccaccgcccccgcgaucugccacgacgggaaggcccacuucccccgcgagggcguguucguguccaacgggacccacugguucgucacgcagcggaacuucuacgagccgcagaucaucaccaccgacaacaccuucgugagcggcaacugcgacguggucaucggcaucgugaacaacacgguguacgacccccugcagcccgagcuggacuccggcgggggcgggagcgacaucgaccccuacaaggaguucggcagcuccuaccagcugcucaacuuccugccccuggacuucuuccccgaccucaacgcccugguggacaccgccaccgcgcuguacgaggaggagcucacggggcgcgagcacugcagcccccaccacaccgccauccggcaggcccuggucugcugggacgagcugaccaagcucaucgccuggauguccagcaacaucaccuccgagcagguccgcacgaucaucgugaaccacgucaacgacaccuggggccugaaggugcggcagagccugugguuccaccucuccugccugaccuucgggcagcacaccgugcaggaguuccuggucagcuucggcguguggauccgcacgcccgccccguaccggccgcccaacgcgccgauccucuccacccugccggagcacaccgugaucugcuga

SEQ ID NO: 11965 - RNA, 3906 nt, Artificial Sequence
  SARS-CoV-2/Wuhan/WIV05/2019__EPI_ISL_402128 spike protein CDS gc (1-1147)(A890C_V1040C) WhcAg construct
auguucguguuccugguccuccugccccuggugagcucccagugcgugaaccucaccacccgcacgcagcugccgcccgccuacaccaacagcuucacccggggcgucuacuaccccgacaagguguuccgcuccagcgugcugcacuccacccaggaccucuuccugcccuucuucagcaacgucacgugguuccacgccauccacguguccgggaccaacggcaccaagcgguucgacaacccggugcugcccuucaacgacggggucuacuucgcgagcaccgagaaguccaacaucauccgcggcuggaucuucgggacgacccucgacagcaagacccagucccugcugaucgugaacaacgccaccaacguggucaucaaggugugcgaguuccaguucugcaacgaccccuuccucggcguguacuaccacaagaacaacaagagcuggauggaguccgaguuccgggucuacagcuccgccaacaacugcacguucgaguacgugagccagcccuuccugauggaccuggagggcaagcaggggaacuucaagaaccuccgcgaguucguguucaagaacaucgacggcuacuucaagaucuacuccaagcacaccccgaucaaccugguccgggaccugccccagggguucagcgcccucgagccccugguggaccugcccaucggcaucaacaucacccgcuuccagacccuccuggcccugcaccgguccuaccucacgccgggggacagcagcuccggcuggaccgcgggcgccgccgccuacuacgugggguaccugcagccccgcaccuuccugcucaaguacaacgagaacggcaccaucacggacgcggucgacugcgcccuggacccccugagcgagaccaagugcacccucaaguccuucaccguggagaaggggaucuaccagacgagcaacuuccgggugcagcccaccgaguccaucguccgcuucccgaacaucaccaaccugugccccuucggcgagguguucaacgccacccgguucgccagcgucuacgccuggaaccgcaagcggaucuccaacugcguggcggacuacagcgugcuguacaacuccgccagcuucuccacguucaagugcuacggcgucagccccaccaagcucaacgaccugugcuucaccaacguguacgccgacuccuucgugauccgcggggacgagguccggcagaucgcccccggccagaccgggaagaucgccgacuacaacuacaagcugccggacgacuucacgggcugcgugaucgcguggaacagcaacaaccucgacuccaaggucgggggcaacuacaacuaccuguaccgccuguuccgcaagagcaaccucaagcccuucgagcgggacaucuccaccgagaucuaccaggccggcagcacccccugcaacgggguggagggcuucaacugcuacuucccccugcaguccuacggguuccagccgaccaacggcgugggguaccagcccuaccggguggucgugcugagcuucgagcuccugcacgcccccgccacggugugcggccccaagaaguccaccaaccuggucaagaacaagugcgugaacuucaacuucaacggccucaccgggaccggcgugcugaccgagagcaacaagaaguuccugccguuccagcaguucgggcgcgacaucgccgacacgaccgacgcgguccgcgacccccagacccuggagauccucgacaucacccccugcagcuucggcgggguguccgugaucacgccgggcaccaacaccagcaaccaggucgccgugcuguaccaggacgugaacugcaccgagguccccguggccauccacgccgaccagcugacgcccaccuggcggguguacuccaccggcagcaacgucuuccagacccgcgccgggugccucaucggcgcggagcacgugaacaacuccuacgagugcgacauccccaucggggccggcaucugcgccagcuaccagacgcagaccaacuccccgcggcgcgcccggagcguggcgucccagagcaucaucgccuacaccaugucccugggcgccgagaacagcgucgccuacuccaacaacagcaucgccauccccaccaacuucacgaucuccgugaccaccgagauccugcccgugagcaugaccaagacgagcgucgacugcaccauguacaucugcggggacuccaccgagugcagcaaccuccugcugcaguacggcuccuucugcacccagcucaaccgcgcgcugacggggaucgccguggagcaggacaagaacacccaggagguguucgcccaggucaagcagaucuacaagacgcccccgaucaaggacuucggcggguucaacuucagccagauccugcccgaccccuccaagcccagcaagcgguccuucaucgaggaccuccuguucaacaaggugacccuggccgacgccggcuucaucaagcaguacggcgacugccucggggacaucgcggcccgcgaccugaucugcgcccagaaguucaacggccugaccgugcucccgccccugcugaccgacgagaugaucgcccaguacaccagcgcccuccuggcggggaccaucacguccggcuggaccuucgggugcggcgccgcccugcagauccccuucgcgaugcagauggccuaccgguucaacggcaucggggucacccagaacgugcucuacgagaaccagaagcugaucgccaaccaguucaacagcgccaucggcaagauccaggacucccugagcuccaccgccagcgcgcucgggaagcugcaggacguggucaaccagaacgcccaggcccugaacacgcucgugaagcagcuguccagcaacuucggcgccaucuccagcgugcugaacgacauccucucccgccuggacaaggucgaggccgaggugcagaucgaccggcugaucaccgggcgccuccagagccugcagaccuacgugacccagcagcugauccgggcggccgagauccgcgccagcgccaaccucgccgcgaccaagauguccgagugcguccugggccagagcaagcggugcgacuucugcggcaagggguaccaccugauguccuucccccagagcgccccgcacggcguggucuuccuccacgugacguacguccccgcccaggagaagaacuucaccaccgcccccgcgaucugccacgacgggaaggcccacuucccccgcgagggcguguucguguccaacgggacccacugguucgucacgcagcggaacuucuacgagccgcagaucaucaccaccgacaacaccuucgugagcggcaacugcgacguggucaucggcaucgugaacaacacgguguacgacccccugcagcccgagcuggacuccggcgggggcgggagcgacaucgaccccuacaaggaguucggcagcuccuaccagcugcucaacuuccugccccuggacuucuuccccgaccucaacgcccugguggacaccgccaccgcgcuguacgaggaggagcucacggggcgcgagcacugcagcccccaccacaccgccauccggcaggcccuggucugcugggacgagcugaccaagcucaucgccuggauguccagcaacaucaccuccgagcagguccgcacgaucaucgugaaccacgucaacgacaccuggggccugaaggugcggcagagccugugguuccaccucuccugccugaccuucgggcagcacaccgugcaggaguuccuggucagcuucggcguguggauccgcacgcccgccccguaccggccgcccaacgcgccgauccucuccacccugccggagcacaccgugaucugcuga

SEQ ID NO: 11966 - RNA, 3906 nt, Artificial Sequence
  SARS-CoV-2/Wuhan/WIV05/2019__EPI_ISL_402128 spike protein CDS gc (1-1147)(T874C_S1055C) WhcAg construct
auguucguguuccugguccuccugccccuggugagcucccagugcgugaaccucaccacccgcacgcagcugccgcccgccuacaccaacagcuucacccggggcgucuacuaccccgacaagguguuccgcuccagcgugcugcacuccacccaggaccucuuccugcccuucuucagcaacgucacgugguuccacgccauccacguguccgggaccaacggcaccaagcgguucgacaacccggugcugcccuucaacgacggggucuacuucgcgagcaccgagaaguccaacaucauccgcggcuggaucuucgggacgacccucgacagcaagacccagucccugcugaucgugaacaacgccaccaacguggucaucaaggugugcgaguuccaguucugcaacgaccccuuccucggcguguacuaccacaagaacaacaagagcuggauggaguccgaguuccgggucuacagcuccgccaacaacugcacguucgaguacgugagccagcccuuccugauggaccuggagggcaagcaggggaacuucaagaaccuccgcgaguucguguucaagaacaucgacggcuacuucaagaucuacuccaagcacaccccgaucaaccugguccgggaccugccccagggguucagcgcccucgagccccugguggaccugcccaucggcaucaacaucacccgcuuccagacccuccuggcccugcaccgguccuaccucacgccgggggacagcagcuccggcuggaccgcgggcgccgccgccuacuacgugggguaccugcagccccgcaccuuccugcucaaguacaacgagaacggcaccaucacggacgcggucgacugcgcccuggacccccugagcgagaccaagugcacccucaaguccuucaccguggagaaggggaucuaccagacgagcaacuuccgggugcagcccaccgaguccaucguccgcuucccgaacaucaccaaccugugccccuucggcgagguguucaacgccacccgguucgccagcgucuacgccuggaaccgcaagcggaucuccaacugcguggcggacuacagcgugcuguacaacuccgccagcuucuccacguucaagugcuacggcgucagccccaccaagcucaacgaccugugcuucaccaacguguacgccgacuccuucgugauccgcggggacgagguccggcagaucgcccccggccagaccgggaagaucgccgacuacaacuacaagcugccggacgacuucacgggcugcgugaucgcguggaacagcaacaaccucgacuccaaggucgggggcaacuacaacuaccuguaccgccuguuccgcaagagcaaccucaagcccuucgagcgggacaucuccaccgagaucuaccaggccggcagcacccccugcaacgggguggagggcuucaacugcuacuucccccugcaguccuacggguuccagccgaccaacggcgugggguaccagcccuaccggguggucgugcugagcuucgagcuccugcacgcccccgccacggugugcggccccaagaaguccaccaaccuggucaagaacaagugcgugaacuucaacuucaacggccucaccgggaccggcgugcugaccgagagcaacaagaaguuccugccguuccagcaguucgggcgcgacaucgccgacacgaccgacgcgguccgcgacccccagacccuggagauccucgacaucacccccugcagcuucggcgggguguccgugaucacgccgggcaccaacaccagcaaccaggucgccgugcuguaccaggacgugaacugcaccgagguccccguggccauccacgccgaccagcugacgcccaccuggcggguguacuccaccggcagcaacgucuuccagacccgcgccgggugccucaucggcgcggagcacgugaacaacuccuacgagugcgacauccccaucggggccggcaucugcgccagcuaccagacgcagaccaacuccccgcggcgcgcccggagcguggcgucccagagcaucaucgccuacaccaugucccugggcgccgagaacagcgucgccuacuccaacaacagcaucgccauccccaccaacuucacgaucuccgugaccaccgagauccugcccgugagcaugaccaagacgagcgucgacugcaccauguacaucugcggggacuccaccgagugcagcaaccuccugcugcaguacggcuccuucugcacccagcucaaccgcgcgcugacggggaucgccguggagcaggacaagaacacccaggagguguucgcccaggucaagcagaucuacaagacgcccccgaucaaggacuucggcggguucaacuucagccagauccugcccgaccccuccaagcccagcaagcgguccuucaucgaggaccuccuguucaacaaggugacccuggccgacgccggcuucaucaagcaguacggcgacugccucggggacaucgcggcccgcgaccugaucugcgcccagaaguucaacggccugaccgugcucccgccccugcugaccgacgagaugaucgcccaguacugcagcgcccuccuggcggggaccaucacguccggcuggaccuucggggccggcgccgcccugcagauccccuucgcgaugcagauggccuaccgguucaacggcaucggggucacccagaacgugcucuacgagaaccagaagcugaucgccaaccaguucaacagcgccaucggcaagauccaggacucccugagcuccaccgccagcgcgcucgggaagcugcaggacguggucaaccagaacgcccaggcccugaacacgcucgugaagcagcuguccagcaacuucggcgccaucuccagcgugcugaacgacauccucucccgccuggacaaggucgaggccgaggugcagaucgaccggcugaucaccgggcgccuccagagccugcagaccuacgugacccagcagcugauccgggcggccgagauccgcgccagcgccaaccucgccgcgaccaagauguccgagugcguccugggccagagcaagcggguggacuucugcggcaagggguaccaccugauguccuucccccagugcgccccgcacggcguggucuuccuccacgugacguacguccccgcccaggagaagaacuucaccaccgcccccgcgaucugccacgacgggaaggcccacuucccccgcgagggcguguucguguccaacgggacccacugguucgucacgcagcggaacuucuacgagccgcagaucaucaccaccgacaacaccuucgugagcggcaacugcgacguggucaucggcaucgugaacaacacgguguacgacccccugcagcccgagcuggacuccggcgggggcgggagcgacaucgaccccuacaaggaguucggcagcuccuaccagcugcucaacuuccugccccuggacuucuuccccgaccucaacgcccugguggacaccgccaccgcgcuguacgaggaggagcucacggggcgcgagcacugcagcccccaccacaccgccauccggcaggcccuggucugcugggacgagcugaccaagcucaucgccuggauguccagcaacaucaccuccgagcagguccgcacgaucaucgugaaccacgucaacgacaccuggggccugaaggugcggcagagccugugguuccaccucuccugccugaccuucgggcagcacaccgugcaggaguuccuggucagcuucggcguguggauccgcacgcccgccccguaccggccgcccaacgcgccgauccucuccacccugccggagcacaccgugaucugcuga

SEQ ID NO: 11967 - RNA, 3822 nt, Artificial Sequence
  SARS-CoV-2/Wuhan/WIV05/2019__EPI_ISL_402128 spike protein CDS human (1-1273)
auguucguguuucugguccuccuuccccugguuagcucccagugcgugaacuugaccacaagaacucaauuaccuccagccuacacuaauucuuucaccaggggcguauauuacccggacaagguguuucggucaaguguccugcacagcacacaggaucuauuccuccccuuuuucuccaacgugacuugguuucaugcuauccacguuucugggaccaauggaacaaaacgcuucgacaacccugugcugccauuuaaugauggugucuauuucgcaucgaccgagaagucaaacauuauacgaggcuggaucuuugggacuacacuugacagcaaaacccagagucuguugauugugaauaacgccacgaauguaguuaucaaggugugugaguuccaguuuugcaacgaucccuuccucggagucuacuaucauaaaaauaacaaguccuggauggagucugaguuccguguguacagcuccgcgaauaacuguacuuuugaauaugugucacaaccuuuccugauggaccuggaaggcaagcaggguaauuuuaaaaaccucagagaguucgucuuuaagaacauugauggguacuucaaaaucuacaguaagcacaccccaauaaauuuaguuagggaccugccccagggauuuagcgcucuugagccuuugguggaucugccaaucggcauuaacaucacacgguuccagacucuacucgcccugcaucgcucuuaucuuaccccgggcgacuccucaagcggguggacagcaggagccgcugcauacuauguagguuaccugcaacccagaaccuuuuugcucaaauauaaugaaaacggcacgauuacugaugccguggacugcgcucuggauccuuuaagugagacaaaguguacccugaagucuuucacugucgaaaaagggaucuaccagacauccaauuuuagggugcagccaaccgagagcauaguucgguuccccaacauuacgaaucucugcccuuuuggagagguguucaacgccacccgcuucgcgucggucuaugcauggaaucgaaagagaaucucuaacuguguggccgacuacuccguacuuuacaauucagcuaguuuuagcacauucaaaugcuauggcguuuccccaacuaagcugaacgacuuguguuuuaccaauguguacgccgauucuuucgucauuaggggugacgaagugcggcagaucgcacccgggcaaacaggaaaaaucgcugauuauaacuacaagcuaccggacgauuuuacuggcugcgucauugccuggaauagcaacaaccuggacucaaaagugggcgggaauuauaacuaccucuaucgucuguuccgcaagaguaaucuuaagccuuuugagagagauauauccaccgaaaucuaccaggcgggaagcacacccuguaacgguguugagggcuucaauugcuacuuuccacugcagucuuauggguuccaaccuaccaacggagugggcuaccagcccuauaggguagucguguugucauuugaacuccugcacgccccagcaacuguuugcggucccaaaaagaguacgaauuuagugaaaaacaagugugucaauuucaacuuuaaugggcugacaggcaccggagugcuaacugagagcaacaaaaaguuccucccuuuccagcaguuuggccgggacauugcugauaccacagacgccguacgagauccacaaacccuggagauccuugacauaacuccgugcuccuucgggggagugucuguuauuacacccgguacgaauaccucgaaccaggucgcuguguuguaccaggacgugaauuguacugaagucccuguugccauccacgcagaucagcugacaccaaccuggcgcguguauagcacaggcuccaacguguuucaaacuagagccgggugccucaucggagcugagcauguaaacaauucauacgaaugugacauucccaucggcgcggguauuugcgcaaguuaucagacccagacgaacucuccuaggcgggcccgcagcgucgcuucccagucaauaaucgccuacaccaugagccugggggcagaaaauucuguggccuacuccaacaauaguauugcuaucccaacaaacuucacuaucagcguuaccacagaaauucuucccgugucuaugacuaagaccuccgucgauuguacgauguauauaugcggcgacucaacagaguguaguaaucuguugcuccaauacggcagcuuuugcacccagcugaacagagccuuaacuggaaucgcaguggagcaggauaaaaauacacaggaaguuuucgcgcaagugaagcagauuuauaaaaccccgccuaucaaggacuuugggggauucaacuuuucgcagauucugccagaucccuccaaaccuucuaagaggagcuucaucgaggaccuacucuuuaauaagguaacucuggcugaugccgguuucauaaaacaauacggcgacugucuuggggauaucgcagcccgugacuugauuugcgcucagaaguucaacggacugaccguccugcccccacucuuaacagaugaaaugaucgcccaguauacgucagcacugcuugcuggcaccauuacgagugguuggacauuuggggccggcgcggccuugcagaucccuuucgcuaugcaaauggcauaccgguuuaauggaauaggcgugacccagaacgugcucuaugagaaucagaaacugauugccaaccaguucaacuccgcuaucgggaagauucaagacucucuaagcuccacagccucagcacugggaaaacuccaggacgucguuaaucagaacgcgcaggcccugaauacucuugugaagcaauugagcaguaacuuuggcgcuaucucuuccguacugaaugauauauuaagccgacucgacaagguggaagccgagguccagaucgauagacugauuaccgguaggcuucagucgcugcaaacguacgugacacagcaguugauccgcgcagcugagauucgggccucagcaaaccucgccgcuaccaaaaugucugaaugcguucuggggcagaguaagagaguggacuucuguggaaaaggcuaccaccuaauguccuuuccccaaagcgcgccacauggugucguguuccugcacguuacuuaugugccggcccaggagaagaauuuuaccacagcuccugcaaucugccacgauggcaaagcccauuuccccagggaaggggucuuuguaucuaacggaacucacugguucgugacccagcgcaauuuuuacgagccacagauaauuacaacggacaacaccuucguuagcggcaauugugauguggucaucgggaucgugaacaauacuguauaugacccccuccaaccugagcuggauuccuucaaggaggaacuugacaaauacuuuaagaaccauacaucaccagauguggacuugggagauauuaguggcaucaaugccagcgucguuaacauucagaaggaaauagaccgacugaaugagguggcuaaaaacuuaaacgaaucucucaucgaccugcaggagcuugguaaguaugagcaguacauuaaauggcccugguauaucuggcugggguucauugcaggacuaaucgccauagugauggucaccaucaugcucugcuguaugacuuccugcuguucaugccugaagggcuguugcaguugugguagcugcugcaaauuugaugaagacgauuccgagccuguguugaagggcguuaagcugcacuacacauga

SEQ ID NO: 11968 - RNA, 3810 nt, Artificial Sequence
  SARS-CoV-2/bat/Yunnan/RaTG13/2013__EPI_ISL_402131 spike protein CDS human (1-1269)
auguucguguuucugguccuccuuccccugguuagcucccagugcgugaacuugaccacaagaacucaauuaccuccagccuacaccaauucuucaacgaggggcguauauuacccggacaagguguuccggaguagcguccugcaccuaacacaggaucucuuucugcccuucuuuuccaacgugacuugguuccaugcuauccacguuucugggaccaauggaauuaaacgcuuugacaacccugugcuuccauucaaugauggugucuauuuugcaucgacagagaagucaaacauaauccgaggcuggauuuucgggaccacucuggacagcaaaacacagaguuugcucaucgugaauaacgccaccaauguaguuauuaaggugugugaauuucaguucugcaacgaucccuuucugggagucuacuaucauaaaaauaacaaguccuggauggagucugaguuccguguguacagcuccgcgaauaacuguacguucgaauaugugucacaaccuuuucugauggaccucgaaggcaagcaggguaauuucaaaaacuuaagagaguuugucuucaagaacaucgauggguacuuuaaaauauacaguaagcacacuccaaucaaucugguuagggaccuucccccuggauucagcgcuuuggagccacugguggaucuaccgauuggcaucaacauuacccgguuucagacacuccuggcccuucaucgcucuuaucugacucccggcgacuccucaagcggguggaccgcaggagccgcugcauacuauguagguuacuugcagccuagaacauuccuccugaaauauaaugaaaacggcaccaucacggaugccguggacugcgcuuuagauccacugagugagacuaaguguacacucaagucuuuuaccgucgaaaaagggauauaccaaacuuccaauuucagggugcagcccacagacagcauuguucgguuuccuaacaucaccaaucuuugcccauucggagagguguuuaacgccacgaccuucgcgucggucuaugcauggaaucgcaagcgaauuucuaacuguguggccgacuacuccguacuguacaauucaacaaguuucagcacuuuuaaaugcuauggcguuucccccaccaaguugaacgaucuauguuucacaaauguguacgcugacucuuuugucaucacuggugaugaggugagacagaucgccccggggcagaccggaaaaauugcagacuauaacuacaagcugccugaugacuucacaggcugcgucauagcuuggaauagcaaacacaucgaugccaaggaaggcgggaacuuuaacuaucucuacaggcuguuccggaaggcgaaucuuaaacccuuugagcgugacauuucaaccgaaaucuaucaagccggaaguaagccauguaacggucagacuggccugaauugcuacuacccuuuguaucgcuacggguucuaucccacggauggagugggccaccagccauacagaguugugguacucuccuuugagcuguuaaacgcacccgcuacagucugcgguccuaaaaagagcaccaaucuggugaaaaacaaguguguuaauuucaacuuuaaugggcuaacuggcaccggagugcucacagaaucuaacaagaaauuccugccauuucaacaguucggcagggacauagccgauaccacugacgcuguccgggacccgcagacacuugagauuuuggauaucacgcccugcucauucgggggagugaguguaaucaccccugguacuaaugccagcaaccagguggcaguucuguaucaagacgucaauuguacagaggugccaguggccauucaugcugaucagcucacccccacauggcgagucuacuccacuggcucuaacguuuuucagacccgcgcggggugccugaucggagcagaacacgugaauaacucguaugagugugacauuccuauaggcgccgguaucugcgcuagcuaccagacgcaaaccaacuccagaucaguggccagucagucuauuaucgcauacacaaugagccuuggggccgaaaauuccguagcuuauucaaacaauagcaucgccauuccaacuaacuucaccauaucugucacaacugagauccugcccguguccaugaccaagacgaguguugauuguacaauguacauuugcggcgacagcaccgaauguucuaauuugcuccugcaguauggauccuuuugcacucaguuaaacagggcacugacaggcaucgcgguggagcaagauaaaaauacccaggaggucuucgcucaggugaagcagauuuacaaaacuccgccuaucaaggacuuugggggauucaacuuuucacaaauacuaccagaucccaguaagccuagcaaacggucguucaucgaagaccuccuguuuaauaagguuacccuugccgaugcagguuucauuaaacaguauggcgacuguuugggggauaucgccgcucgcgaccugauuugcgcccagaaguuuaacggacucacagugcugcccccauuacugacggacgagaugaucgcacaauacaccuccgcucuuuuggccggcacuauaacaucugguuggaccuucggggcgggcgccgcucuccagauuccuuucgcaaugcagauggccuauagauuuaauggaaucggcguaacacagaacguccuguacgaaaaucaaaaacuaauugcuaaccaguucaauagcgccaucgggaagauacaggauucacugaguuccacugcaucugcgcucggaaagcugcaggacguggugaaccaaaacgcccaggcucuuaauaccuuggucaaacagcugagcuccaacuuuggcgccaucucaagcguuuuaaaugauauucucaguaggcuggacaagguggaggcagaaguacagaucgaucgucuuauuacgggucggcugcaaucuuugcagacauacgugacccagcaacucauccgagcugccgagauaagagcauccgccaaccuggcugcgacuaaaaugagcgagugcguccuagggcagucgaagaggguggacuucuguggaaaaggcuaucaucugaugucauuuccccagucugccccacacgguguuguguuccuccacgucaccuacgugccggcacaggaaaagaauuuuacaacugcuccugccauuugccaugauggcaaagcccacuucccccgcgaggggguuuuugugaguaacggaacccauugguucgucacacaacggaauuuuuaugaaccacagaucaucacgaccgacaacacuuucguauccggcagcugugaugugguuauugggaucgugaauaacacagucuacgacccccugcagccugagcuugauucuuuuaaggaggaauuggacaaguauuucaaaaaucacaccagcccagauguggaccugggagacauuuccggcauaaacgcuucaguagugaauauccagaaggagauugauagauuaaacgaagucgccaaaaaucucaacgagagucugaucgaccuucaagaacuggguaaguacgagcaguauauuaaauggcccugguacaucuggcuaggguucauagcaggacucaucgcgauuaucaugguuacuauuaugcugugcuguaugacaagcugcuguucuugcuugaagggcuguugcuccugugguucaugcugcaaguuugaugaggacgauagugaaccugugcugaaaggcgugaaguuacauuacaccuga

SEQ ID NO: 11969 - RNA, 3822 nt, Artificial Sequence
  SARS-CoV-2/Wuhan/HBCDC-HB-01/2019__EPI_ISL_402132 spike protein CDS human (1-1273)
auguucguguuucugguccuccuuccccugguuagcucccagugcgugaacuugaccacaagaacucaauuaccuccagccuacacuaauucuaucaccaggggcguauauuacccggacaagguguuccggucaaguguccugcacagcacacaggaucuauuucuccccuucuuuuccaacgugacuugguuccaugcuauucacguuucugggaccaauggaacaaaacgcuuugacaacccugugcugccauucaaugauggugucuauuuugcaucgaccgagaagucaaacauaauccgaggcuggauuuucgggacuacacuugacagcaaaacccagagucuguugaucgugaauaacgccacgaauguaguuauuaaggugugugaauuucaguucugcaacgaucccuuucucggagucuacuaucauaaaaauaacaaguccuggauggagucugaguuccguguguacagcuccgcgaauaacuguacuuucgaguaugugucacaaccuuuucugauggaccuggaaggcaagcaggguaauuucaaaaaccucagagaguuugucuucaagaacaucgauggguacuuuaaaauauacaguaagcacaccccaaucaauuuaguuagggaccugccccagggauucagcgcucuugagccuuugguggaucugccaauuggcaucaacauuacacgguuucagacucuacucgcccugcaucgcucuuaucuuaccccgggcgacuccucaagcggguggacagcaggagccgcugcauacuauguagguuaccugcaacccagaaccuucuugcucaaauauaaugaaaacggcacgaucacugaugccguggacugcgcucuggauccuuuaagugagacaaaguguacccugaagucuuuuacugucgaaaaagggauauaccagacauccaauuucagggugcagccaaccgagagcauuguucgguuucccaacaucacgaaucucugcccuuucggagagguguuuaacgccacccgcuucgcgucggucuaugcauggaaucgaaagagaauuucuaacuguguggccgacuacuccguacuuuacaauucagcuaguuucagcacauuuaaaugcuauggcguuuccccaacuaagcugaacgacuuguguuucaccaauguguacgccgauucuuuugucaucaggggugacgaagugcggcagaucgcacccgggcaaacaggaaaaauugcugauuauaacuacaagcuaccggacgauuucacuggcugcgucauagccuggaauagcaacaaccuggacucaaaagugggcgggaauuauaacuaccucuaucgucuguuucgcaagaguaaucuuaagccuuucgagagagauaucuccaccgaaauuuaccaggcgggaagcacacccuguaacgguguugagggcuuuaauugcuacuucccacugcagucuuauggguuucaaccuaccaacggagugggcuaccagcccuauaggguagucguguugucauucgaacuccugcacgccccagcaacuguuugcggucccaaaaagaguacgaauuuagugaaaaacaagugugucaauuuuaacuucaaugggcugacaggcaccggagugcuaacugagagcaacaaaaaguuucucccuuuccagcaguucggccgggacaucgcugauaccacagacgccguacgagauccacaaacccuggagauacuugacauuacuccgugcuccuuugggggagugucuguuaucacacccgguacgaauaccucgaaccaggucgcuguguuguaccaggacgugaauuguacugaagucccuguugccauccacgcagaucagcugacaccaaccuggcgcguguauagcacaggcuccaacguguuccaaacuagagccgggugccucauuggagcugagcauguaaacaauucauacgaaugugacauccccauuggcgcggguauaugcgcaaguuaucagacccagacgaacucuccuaggcgggcccgcagcgucgcuucccagucaaucauugccuacaccaugagccugggggcagaaaauucuguggccuacuccaacaauaguaucgcuaucccaacaaacuuuacuauuagcguuaccacagaaauacuucccgugucuaugacuaagaccuccgucgauuguacgauguauaucugcggcgacucaacagaguguaguaaucuguugcuccaauacggcagcuucugcacccagcugaacagagccuuaacuggaauugcaguggagcaggauaaaaauacacaggaaguuuuugcgcaagugaagcagaucuauaaaaccccgccuauuaaggacuucgggggauuuaacuucucgcagauccugccagaucccuccaaaccuucuaagaggagcuuuauagaggaccuacucuucaauaagguaacucuggcugaugccgguuuuaucaaacaauacggcgacugucuuggggauauugcagcccgugacuugaucugcgcucagaaguucaacggacugaccguccugcccccacucuuaacagaugaaaugauugcccaguauacgucagcacugcuugcuggcaccaucacgagugguuggacauucggggccggcgcggccuugcagauaccuuuugcuaugcaaauggcauaccgguucaauggaauuggcgugacccagaacgugcucuaugagaaucagaaacugaucgccaaccaguuuaacuccgcuauugggaagauccaagacucucuaagcuccacagccucagcacugggaaaacuccaggacgucguuaaucagaacgcgcaggcccugaauacucuugugaagcaauugagcaguaacuucggcgcuauaucuuccguacugaaugauaucuuaagccgacucgacaagguggaagccgagguccagauugauagacugaucaccgguaggcuucagucgcugcaaacguacgugacacagcaguugauucgcgcagcugagauccgggccucagcaaaccucgccgcuaccaaaaugucugaaugcguucuggggcagaguaagagaguggacuuuuguggaaaaggcuaccaccuaauguccuucccccaaagcgcgccacauggugucguguuucugcacguuacuuaugugccggcccaggagaagaauuucaccacagcuccugcaauaugccacgauggcaaagcccauuuucccagggaaggggucuucguaucuaacggaacucacugguuugugacccagcgcaauuucuacgagccacagauuaucacaacggacaacaccuuuguuagcggcaauugugauguggucaucgggauugugaacaauacuguauaugacccccuccaaccugagcuggauuccuucaaggaggaacuugacaaauacuucaagaaccauacaucaccagauguggacuugggagauaucaguggcauuaaugccagcgucguuaacauacagaaggaaaucgaccgacugaaugagguggcuaaaaacuuaaacgaaucucucauugaccugcaggagcuugguaaguaugagcaguacaucaaauggcccugguauauuuggcugggguuuaucgcaggacuaauagccaucgugauggucaccauuaugcucugcuguaugacuuccugcuguucaugccugaagggcuguugcaguugugguagcugcugcaaauucgaugaagacgauuccgagccuguguugaagggcguuaagcugcacuacacauga

SEQ ID NO: 11970 - RNA, 3822 nt, Artificial Sequence
  SARS-CoV-2/Guangdong/20SF028/2020__EPI_ISL_403936 spike protein CDS human (1-1273)
auguucguguuucugguccuccuuccccugguuagcucccagugcgugaacuugaccacaagaacucaauuaccuccagccuacacuaauucuuucaccaggggcguauauuacccggacaagguguuucggucaaguguccuguauagcacacaggaucuauuccuccccuuuuucuccaacgugacuugguuucacgcuauccauguuucugggaccaauggaacaaaacgcuucgacaacccugugcugccauuuaaugauggugucuacuucgcaucgaccgagaagucaaacauuauacgaggcuggaucuuugggacuacacuugacagcaaaacccagagucuguugauugugaauaacgccacgaauguaguuaucaaggugugugaguuccaguuuugcaacgaucccuuccucggagucuauuaccacaaaaauaacaaguccuggauggagucugaguuccguguguauagcuccgcgaauaacuguacuuuugaauacgugucacaaccuuuccugauggaccuggaaggcaagcaggguaauuuuaaaaaccucagagaguucgucuuuaagaacauugauggguacuucaaaaucuauaguaagcauaccccaauaaauuuaguuagggaccugccccagggauuuagcgcucuugagccuuugguggaucugccaaucggcauuaacaucacacgguuccagacucuacucgcccugcaccgcucuuaccuuaccccgggcgacuccucaagcggguggacagcaggagccgcugcauauuacguagguuaucugcaacccagaaccuuuuugcucaaauacaaugaaaacggcacgauuacugaugccguggacugcgcucuggauccuuuaagugagacaaaguguacccugaagucuuucacugucgaaaaagggaucuaucagacauccaauuuuagggugcagccaaccgagagcauaguucgguuccccaacauuacgaaucucugcccuuuuggagagguguucaacgccacccgcuucgcgucggucuacgcauggaaucgaaagagaaucucuaacuguguggccgacuacuccguacuuuauaauucagcuaguuuuagcacauucaaaugcuacggcguuuccccaacuaagcugaacgacuuguguuuuaccaauguguaugccgauucuuucgucauuaggggugacgaagugcggcagaucgcacccgggcaaacaggaaaaaucgcugauuacaacuauaagcuaccggacgauuuuacuggcugcgucauugccuggaauagcaacaaccuggacucaaaagugggcgggaauuacaacuaucucuaccgucuguuccgcaagaguaaucuuaagccuuuugagagagauauauccaccgaaaucuaccaggcgggaagcacacccuguaacgguguugagggcuucaauugcuauuuuccacugcagucuuacggguuccaaccuaccaacggagugggcuaucagcccuacaggguagucguguugucauuugaacuccugcaugccccagcaacuguuugcggucccaaaaagaguacgaauuuagugaaaaacaagugugucaauuucaacuuuaaugggcugacaggcaccggagugcuaacugagagcaacaaaaaguuccucccuuuccagcaguuuggccgggacauugcugauaccacagacgccguacgagauccacaaacccuggagauccuugacauaacuccgugcuccuucgggggagugucuguuauuacacccgguacgaauaccucgaaccaggucgcuguguuguaucaggacgugaauuguacugaagucccuguugccauccacgcagaucagcugacaccaaccuggcgcguguacagcacaggcuccaacguguuucaaacuagagccgggugccucaucggagcugagcacguaaacaauucauaugaaugugacauucccaucggcgcggguauuugcgcaaguuaccagacccagacgaacucuccuaggcgggcccgcagcgucgcuucccagucaauaaucgccuacaccaugagccugggggcagaaaauucuguggccuauuccaacaauaguauugcuaucccaacaaacuucacuaucagcguuaccacagaaauucuucccgugucuaugacuaagaccuccgucgauuguacgauguacauaugcggcgacucaacagaguguaguaaucuguugcuccaauauggcagcuuuugcacccagcugaacagagccuuaacuggaaucgcaguggagcaggauaaaaauacacaggaaguuuucgcgcaagugaagcagauuuacaaaaccccgccuaucaaggacuuugggggauucaacuuuucgcagauucugccagaucccuccaaaccuucuaagaggagcuucaucgaggaccuacucuuuaauaagguaacucuggcugaugccgguuucauaaaacaauauggcgacugucuuggggauaucgcagcccgugacuugauuugcgcucagaaguucaacggacugaccguccugcccccacucuuaacagaugaaaugaucgcccaguacacgucagcacugcuugcuggcaccauuacgagugguuggacauuuggggccggcgcggccuugcagaucccuuucgcuaugcaaauggcauaucgguuuaauggaauaggcgugacccagaacgugcucuacgagaaucagaaacugauugccaaccaguucaacuccgcuaucgggaagauucaagacucucuaagcuccacagccucagcacugggaaaacuccaggacgucguuaaucagaacgcgcaggcccugaauacucuugugaagcaauugagcaguaacuuuggcgcuaucucuuccguacugaaugauauauuaagccgacucgacaagguggaagccgagguccagaucgauagacugauuaccgguaggcuucagucgcugcaaacguacgugacacagcaguugauccgcgcagcugagauucgggccucagcaaaccucgccgcuaccaaaaugucugaaugcguucuggggcagaguaagagaguggacuucuguggaaaaggcuaucaucuaauguccuuuccccaaagcgcgccacacggugucguguuccugcauguuacuuacgugccggcccaggagaagaauuuuaccacagcuccugcaaucugccacgauggcaaagcccacuuccccagggaaggggucuuuguaucuaacggaacucauugguucgugacccagcgcaauuuuuaugagccacagauaauuacaacggacaacaccuucguuagcggcaauugugauguggucaucgggaucgugaacaauacuguauacgacccccuccaaccugagcuggauuccuucaaggaggaacuugacaaauauuuuaagaaccacacaucaccagauguggacuugggagauauuaguggcaucaaugccagcgucguuaacauucagaaggaaauagaccgacugaaugagguggcuaaaaacuuaaacgaaucucucaucgaccugcaggagcuugguaaguacgagcaguauauuaaauggcccugguacaucuggcugggguucauugcaggacuaaucgccauagugauggucaccaucaugcucugcuguaugacuuccugcuguucaugccugaagggcuguugcaguugugguagcugcugcaaauuugaugaagacgauuccgagccuguguugaagggcguuaagcugcauuacacauga

SEQ ID NO: 11971 - RNA, 3822 nt, Artificial Sequence
  SARS-CoV-2/Shenzhen/SZTH-001/2020__EPI_ISL_406592 spike protein CDS human (1-1273)
auguucguguuucugguccuccuuccccugguuagcucccagugcgugaacuugaccacaagaacucaauuaccuccagccuacacuaauucuuucaccaggggcguauauuacccggacaagguguuucggucaaguguccugcacagcacacaggaucuauuccuccccuuuuucuccaacgugacuugguuucaugcuauccacguuucugggaccaauggaacaaaacgcuucgacaacccugugcugccauuuaaugauggugucuauuucgcaucgaccgagaagucaaacauuauacgaggcuggaucuuugggacuacacuugacagcaaaacccagagucuguugauugugaauaacgccacgaauguaguuaucaaggugugugaguuccaguuuugcaacgaucccuuccucggagucuacuaucauaaaaauaacaaguccuggauggagucugaguuccguguguacagcuccgcgaauaacuguacuuuugaauaugugucacaaccuuuccugauggaccuggaaggcaagcaggguaauuuuaaaaaccucagagaguucgucuuuaagaacauugauggguacuucaaaaucuacaguaagcacaccccaauaaauuuaguuagggaccugccccagggauuuagcgcucuugagccuuugguggaucugccaaucggcauuaacaucacacgguuccagacucuacucgcccugcaucgcucuuaucuuaccccgggcgacuccucaagcggguggacagcaggagccgcugcauacuauguagguuaccugcaacccagaaccuuuuugcucaaauauaaugaaaacggcacgauuacugaugccguggacugcgcucuggauccuuuaagugagacaaaguguacccugaagucuuucacugucgaaaaagggaucuaccagacauccaauuuuagggugcagccaaccgagagcauaguucgguuccccaacauuacgaaucucugcccuuuuggagagguguucaacgccacccgcuucgcgucggucuaugcauggaaucgaaagagaaucucuaacuguguggccgacuacuccguacuuuacaauucagcuaguuuuagcacauucaaaugcuauggcguuuccccaacuaagcugaacgacuuguguuuuaccaauguguacgccgauucuuucgucauuaggggugacgaagugcggcagaucgcacccgggcaaacaggaaaaaucgcugauuauaacuacaagcuaccggacgauuuuacuggcugcgucauugccuggaauagcaacaaccuggacucaaaagugggcgggaauuauaacuaccucuaucgucuguuccgcaagaguaaucuuaagccuuuugagagagauauauccaccgaaaucuaccaggcgggaagcacacccuguaacgguguugagggcuucaauugcuacuuuccacugcagucuuauggguuccaaccuaccaacggagugggcuaccagcccuauaggguagucguguugucauuugaacuccugcacgccccagcaacuguuugcggucccaaaaagaguacgaauuuagugaaaaacaagugugucaauuucaacuuuaaugggcugacaggcaccggagugcuaacugagagcaacaaaaaguuccucccuuuccagcaguuuggccgggacauugcugauaccacagacgccguacgagauccacaaacccuggagauccuugacauaacuccgugcuccuucgggggagugucuguuauuacacccgguacgaauaccucgaaccaggucgcuguguuguaccaggacgugaauuguacugaagucccuguugccauccacgcagaucagcugacaccaaccuggcgcguguauagcacaggcuccaacguguuucaaacuagagccgggugccucaucggagcugagcauguaaacaauucauacgaaugugacauucccaucggcgcggguauuugcgcaaguuaucagacccagacgaacucuccuaggcgggcccgcagcgucgcuucccagucaauaaucgccuacaccaugagccugggggcagaaaauucuguggccuacuccaacaauaguauugcuaucccaacaaacuucacuaucagcguuaccacagaaauucuucccgugucuaugacuaagaccuccgucgauuguacgauguauauaugcggcgacucaacagaguguaguaaucuguugcuccaauacggcagcuuuugcacccagcugaacagagccuuaacuggaaucgcaguggagcaggauaaaaauacacaggaaguuuucgcgcaagugaagcagauuuauaaaaccccgccuaucaaggacuuugggggauucaacuuuucgcagauucugccagaucccuccaaaccuucuaagaggagcuucaucgaggaccuacucuuuaauaagguaacucuggcugaugccgguuucauaaaacaauacggcgacugucuuggggauaucgcagcccgugacuugauuugcgcucagaaguucaacggacugaccguccugcccccacucuuaacagaugaaaugaucgcccaguauacgucagcacugcuugcuggcaccauuacgagugguuggacauuuggggccggcgcggccuugcagaucccuuucgcuaugcaaauggcauaccgguuuaauggaauaggcgugacccagaacgugcucuaugagaaucagaaacugauugccaaccaguucaacuccgcuaucgggaagauucaagacucucuaagcuccacagccucagcacugggaaaacuccaggacgucguuaaucagaacgcgcaggcccugaauacucuugugaagcaauugagcaguaacuuuggcgcuaucucuuccguacugaaugauauauuaagccgacucgacaagguggaagccgagguccagaucgauagacugauuaccgguaggcuucagucgcugcaaacguacgugacacagcaguugauccgcgcagcugagauucgggccucagcaaaccucgccgcuaccaaaaugucugaaugcguucuggggcagaguaagagaguggacuucuguggaaaaggcuaccaccuaauguccuuuccccaaagcgcgccacauggugucguguuccugcacguuacuuaugugccggcccaggagaagaauuuuaccacagcuccugcaaucugccacgauggcaaagcccauuuccccagggaaggggucuuuguaucuaacggaacucacugguucgugacccagcgcaauuuuuacgagccacagauaauuacaacggacaacaccuucguuagcggcaauugugaugugcucaucgggaucgucaacaauacuguguaugacccccugcaaccugagcuugauuccuucaaggaagaguuggacaaauacuuuaagaaccauacaucaccagauguagaccugggagauauuaguggcaucaaugccagcguggucaacauucagaaggaaauagaccgauuaaaugagguugcuaaaaaccucaacgaaucucugaucgaccuucaggagcuggguaaguaugagcaguacauuaaauggcccugguauaucuggcuaggguucauugcaggacucaucgccauagugauggugaccaucaugcugugcuguaugacuuccugcuguucaugcuugaagggcuguugcaguugugguagcugcugcaaauuugaugaagacgauuccggcccuguccugaagggggugaaguuacacuacacauga

SEQ ID NO: 11972 - RNA, 3822 nt, Artificial Sequence
  SARS-CoV-2/Shenzhen/SZTH-004/2020__EPI_ISL_406595 spike protein CDS human (1-1273)
auguucguguuucugguccuccuuccccugguuagcucccagugcgugaacuugaccacaagaacucaauuaccuccagccuacacgaauagcuucaccaggggcguauauuacccggacaagguguuucggucaaguguccugcacagcacacaggaucuauuccuccccuuuuucuccaacgugacuugguuucaugcuauccacguuucugggaccaauggaacaaaacgcuucgacaacccugugcugccauuuaaugauggugucuauuucgcaucgaccgagaagucaaacauuauacgaggcuggaucuuugggacuacacuugacagcaaaacccagagucuguugauugugaauaacgccacgaauguaguuaucaaggugugugaguuccaguuuugcaacgaucccuuccucggagucuacuaucauaaaaauaacaaguccuggauggagucugaguuccguguguacagcuccgcgaauaacuguacuuuugaauaugugucacaaccuuuccugauggaccuggaaggcaagcaggguaauuuuaaaaaccucagagaguucgucuuuaagaacauugauggguacuucaaaaucuacaguaagcacaccccaauaaauuuaguuagggaccugccccagggauuuagcgcucuugagccuuugguggaucugccaaucggcauuaacaucacacgguuccagacucuacucgcccugcaucgcucuuaucuuaccccgggcgacuccucaagcggguggacagcaggagccgcugcauacuauguagguuaccugcaacccagaaccuuuuugcucaaauauaaugaaaacggcacgauuacugaugccguggacugcgcucuggauccuuuaagugagacaaaguguacccugaagucuuucacugucgaaaaagggaucuaccagacauccaauuuuagggugcagccaaccgagagcauaguucgguuccccaacauuacgaaucucugcccuuuuggagagguguucaacgccacccgcuucgcgucggucuaugcaugggaccgaaagagaaucucuaauuguguggccuacuacuccguacuuuauaacucagcuaguuuuagcacauucaaaugcuacggcguuuccccaacuaagcugaaugacuuguguuuuaccaacguguaugccgauucuuucgucauuaggggugacgaagugcggcagaucgcacccgggcaaacaggaaaaaucgcugauuacaauuauaagcuaccggacgauuuuacuggcugcgucauugccuggaacagcaauaaccuggacucaaaagugggcgggaacuacaauuaucucuaccgucuguuccgcaagaguaaccuuaagccuuuugagagagauauauccaccgaaaucuaccaggcgggaagcacacccuguaaugguguugagggcuucaacugcuauuuuccacugcagucuuacggguuccaaccuaccaauggagugggcuaucagcccuacaggguagucguguugucauuugaacuccugcacgccccagcaacuguuugcggucccaaaaagaguacgaacuuagugaaaaauaagugugucaacuucaauuuuaacgggcugacaggcaccggagugcuaacugagagcaauaaaaaguuccucccuuuccagcaguuuggccgggacauugcugauaccacagacgccguacgagauccacaaacccuggagauccuugacauaacuccgugcuccuucgggggagugucuguuauuacacccgguacgaacaccucgaaucaggucgcuguguuguaucaggacgugaacuguacugaagucccuguugccauccacgcagaucagcugacaccaaccuggcgcguguacagcacaggcuccaauguguuucaaacuagagccgggugccucaucggagcugagcauguaaacaacucauaugaaugugacauucccaucggcgcggguauuugcgcaaguuaccagacccagacuaauucuccuaggcgggcccgcagcgucgcuucccagucaauaaucgccuacaccaugagccugggggcagagaacucuguggccuauuccaauaacaguauugcuaucccaacaaauuucacuaucagcguuaccacagaaauucuucccgugucuaugacuaagaccuccgucgauuguacgauguacauaugcggcgacucaacagaguguaguaaccuguugcuccaauauggaucuuuuugcacccagcugaauagagccuuaacuggcaucgcaguggagcaggauaaaaacacacaggaaguuuucgcgcaagugaagcagauuuacaaaaccccgccuaucaaggacuuugggggauucaauuuuucgcagauucugccagaucccuccaaaccuucuaagaggagcuucaucgaggaccuacucuuuaacaagguaacucuggcugaugccgguuucauaaaacaauauggcgacugucuuggggauaucgcagcccgugacuugauuugcgcucagaaguucaauggacugaccguccugcccccacucuuaacagaugaaaugaucgcccaguacacgucagcacugcuugcuggcaccauuacgagugguuggacauuuggggccggcgcggccuugcagaucccuuucgcuaugcaaauggcauaucgguuuaacggaauaggcgugacccagaaugugcucuacgagaaccagaaacugauugccaaucaguucaacuccgcuaucgggaagauucaagacucucuaagcuccacagccucagcacugggaaaacuccaggacgucguuaaccagaaugcgcaggcccugaacacucuugugaagcaauugagcaguaauuuuggcgcuaucucuuccguacugaacgauauauuaagccgacucgacaagguggaagccgagguccagaucgauagacugauuaccgguaggcuucagucgcugcaaacguacgugacacagcaguugauccgcgcagcugagauucgggccucagcaaaucucgccgcuaccaaaaugucugaaugcguucuggggcagaguaagagaguggacuucuguggaaaaggcuaucaccuaauguccuuuccccaaagcgcgccacauggugucguguuccugcacguuacuuacgugccggcccaggagaagaacuuuaccacagcuccugcaaucugccacgauggcaaagcccauuuccccagggaaggggucuuuguaucuaauggaacucacugguucgugacccagcgcaacuuuuaugagccacagauaauuacaacggacaauaccuucguuagcggcaacugugauguggucaucgggaucgugaauaacacuguauacgacccccuccaaccugagcuggauuccuucaaggaagaacuugacaaauauuuuaagaaucauacaucaccagauguggacuugggagauauuaguggcaucaacgccagcgucguuaauauucagaaggaaauagaccgacugaacgagguggcuaaaaauuuaaacgaaucucucaucgaccugcaggagcuugguaaguacgagcaguauauuaaauggcccugguacaucuggcugggguucauugcaggacuaaucgccauagugauggucaccaucaugcucugcuguaugacuuccugcuguucaugccugaagggcuguugcaguugugguagcugcugcaaauuugaugaagacgauuccgagccuguguugaagggcguuaagcugcacuacacauga

SEQ ID NO: 11973 - RNA, 3822 nt, Artificial Sequence
  SARS-CoV-2/France/IDF0372/2020__EPI_ISL_406596 spike protein CDS human (1-1273)
auguucguguuucugguccuccuuccccugguuagcucccagugcgugaacuugaccacaagaacucaauuaccuccagccuacacuaauucuuucaccaggggcguauauuacccggacaagguguuucggucaaguguccugcacagcacacaggaucuauuccuccccuuuuucuccaacgugacuugguuucaugcuauccacguuucugggaccaauggaacaaaacgcuucgacaacccugugcugccauuuaaugauggugucuauuucgcaucgaccgagaagucaaacauuauacgaggcuggaucuuugggacuacacuugacagcaaaacccagagucuguugauugugaauaacgccacgaauguaguuaucaaggugugugaguuccaguuuugcaacgaucccuuccucggagucuacuaucauaaaaauaacaaguccuggauggagucugaguuccguguguacagcuccgcgaauaacuguacuuuugaauaugugucacaaccuuuccugauggaccuggaaggcaagcaggguaauuuuaaaaaccucagagaguucgucuuuaagaacauugauggguacuucaaaaucuacaguaagcacaccccaauaaauuuaguuagggaccugccccagggauuuagcgcucuugagccuuugguggaucugccaaucggcauuaacaucacacgguuccagacucuacucgcccugcaucgcucuuaucuuaccccgggcgacuccucaagcggguggacagcaggagccgcugcauacuauguagguuaccugcaacccagaaccuuuuugcucaaauauaaugaaaacggcacgauuacugaugccguggacugcgcucuggauccuuuaagugagacaaaguguacccugaagucuuucacugucgaaaaagggaucuaccagacauccaauuuuagggugcagccaaccgagagcauaguucgguuccccaacauuacgaaucucugcccuuuuggagagguguucaacgccacccgcuucgcgucggucuaugcauggaaucgaaagagaaucucuaacuguguggccgacuacuccuuucuuuacaauucagcuaguuucagcacauuuaaaugcuauggcguauccccaacuaagcugaacgacuuguguuucaccaauguuuacgccgauucuuuugugauuaggggugacgaaguccggcagaucgcacccgggcaaacaggaaaaaucgcugauuauaacuacaagcuaccggacgauuucacuggcugcgugauugccuggaauagcaacaaccuggacucaaaagucggcgggaauuauaacuaccucuaucgucuguuucgcaagaguaaucuuaagccuuucgagagagauauauccaccgaaaucuaccaggcgggaagcacacccuguaacgguguggagggcuuuaauugcuacuucccacugcagucuuauggguuucaaccuaccaacggaguuggcuaccagcccuauagggugguagucuugucauucgaacuccugcacgccccagcaacugugugcggucccaaaaagaguacgaauuuaguuaaaaacaagugugugaauuuuaacuucaaugggcugacaggcaccggaguccuaacugagagcaacaaaaaguuccucccuuuucagcaguucggccgggacauugcugauaccacagacgccgugcgagauccacaaacccuggagauccuugacauaacuccgugcuccuuugggggaguaucugugauuacacccgguacgaauaccucgaaccagguugcugucuuguaccaggacgugaauuguacugaagugccugucgccauccacgcagaucagcugacaccaaccuggcgcguuuauagcacaggcuccaacguguuccaaacuagagccgggugccucaucggagcugagcaugugaacaauucauacgaaugugacauucccaucggcgcggguauuugcgcaaguuaucagacccagacgaacucuccuaggcgggcccgcagcguagcuucccagucaauaaucgccuacaccaugagccugggggcagaaaauucugucgccuacuccaacaauaguauugcuaucccaacaaacuuuacuaucagcgugaccacagaaauucuucccguuucuaugacuaagaccuccguggauuguacgauguauauaugcggcgacucaacagaguguaguaaucuguugcuccaauacggcagcuucugcacccagcugaacagagccuuaacuggaaucgcagucgagcaggauaaaaauacacaggaaguguuugcgcaaguuaagcagauuuauaaaaccccgccuaucaaggacuucgggggauuuaacuucucgcagauucugccagaucccuccaaaccuucuaagaggagcuuuaucgaggaccuacucuucaauaaggugacucuggcugaugccgguuucauaaaacaauacggcgacugucuuggggauaucgcagcccgugacuugauuugcgcucagaaguuuaacggacugaccguacugcccccacucuuaacagaugaaaugaucgcccaguauacgucagcacugcuugcuggcaccauuacgagugguuggacauucggggccggcgcggccuugcagaucccuuuugcuaugcaaauggcauaccgguucaauggaauaggcgucacccagaacgugcucuaugagaaucagaaacugauugccaaccaguuuaacuccgcuaucgggaagauucaagacucucuaagcuccacagccucagcacugggaaaacuccaggacguggucaaucagaacgcgcaggcccugaauacucuuguuaagcaauugagcaguaacuucggcgcuaucucuuccgugcugaaugauauauuaagccgacucgacaagguagaagccgaggugcagaucgauagacugauuaccgguaggcuucagucgcugcaaacguacgucacacagcaguugauccgcgcagcugagauucgggccucagcaaaccucgccgcuaccaaaaugucugaaugcgugcuggggcagaguaagagaguugacuuuuguggaaaaggcuaccaccuaauguccuucccccaaagcgcgccacaugguguggucuuucugcacgugacuuauguuccggcccaggagaagaauuucaccacagcuccugcaaucugccacgauggcaaagcccauuuucccagggaagggguguucgucucuaacggaacucacugguuuguaacccagcgcaauuucuacgagccacagauaauuacaacggacaacaccuucgugagcggcaauugugauguugugaucgggaucgucaacaauacuguguaugacccccuccaaccugagcuggauuccuuuaaggaggaacuugacaaauacuucaagaaccauacaucaccagauguagacuugggagauauuaguggcaucaaugccagcguggucaacauucagaaggaaauagaccgacugaaugagguugcuaaaaacuuaaacgaaucucucaucgaccugcaggagcuugguaaguaugagcaguacauuaaauggcccugguauaucuggcugggguuuauugcaggacuaaucgccauagugauggugaccaucaugcucugcuguaugacuuccugcuguucaugccugaagggcuguugcaguugugguagcugcugcaaauucgaugaagacgauuccgagccugucuugaagggcgugaagcugcacuacacauga

SEQ ID NO: 11974 - RNA, 3822 nt, Artificial Sequence
  SARS-CoV-2/Australia/VIC01/2020__EPI_ISL_406844 spike protein CDS human (1-1273)
auguucguguuucugguccuccuuccccugguuagcucccagugcgugaacuugaccacaagaacucaauuaccuccagccuacaccaauucuuucacgaggggcguauauuacccggacaagguguuucggucaaguguccugcacagcacacaggaucuauuccuccccuuuuucuccaacgugacuugguuucaugcuauccacguuucugggaccaauggaacaaaacgcuucgacaacccugugcugccauuuaaugauggugucuauuucgcaucgaccgagaagucaaacauuauacgaggcuggaucuuugggacuacacuugacagcaaaacccagagucuguugauugugaauaacgccacgaauguaguuaucaaggugugugaguuccaguuuugcaacgaucccuuccucggagucuacuaucauaaaaauaacaaguccuggauggagucugaguuccguguguacagcuccgcgaauaacuguacuuuugaauaugugucacaaccuuuccugauggaccuggaaggcaagcaggguaauuuuaaaaaccucagagaguucgucuuuaagaacauugauggguacuucaaaaucuacaguaagcacaccccaauaaauuuaguuagggaccugccccagggauuuagcgcucuugagccuuugguggaucugccaaucggcauuaacaucacacgguuccagacucuacucgcccugcaucgcagauaucuuaccccgggcgacucuuccucaggguggacagcaggagccgcugcauacuauguagguuaccugcaacccaggaccuuuuugcucaaauauaaugaaaacggcacgauuacugaugccguggacugcgcucuggauccuuuaagcgagacaaaguguacccugaagaguuucacugucgaaaaagggaucuaccagacaucuaauuuucgggugcagccaaccgaguccauaguucgcuuccccaacauuacgaaucucugcccuuuuggagagguguucaacgccacccgauucgcgagcgucuaugcauggaauagaaagaggaucucgaacuguguggccgacuacucuguacuuuacaauuccgcuucauuuaguacauucaaaugcuauggcguuagcccaacuaagcugaacgacuuguguuuuaccaauguguacgccgauuccuucgucauucggggugacgaagugcgucagaucgcacccgggcaaacaggaaaaaucgcugauuauaacuacaagcuaccggacgauuuuacuggcugcgucauugccuggaacucuaauaaccuggacagcaaagugggcgggaauuauaacuaccucuaucgccuguucagaaagucaaaucuuaagccuuuugagagggauauaaguaccgaaaucuaccaggcgggauccacacccuguaacgguguugagggcuucaauugcuacuuuccacugcagagcuauggguuccaaccuaccaacggagugggcuaccagcccuaucggguagucguguugucuuuugaacuccugcacgccccagcaacuguuugcggucccaaaaagucaacgaauuuagugaaaaacaagugugucaauuucaacuuuaaugggcugacaggcaccggagugcuaacugagaguaacaaaaaguuccucccuuuccagcaguuuggccgagacauugcugauaccacagacgccguacgcgauccacaaacccuggagauccuugacauaacuccgugcagcuucgggggaguguccguuauuacacccgguacgaauaccucuaaccaggucgcuguguuguaccaggacgugaauuguacugaagucccuguugccauccacgcagaucagcugacaccaaccuggagaguguauucgacaggcagcaacguguuucaaacuagggccgggugccucaucggagcugagcauguaaacaauuccuacgaaugugacauucccaucggcgcggguauuugcgcaucauaucagacccagacgaacaguccucggcgcgccagaucugucgcuagccaguccauaaucgccuacaccaugucacugggggcagagaauagcguggccuacucuaacaauuccauugcuaucccaacaaacuucacuaucaguguuaccacagaaauucuucccgugagcaugacuaagaccucugucgauuguacgauguauauaugcggcgacuccacagaguguucaaaucuguugcuccaauacggaaguuuuugcacccagcugaacagggccuuaacuggcaucgcaguggagcaggauaaaaauacacaggaaguuuucgcgcaagugaagcagauuuauaaaaccccgccuaucaaggacuuugggggauucaacuuuagccagauucugccagaucccucgaaaccuuccaagcguucuuucaucgaggaccuacucuuuaauaagguaacucuggcugaugccgguuucauaaaacaauacggcgacugucuuggggauaucgcagcccgggacuugauuugcgcucagaaguucaacggacugaccguccucccuccacuguuaacagaugaaaugaucgcccaguauacgagcgcacugcuugcuggcaccauuacuucagguuggacauuuggggccggcgcggccuugcagaucccuuucgcuaugcaaauggcauaccgauuuaauggaauaggcgugacccagaacgugcucuaugagaaucagaaacugauugccaaccaguucaacagugcuaucgggaagauucaagacucccuaucuagcacagccuccgcacugggaaaacuccaggacgucguuaaucagaacgcgcaggcccugaauacucuugugaagcaauugucaagcaacuuuggcgcuaucaguucuguacugaaugauauauuauccagacucgacaagguggaagccgagguccagaucgauaggcugauuaccggucgccuucagagccugcaaacguacgugacacagcaguugauccgggcagcugagauuagagccucggcaaaccucgccgcuaccaaaaugucagaaugcguucuggggcagucuaagaggguggacuucuguggaaaaggcuaccaccuaaugaguuuuccccaauccgcgccacauggugucguguuccugcacguuacuuaugugccggcccaggagaagaauuuuaccacagcacccgcuaucugccacgauggcaaagcccauuucccccgcgaaggggucuuuguaagcaacggaacucacugguucgugacccagcgaaauuuuuacgagccacagauaauuacaacggacaacaccuucguuucuggcaauugugauguggucaucgggaucgugaacaauacuguauaugacccccuccaaccugagcuggauagcuucaaggaagaacuugacaaauacuuuaagaaccauacauccccagauguggacuugggagauauuucaggcaucaaugccagugucguuaacauucagaaggaaauagaccggcugaaugagguggcuaaaaacuuaaacgaaagccucaucgaccugcaggagcuugguaaguaugagcaguacauuaaauggcccugguauaucuggcugggguucauugcaggacuaaucgccauagugauggucaccaucaugcucugcuguaugacuucuugcuguuccugccugaagggcuguugcucaugugguaguugcugcaaauuugaugaagacgauagcgagccuguguugaagggcguuaagcugcacuacacauga

SEQ ID NO: 11975 - RNA, 3822 nt, Artificial Sequence
  SARS-CoV-2/Germany/BavPat1/2020__EPI_ISL_406862 spike protein CDS human (1-1273)
auguucguguuucugguccuccuuccccugguuagcucccagugcgugaacuugaccacaagaacucaauuaccuccagccuacacuaauucuuucaccaggggcguauauuacccggacaagguguuucggucaaguguccugcacagcacacaggaucuauuccuccccuuuuucuccaacgugacuugguuucaugcuauccacguuucugggaccaauggaacaaaacgcuucgacaacccugugcugccauuuaaugauggugucuauuucgcaucgaccgagaagucaaacauuauacgaggcuggaucuuugggacuacacuugacagcaaaacccagagucuguugauugugaauaacgccacgaauguaguuaucaaggugugugaguuccaguuuugcaacgaucccuuccucggagucuacuaucauaaaaauaacaaguccuggauggagucugaguuccguguguacagcuccgcgaauaacuguacuuuugaguaugugucacaaccuuuccugauggaccuggaaggcaagcaggguaauuuuaaaaaccucagagaguucgucuuuaagaacauugauggguacuucaaaaucuacaguaagcacaccccaauaaauuuaguuagggaccugccccagggauuuagcgcucuugagccuuugguggaucugccaaucggcauuaacaucacacgguuccagacucuacucgcccugcaucgcucuuaucuuaccccgggcgacuccucaagcggguggacagcaggagccgcugcauacuauguagguuaccugcaacccagaaccuuuuugcucaaauauaaugaaaacggcacgauuacugaugccguggacugcgcucuggauccuuuaagugagacaaaguguacccugaagucuuucacugucgaaaaagggaucuaccagacauccaauuuuagggugcagccaaccgagagcauaguucgguuccccaacauuacgaaucucugcccuuuuggagagguguucaacgccacccgcuucgcgucggucuaugcauggaaucgaaagagaaucucuaacuguguggccgacuacuccguacuuuacaauucagcuaguuuuagcacauucaaaugcuauggcguuuccccaacuaagcugaacgacuuguguuuuaccaauguguacgccgauucuuucgucauuaggggugacgaagugcggcagaucgcacccgggcaaacaggaaaaaucgcugauuauaacuacaagcuaccggacgauuuuacuggcugcgucauugccuggaauagcaacaaccuggacucaaaagugggcgggaauuauaacuaccucuaucgucuguuccgcaagaguaaucuuaagccuuuugagagagauauauccaccgaaaucuaccaggcgggaagcacacccuguaacgguguugagggcuucaauugcuacuuuccacugcagucuuauggguuccaaccuaccaacggagugggcuaccagcccuauaggguagucguguugucauuugaacuccugcacgccccagcaacuguuugcggucccaaaaagaguacgaauuuagugaaaaacaagugugucaauuucaacuuuaaugggcugacaggcaccggagugcuaacugagagcaacaaaaaguuccucccuuuccagcaguuuggccgggacauugcugauaccacagacgccguacgagauccacaaacccuggagauccuugacauaacuccgugcuccuucgggggagugucuguuauuacacccgguacgaauaccucgaaccaggucgcuguguuguaccagggcgugaauuguacugaagucccuguugccauccacgcagaccagcugacaccaaccuggcgcguguauagcacaggguccaacguguuucaaacuagagccggaugccucaucggcgcugagcauguaaacaauucauacgaaugugauauucccaucggugcggggauuugcgcaaguuaucagacccagacgaacucuccuaggcgggcccgcagcgucgcuucccagucaauaaucgccuacaccaugagccugggcgcagaaaauucuguggccuacuccaacaauaguauugcuaucccaacaaacuucacuaucagcguuaccacagaaauucuucccgugucuaugacuaagaccuccgucgacuguacgauguauauaugcggagauucaacagaguguaguaaucuguugcuccaauacggcagcuuuugcacccagcugaacagagccuuaacugggaucgcaguggagcaggacaaaaauacacaggaaguuuucgcgcaagugaagcagauuuauaaaaccccgccuaucaaggauuuuggagguuucaacuuuucgcagauucugccagaccccuccaaaccuucuaagaggagcuucaucgaggaucuacucuuuaauaagguaacucuggcugacgccggcuucauaaaacaauacggggauugucuuggagacaucgcagcccgugauuugauuugcgcucagaaguucaacggccugaccguccugcccccacucuuaacagacgaaaugaucgcccaguauacgucagcacugcuugcugguaccauuacgaguggguggacauuuggcgccggagcggccuugcagaucccuuucgcuaugcaaauggcauaccgguuuaauggcauaggggugacccagaacgugcucuaugagaaucagaaacugauugccaaccaguucaacuccgcuaucggaaagauucaagauucucuaagcuccacagccucagcacugggcaaacuccaggacgucguuaaucagaacgcgcaggcccugaauacucuugugaagcaauugagcaguaacuuuggugcuaucucuuccguacugaaugacauauuaagccgacucgauaagguggaagccgagguccagaucgacagacugauuaccgggaggcuucagucgcugcaaacguacgugacacagcaguugauccgcgcagcugagauucgggccucagcaaaccucgccgcuaccaaaaugucugaaugcguucugggacagaguaagagaguggauuucuguggcaaagguuaccaccuaauguccuuuccccaaagcgcgccacauggcgucguguuccugcacguuacuuaugugccggcccaggagaagaauuuuaccacagcuccugcaaucugccacgacgggaaagcccauuuccccagggaaggagucuuuguaucuaacggcacucacugguucgugacccagcgcaauuuuuacgagccacagauaauuacaacggauaacaccuucguuagcgggaauugugacguggucaucggaaucgugaacaauacuguauaugauccccuccaaccugagcuggacuccuucaaggaagaacuugauaaauacuuuaagaaccauacaucaccagacguggauuugggcgacauuagugguaucaaugccagcgucguuaacauucagaaggaaauagaucgacugaaugagguggcuaaaaacuuaaacgaaucucucaucgaccugcaggagcuugggaaguaugagcaguacauuaaauggcccugguauaucuggcugggauucauugcaggccuaaucgccauagugauggucaccaucaugcucugcuguaugacuuccugcuguucaugccugaaggguuguugcaguuguggcagcugcugcaaauuugacgaagaugacuccgagccuguguugaaggggguuaagcugcacuacacauga

SEQ ID NO: 11976 - RNA, 3822 nt, Artificial Sequence
  SARS-CoV-2/Wuhan/HBCDC-HB-02/2020__EPI_ISL_412978 spike protein CDS human (1-1273)
auguucguguuucugguccuccuuccccugguuagcucccagugcgugaacuugaccacaagaacucaauuaccuccagccuacacuaauucuuucaccaggggcguauauuacccggacaagguguuucggucaaguguccugcacagcacacaggaucuauuccuccccuuuuucuccaacgugacuugguuucaugcuauccacguuucugggaccaauggaacaaaacgcuucgacaacccugugcugccauuuaaugauggugucuauuucgcaucgaccgagaagucaaacauuauacgaggcuggaucuuugggacuacacuugacagcaaaacccagagucuguugauugugaauaacgccacgaauguaguuaucaaggugugugaguuccaguuuugcaacgaucccuuccucggagucuacuaucauaaaaauaacaaguccuggauggagucugaguuccguguguacagcuccgcgaauaacuguacuuuugaguaugugucacaaccuuuccugauggaccuggaaggcaagcaggguaauuuuaaaaaccucagagaguucgucuuuaagaacauugauggguacuucaaaaucuacaguaagcacaccccaauaaauuuaguuagggaccugccccagggauuuagcgcucuugagccuuugguggaucugccaaucggcauuaacaucacacgguuccagacucuacucgcccugcaucgcucuuaucuuaccccgggcgacuccucaagcggguggacagcaggagccgcugcauacuauguagguuaccugcaacccagaaccuuuuugcucaaauauaaugaaaacggcacgauuacugaugccguggacugcgcucuggauccuuuaagugagacaaaguguacccugaagucuuucacugucgaaaaagggaucuaccagacauccaauuuuagggugcagccaaccgagagcauaguucgguuccccaacauuacgaaucucugcccuuuuggagagguguucaacgccacccgcuucgcgucggucuaugcauggaaucgaaagagaaucucuaacuguguggccgacuacuccguacuuuacaauucagcuaguuuuagcacauucaaaugcuauggcguuuccccaacuaagcugaacgacuuguguuuuaccaauguguacgccgauucuuucgucauuaggggugacgaagugcggcagaucgcacccgggcaaacaggaaaaaucgcugauuauaacuacaagcuaccggacgauuuuacuggcugcgucauugccuggaauagcaacaaccuggacucaaaagugggcgggaauuauaacuaccucuaucgucuguuccgcaagaguaaucuuaagccuuuugagagagauauauccaccgaaaucuaccaggcgggaagcacacccuguaacgguguugagggcuucaauugcuacuuuccacugcagucuuauggguuccaaccuaccaacggagugggcuaccagcccuauaggguagucguguugucauuugaacuccugcacgccccagcaacuguuugcggucccaaaaagaguacgaauuuagugaaaaacaagugugucaauuucaacuuuaaugggcugacaggcaccggagugcuaacugagagcaacaaaaaguuccucccuuuccagcaguuuggccgggacauugcugauaccacagacgccguacgagauccacaaacccuggagauccuugacauaacuccgugcuccuucgggggagugucuguuauuacacccgguacgaauaccucgaaccaggucgcuguguuguaccaggacgugaauuguacugaagucccuguugccauccacgcagaucagcugacaccaaccuggcgcguguauagcacaggcuccaacguguuucaaacuagagccgggugccucaucggagcugagcauguaaacaauucauacgaaugugacauucccaucggcgcggguauuugcgcaaguuaucagacccagacgaacucuccuaggcgggcccgcagcgucgcuucccagucaauaaucgccuacaccaugagccugggggcagaaaauucuguggccuacuccaacaauaguauugcuaucccaacaaacuucacuaucagcguuaccacagaaauucuucccgugucuaugacuaagaccuccgucgauuguacgauguauauaugcggcgacucaacagaguguaguaauuuucuguugcaauacggcagcuucugcacccagcucaacagagcccugacuggaaucgcaguggagcaggauaaaaauacacaggaaguuuuugcgcaagugaagcagauuuauaaaaccccgccuaucaaggacuucgggggauuuaacuucucgcagauuuuaccagaucccuccaaaccuucuaagaggagcuuuaucgaggaccugcuauucaauaagguaacucucgcugaugccgguuucauaaaacaauacggcgacugucugggggauaucgcagcccgugaccuuauuugcgcucagaaguuuaacggauugaccguccugcccccacuccugacagaugaaaugaucgcccaguauacgucagcauuacuggcuggcaccauuacgagugguuggacauucggggccggcgcggcccuucagaucccuuuugcuaugcaaauggcauaccgguucaauggaauaggcgugacccagaacguguuguaugagaaucagaaacucauugccaaccaguuuaacuccgcuaucgggaagauucaagacucucugagcuccacagccucagcacuaggaaaacugcaggacgucguuaaucagaacgcgcaggcccucaauacucuggugaagcaacuuagcaguaacuucggcgcuaucucuuccguauugaaugauauacugagccgauuagacaagguggaagccgagguccagaucgauagacucauuaccgguaggcugcagucgcuucaaacguacgugacacagcagcugauccgcgcagcugagauucgggccucagcaaacuuggccgcuaccaaaaugucugaaugcguucucgggcagaguaagagaguggacuuuuguggaaaaggcuaccaccugauguccuucccccaaagcgcgccacauggugucguguuucuacacguuacuuaugugccggcccaggagaagaauuucaccacagcuccugcaaucugccacgauggcaaagcccauuuucccagggaaggggucuucguaucuaacggaacucacugguuugugacccagcgcaauuucuacgagccacagauaauuacaacggacaacaccuucguuagcggcaauugugauguggucaucgggaucgugaacaauacuguauaugacccccugcaaccugagcucgauuccuuuaaggaagaacuggacaaauacuucaagaaccauacaucaccagauguggaccuuggagauauuaguggcaucaaugccagcgucguuaacauucagaaggaaauagaccgauugaaugagguggcuaaaaaccugaacgaaucuuuaaucgaccuccaggagcuggguaaguaugagcaguacauuaaauggcccugguauaucuggcuuggguuuauugcaggacugaucgccauagugauggucaccaucaugcuaugcuguaugacuuccugcuguucaugccucaagggcuguugcaguugugguagcugcugcaaauucgaugaagacgauuccgagccugugcugaagggcguuaaguugcacuacacauga

SEQ ID NO: 11977 - RNA, 3822 nt, Artificial Sequence
  SARS-CoV-2/Australia/QLD02/2020__EPI_ISL_407896 spike protein CDS human (1-1273)
auguucguguuucugguccuccuuccccugguuagcucccagugcgugaacuugaccacaagaacucaauuaccuccagccuacacuaauucuuucaccaggggcguauauuacccggacaagguguuucggucaaguguccugcacagcacacaggaucuauuccuccccuuuuucuccaacgugacuugguuucaugcuauccacguuucugggaccaauggaacaaaacgcuucgacaacccugugcugccauuuaaugauggugucuauuucgcaucgaccgagaagucaaacauuauacgaggcuggaucuuugggacuacacuugacagcaaaacccagagucuguugauugugaauaacgccacgaauguaguuaucaaggugugugaguuccaguuuugcaacgaucccuuccucggagucuacuaucauaaaaauaacaaguccuggauggagucugaguuccguguguacagcuccgcgaauaacuguacuuuugaauaugugucacaaccuuuccugauggaccuggaaggcaagcaggguaauuuuaaaaaccucagagaguucgucuuuaagaacauugauggguacuucaaaaucuacaguaagcacaccccaauaaauuuaguuagggaccugccccagggauuuagcgcucuugagccuuugguggaucugccaaucggcauuaacaucacacgguuccagacucuacucgcccugcaucgcucuuaucuuaccccgggcgacuccucaagcggguggacagcaggagccgcugcauacuauguagguuaccugcaacccagaaccuuuuugcucaaauauaaugaaaacggcacgauuacugaugccguggacugcgcucuggauccuuuaagugagacaaaguguacccugaagucuuucacugucgaaaaagggaucuaccagacauccaauuuuagggugcagccaaccgagagcauaguucgguuccccaacauuacgaaucucugcccuuuuggagagguguucaacgccacccgcuucgcgucggucuaugcauggaaucgaaagagaaucucuaacuguguggccgacuacuccguacuuuacaauucagcuaguuuuagcacauucaaaugcuauggcguuuccccaacuaagcugaacgacuuguguuuuaccaauguguacgccgauucuuucgucauuaggggugacgaagugcggcagaucgcacccgggcaaacaggaaaaaucgcugauuauaacuacaagcuaccggacgauuuuacuggcugcgucauugccuggaauagcaacaaccuggacucaaaagugggcgggaauuauaacuaccucuaucgucuguuccgcaagaguaaucuuaagccuuuugagagagauauauccaccgaaaucuaccaggcgggaagcacacccuguaacgguguugagggcuucaauugcuacuuuccacugcagucuuauggguuccaaccuaccaacggagugggcuaccagcccuauaggguagucguguugucauuugaacuccugcacgccccagcaacuguuugcggucccaaaaagaguacgaauuuagugaaaaacaagugugucaauuucaacuuuaaugggcugacaggcaccggagugcuaacugagagcaacaaaaaguuccucccuuuccagcaguuuggccgggacauugcugauaccacagacgccguacgagauccacaaacccuggagauccuugacauaacuccgugcuccuucgggggagugucuguuauuacacccgguacgaauaccucgaaccaggucgcuguguuguaccaggacgugaauuguacugaagucccuguugccauccacgcagaucagcugacaccaaccuggcgcguguauagcacaggcuccaacguguuucaaacuagagccgggugccucaucggagcugagcauguaaacaauucauacgaaugugacauucccaucggcgcggguauuugcgcaaguuaucagacccagacgaacucuccuaggcgggcccgcagcgucgcuucccagucaauaaucgccuacaccaugagccugggggcagaaaauucuguggccuacuccaacaauaguauugcuaucccaacaaacuucacuaucagcguuaccacagaaauucuucccgugucuaugacuaagaccuccgucgauuguacgauguauauaugcggcgacucaacagaguguaguaaucuguugcuccaauacggcagcuuuugcacccagcugaacagagccuuaacuggaaucgcaguggagcaggauaaaaauacacaggaaguuuucgcgcaagugaagcagauuuauaaaaccccgccuaucaaggacuuugggggauucaacuuuucgcagauucugccagaucccuccaaaccuucuaagaggagcuucaucgaggaccuacucuuuaauaagguaacucuggcugaugccgguuucauaaaacaauacggcgacugucuuggggauaucgcagcccgugacuugauuugcgcucagaaguucaacggacugaccguccugcccccacucuuaacagaugaaaugaucgcccaguauacgucagcacugcuugcuggcaccauuacgagugguuggacauuuggggccggcgcggccuugcagaucccuuucgcuaugcaaauggcauaccgguuuaauggaauaggcgugacccagaacgugcucuaugagaaucagaaacugauugccaaccaguucaacuccgcuaucgggaagauucaagacucucuaagcuccacagccucagcacugggaaaacuccaggacgucguuaaucagaacgcgcaggcccugaauacucuugugaagcaauugagcaguaacuuuggcgcuaucucuuccguacugaaugauauauuaagccgacucgacaagguggaagccgagguccagaucgauagacugauuaccgguaggcuucagucgcugcaaacguacgugacacagcaguugauccgcgcagcugagauucgggccucagcaaaccucgccgcuaccaaaaugucugaaugcguucuggggcagaguaagagaguggacuucuguggaaaaggcuaccaccuaauguccuuuccccaaagcgcgccacauggugucguguuccugcacguuacuuaugugccggcccaggagaagaauuuuaccacagcuccugcaaucugccacgauggcaaagcccauuuccccagggaaggggucuuuguaucuaacggaacucacugguucgugacccagcgcaauuuuuacgagccacagauaauuacaacggacaacaccuucguuagcggcaauugugauguggucaucgggaucgugaacaauacuguauaugacccccuccaacuggagcuugauuccuucaaggaagaguuggacaaauacuuuaagaaccauacaucaccugauguggaccugggagauauuaguggcaucaaugccagcgucguuaacauucagaaggaaauagaccgauuaaaugagguggcuaaaaaccucaacgaaucucugaucgaccuucaggagcuggguaaguaugagcaguacauuaaauggccaugguauaucuggcuaggguucauugcaggacucaucgccauagugauggucaccaucaugcugugcuguaugacuuccugcuguucaugcuugaagggcuguugcaguugugguagcugcugcaaauuugaugaagacgauuccgagcccgugcugaagggcguuaaguuacacuacacauga

SEQ ID NO: 11978 - RNA, 3822 nt, Artificial Sequence
  SARS-CoV-2/India/1-31/2020__EPI_ISL_413523 spike protein CDS human (1-1273)
auguucguguuucugguccuccuuccccugguuagcucccagugcgugaacuugaccacaagaacucaauuaccuccagccuacacuaauucuuucaccaggggcguauauuacccggacaagguguuucggucaaguguccugcacagcacacaggaucuauuccuccccuuuuucuccaacgugacuugguuucaugcuauccacguuucugggaccaauggaacaaaacgcuucgacaacccugugcugccauuuaaugauggugucuauuucgcaucgaccgagaagucaaacauuauacgaggcuggaucuuugggacuacacuugacagcaaaacccagagucuguugauugugaauaacgccacgaauguaguuaucaaggugugugaguuccaguuuugcaacgaucccuuccucggagucuacuaucauaaaaauaacaaguccuggauggagucugaguuccguguguacagcuccgcgaauaacuguacuuuugaauaugugucacaaccuuuccugauggaccuggaaggcaagcaggguaauuuuaaaaaccucagagaguucgucuuuaagaacauugauggguacuucaaaaucuacaguaagcacaccccaauaaauuuaguuagggaccugccccagggauuuagcgcucuugagccuuugguggaucugccaaucggcauuaacaucacacgguuccagacucuacucgcccugcaucgcucuuaucuuaccccgggcgacuccucaagcggguggacagcaggagccgcugcauacuauguagguuaccugcaacccagaaccuuuuugcucaaauauaaugaaaacggcacgauuacugaugccguggacugcgcucuggauccuuuaagugagacaaaguguacccugaagucuuucacugucgaaaaagggaucuaccagacauccaauuuuagggugcagccaaccgagagcauaguucgguuccccaacauuacgaaucucugcccuuuuggagagguguucaacgccacccgcuucgcgucggucuaugcauggaaucgaaagagaaucucuaacuguguggccgacuacuccguacuuuacaauucagcuaguuuuagcacauucaaaugcuauggcguuuccccaacuaagcugaacgacuuguguuuuaccaauguguacgccgauucuuucgucauuaggggugacgaagugcggcagaucgcacccgggcaaacaggaaaaaucgcugauuauaacuacaagcuaccggacgauuuuacuggcugcgucauugccuggaauagcaacaaccuggacucaaaagugggcgggaauuauaacuaccucuaucgucuguuccgcaagaguaaucuuaagccuuuugagagagauauauccaccgaaaucuaccaggcgggaagcacacccuguaacgguguugagggcuucaauugcuacuuuccacugcagucuuauggguuccaaccuaccaacggagugggcuaccagcccuauaggguagucguguugucauuugaacuccugcacgccccagcaacuguuugcggucccaaaaagaguacgaauuuagugaaaaacaagugugucaauuucaacuuuaaugggcugacaggcaccggagugcuaacugagagcaacaaaaaguuccucccuuuccagcaguuuggccgggacauugcugauaccacagacgccguacgagauccacaaacccuggagauccuugacauaacuccgugcuccuucgggggagugucuguuauuacacccgguacgaauaccucgaaccaggucgcuguguuguaccaggacgugaauuguacugaagucccuguugccauccacgcagaucagcugacaccaaccuggcgcguguauagcacaggcuccaacguguuucaaacuagagccgggugccucaucggagcugagcauguaaacaauucauacgaaugugacauucccaucggcgcggguauuugcgcaaguuaucagacccagacgaacucuccuaggcgggcccgcagcgucgcuucccagucaauaaucgccuacaccaugagccugggggcagaaaauucuguggccuacuccaacaauaguauugcuaucccaacaaacuucacuaucagcguuaccacagaaauucuucccgugucuaugacuaagaccuccgucgauuguacgauguauauaugcggcgacucaacagaguguaguaaucuguugcuccaauacggcagcuuuugcacccagcugaacagagccuuaacuggaaucgcaguggagcaggauaaaaauacacaggaaguuuucgcgcaagugaagcagauuuauaaaaccccgccuaucaaggacuuugggggauucaacuuuucgcagauucugccagaucccuccaaaccuucuaagaggagcuucaucgaggaccuacucuuuaauaagguaacucuggcugaugccgguuucauaaaacaauacggcgacugucuuggggauaucgcagcccgugacuugauuugcgcucagaaguucaacggacugaccguccugcccccacucuuaacagaugaaaugaucgcccaguauacgucagcacugcuugcuggcaccauuacgagugguuggacauuuggggccggcgcggccuugcagaucccuuucgcuaugcaaauggcauaccgguuuaauggaauaggcgugacccagaacgugcucuaugagaaucagaaacugauugccaaccaguucaacuccgucaucgggaagauucaagacucucuaagcuccacagcuucagcccugggaaaacuccaggacguugugaaucagaacgcacaggcgcugaauacucuuguaaagcaauugagcaguaacuuuggcgccaucucuuccgugcugaaugauauauuaagccgacucgacaaggucgaagcugaggugcagaucgauagacugauuaccgguaggcuucagucgcugcaaacguacguuacacagcaguugauccgcgccgcagagauucgggcuucagccaaccucgcagccaccaaaaugucugaaugcgugcuggggcagaguaagagagucgacuucuguggaaaaggcuaccaccuaauguccuuuccccaaagcgcuccacauggugugguuuuccugcacgugacuuaugucccggcgcaggagaagaauuuuaccacagccccugcaaucugccacgauggcaaagcucauuuccccagggaagggguauuugugucuaacggaacucacugguucguuacccagcgcaauuuuuacgagccacagauaauuacaacggacaacaccuucgugagcggcaauugugaugucgugaucgggaucguaaacaauacuguguaugacccccuccaaccugagcuggauuccuucaaggaggaacuugacaaauacuuuaagaaccauacaucaccagaugucgacuugggagauauuaguggcaucaaugccagcguugugaacauucagaaggaaauagaccgacugaaugagguggccaaaaacuuaaacgaaucucucaucgaccugcaggagcuugguaaguaugagcaguacauuaaauggcccugguauaucuggcugggguucauugcuggacuaaucgcaauagucauggugaccaucaugcucugcuguaugacuuccugcuguucaugccugaagggcuguugcaguugugguagcugcugcaaauuugaugaagacgauuccgagccuguuuugaagggcguaaagcugcacuacacauga

SEQ ID NO: 11979 - RNA, 3822 nt, Artificial Sequence
  SARS-CoV-2/Guangdong/GD2020087-P0008/2020__EPI_ISL_413863 spike protein CDS human (1-1273)
auguucguguuucugguccuccuuccccugguuagcucccagugcgugaacuugaccacaagaacucaauuaccuccagccuacacuaauucuuucaccaggggcguauauuacccggacaagguguuucggucaaguguccugcacagcacacaggaucuauuccuccccuuuuucuccaacgugacuugguuucaugcuauccacguuucugggaccaauggaacaaaacgcuucgacaacccugugcugccauuuaaugauggugucuauuucgcaucgaccgagaagucaaacauuauacgaggcuggaucuuugggacuacacuugacagcaaaacccagagucuguugauugugaauaacgccacgaauguaguuaucaaggugugugaguuccaguuuugcaacgaucccuuccucggagucuacuaucauaaaaauaacaaguccuggauggaaucugaguuccguguguacagcuccgcgaauaacuguacuuuugaauaugugucacaaccuuuccugauggaccuggaaggcaagcaggguaauuuuaaaaaccucagagaguucgucuuuaagaacauugauggguacuucaaaaucuacaguaagcacaccccaauaaauuuaguuagggaccugccccagggauuuagcgcucuugagccuuugguggaucugccaaucggcauuaacaucacacgguuccagacucuacucgcccugcaucgcucuuaucuuaccccgggcgacuccucaagcggguggacagcaggagccgcugcauacuauguagguuaccugcaacccagaaccuuuuugcucaaauauaaugaaaacggcacgauuacugaugccguggacugcgcucuggauccuuuaagugagacaaaguguacccugaagucuuucacugucgaaaaagggaucuaccagacauccaauuuuagggugcagccaaccgagagcauaguucgguuccccaacauuacgaaucucugcccuuuuggagagguguucaacgccacccgcuucgcgucggucuaugcauggaaucgaaagagaaucucuaacuguguggccgacuacuccguacuuuacaauucagcuaguuuuagcacauucaaaugcuauggcguuuccccaacuaagcugaacgacuuguguuuuaccaauguguacgccgauucuuucgucauuaggggugacgaagugcgggagaucgcacccgggcagacaggaaaaaucgcugauuauaacuacaagcuaccggacgauuuuacuggcugcgucauugccuggaauagcaacaaccuggacucaaaagugggcgggaauuauaacuaccucuaucgucuguuccgcaagaguaaucuuaagccuuuugaaagagauauauccaccgagaucuaccaagcgggaagcacacccuguaacgguguugaaggcuucaauugcuacuuuccacugcagucuuauggguuccagccuaccaacggagugggcuaccaacccuauaggguagucguguugucauuugagcuccugcacgccccagcaacuguuugcggucccaaaaagaguacgaauuuagugaaaaacaagugugucaauuucaacuuuaaugggcugacaggcaccggagugcuaacugagagcaacaaaaaguuccucccuuuccagcaguuuggccgggacauugcugauaccacagacgccguacgagauccacagacccuggaaauccuugacauaacuccgugcuccuucgggggagugucuguuauuacacccgguacgaauaccucgaaccaagucgcuguguuguaccaggacgugaauuguacugaggucccuguugccauccacgcagaucagcugacaccaaccuggcgcguguauagcacaggcuccaacguguuucagacuagagccgggugccucaucggagcugaacauguaaacaauucauacgagugugacauucccaucggcgcggguauuugcgcaaguuaucaaacccagacgaacucuccuaggcgggcccgcagcgucgcuucccagucaauaaucgccuacaccaugagccugggggcagaaaauucuguggccuacuccaacaauaguauugcuaucccaacaaacuucacuaucagcguuaccacagagauucuucccgugucuaugacuaagaccuccgucgauuguacgauguauauaugcggcgacucaacagaguguaguaaucuguugcuccaguacggcagcuuuugcacccaacugaacagagccuuaacuggaaucgcaguggaacaggauaaaaauacacaggagguuuucgcacaggugaagcaaauuuauaaaaccccgccuaucaaggacuuugggggauucaacuuuucgcagauucugccagaucccuccaaaccuucuaagaggagcuucaucgaagaccuacucuuuaauaagguaacucuggcugaugccgguuucauaaaacaguacggcgacugucuuggggauaucgcagcccgugacuugauuugcgcucaaaaguucaacggacugaccguccugcccccacucuuaacagaugagaugaucgcccaguauacgucagcacugcuugcuggcaccauuacgagugguuggacauuuggggccggcgcggccuugcagaucccuuucgcuaugcagauggcauaccgguuuaauggaauaggcgugacccaaaacgugcucuaugaaaaucagaaacugauugccaaccaguucaacuccgcuaucgggaagauucaggacucucuaagcuccacagccucagcacugggaaaacuccaagacgucguuaaucagaacgcgcaggcccugaauacucuugugaagcaguugagcaguaacuuuggcgcuaucucuuccguacugaaugauauauuaagccgacucgacaagguggaggccgagguccaaaucgauagacugauuaccgguaggcuucagucgcugcagacguacgugacacaacaguugauccgcgcagcugaaauucgggccucagcaaaccucgccgcuaccaaaaugucugagugcguucuggggcagaguaagagaguggacuucuguggaaaaggcuaccaccuaauguccuuuccccagagcgcgccacauggugucguguuccugcacguuacuuaugugccggcccaagaaaagaauuuuaccacagcgccugcuaucugccacgauggcaaagcccauuuccccagggagggggucuuuguaucuaacggaacucacugguucgugacccagcgcaauuuuuacgagccacagauaauuacaacggacaacaccuucguuagcggcaauugugauguggucaucgggaucgugaacaauacuguauaugacccccuccagccugaacuggauuccuucaaggaggaacuugacaaauacuuuaagaaccauacaucaccagauguggacuugggagauauuaguggcaucaaugccagcgucguuaacauucaaaaggagauagaccgacugaaugaaguggcuaaaaacuuaaacgagucucucaucgaccugcaggagcuugguaaguaugaacaguacauuaaauggcccugguauaucuggcugggguucauugcaggacuaaucgccauagugauggucaccaucaugcucugcuguaugacuuccugcuguucaugccugaagggcuguugcaguugugguagcugcugcaaauuugaugaggacgauuccgaaccuguguugaagggcguuaagcugcacuacacauga

SEQ ID NO: 11980 - RNA, 3822 nt, Artificial Sequence
  SARS-CoV-2/Sweden/01/2020__EPI_ISL_411951 spike protein CDS human (1-1273)
auguucguguuucugguccuccuuccccugguuagcucccagugcgugaacuugaccacaagaacucaauuaccuccagccuacacuaauucuuucaccaggggcguauauuacccggacaagguguuucggucaaguguccugcacagcacacaggaucuauuccuccccuuuuucuccaacgugacuugguuucaugcuauccacguuucugggaccaauggaacaaaacgcuucgacaacccugugcugccauuuaaugauggugucuauuucgcaucgaccgagaagucaaacauuauacgaggcuggaucuuugggacuacacuugacagcaaaacccagagucuguugauugugaauaacgccacgaauguaguuaucaaggugugugaguuccaguuuugcaacgaucccuuccucggagucuacuaucauaaaaauaacaaguccuggauggagucugaguuccguguguacagcuccgcgaauaacuguacuuuugaauaugugucacaaccuuuccugauggaccuggaaggcaagcaggguaauuuuaaaaaccucagagaguucgucuuuaagaacauugauggguacuucaaaaucuacaguaagcacaccccaauaaauuuaguuagggaccugccccagggauuuagcgcucuugagccuuugguggaucugccaaucggcauuaacaucacacgguuccagacucuacucgcccugcaucgcucuuaucuuaccccgggcgacuccucaagcggguggacagcaggagccgcugcauacuauguagguuaccugcaacccagaaccuuuuugcucaaauauaaugaaaacggcacgauuacugaugccguggacugcgcucuggauccuuuaagugagacaaaguguacccugaagucuuucacugucgaaaaagggaucuaccagacauccaauuuuagggugcagccaaccgagagcauaguucgguuccccaacauuacgaaucucugcccuuuuggagagguguucaacgccacccgcuucgcgucggucuaugcauggaaucgaaagagaaucucuaacuguguggccgacuacuccguacuuuacaauucagcuaguuuuagcacauucaaaugcuauggcguuuccccaacuaagcugaacgacuuguguuuuaccaauguguacgccgauucuuucgucauuaggggugacgaagugcggcagaucgcacccgggcaaacaggaaaaaucgcugauuauaacuacaagcuaccggacgauuuuacuggcugcgucauugccuggaauagcaacaaccuggacucaaaagugggcgggaauuauaacuaccucuaucgucuguuccgcaagaguaaucuuaagccuuuugagagagauauauccaccgaaaucuaccaggcgggaagcacacccuguaacgguguugagggcuucaauugcuacuuuccacugcagucuuauggguuccaaccuaccaacggagugggcuaccagcccuauaggguagucguguugucauuugaacuccugcacgccccagcaacuguuugcggucccaaaaagaguacgaauuuagugaaaaacaagugugucaauuucaacuuuaaugggcugacaggcaccggagugcuaacugagagcaacaaaaaguuccucccuuuccagcaguuuggccgggacauugcugauaccacagacgccguacgagauccacaaacccuggagauccuugacauaacuccgugcuccuucgggggagugucuguuauuacacccgguacgaauaccucgaaccaggucgcuguguuguaccaggacgugaauuguacugaagucccuguugccauccacgcagaucagcugacaccaaccuggcgcguguauagcacaggcuccaacguguuucaaacuagagccgggugccucaucggagcugagcauguaaacaauucauacgaaugugacauucccaucggcgcggguauuugcgcaaguuaucagacccagacgaacucuccuaggcgggcccgcagcgucgcuucccagucaauaaucgccuacaccaugagccugggggcagaaaauucuguggccuacuccaacaauaguauugcuaucccaacaaacuucacuaucagcguuaccacagaaauucuucccgugucuaugacuaagaccuccgucgauuguacgauguauauaugcggcgacucaacagaguguaguaaucuguugcuccaauacggcagcuuuugcacccagcugaacagagccuuaacuggaaucgcaguggagcaggauaaaaauacacaggaaguuuucgcgcaagugaagcagauuuauaaaaccccgccuaucaaggacugugggggauuuaacuucucgcagauucugccagaucccuccaaaccuucuaagaggagcuuuaucgaggaccuacucuucaauaagguaacucuggcugaugccgguuuuauaaaacaauacggcgacugccuuggggauaucgcagcccgugacuugauuugcgcucagaaguucaacggacugaccguccugcccccacucuuaacagaugaaaugaucgcccaguauacgucagcacugcuugcuggcaccauuacgagugguuggacauucggggccggcgcggccuugcagaucccuuuugcuaugcaaauggcauaccgguucaauggaauaggcgugacccagaacgugcucuaugagaaucagaaacugauugccaaccaguuuaacuccgcuaucgggaagauucaagacucucuaagcuccacagccucagcacugggaaaacuccaggacgucguuaaucagaacgcgcaggcccugaauacucuugugaagcaauugagcaguaacuucggcgcuaucucuuccguacugaaugauauauuaagccgacucgacaagguggaagccgagguccagaucgauagacugauuaccgguaggcuucagucgcugcaaacguacgugacacagcaguugauccgcgcagcugagauucgggccucagcaaaccucgccgcuaccaaaaugucugaauguguucuggggcagaguaagagaguggacuuuugcggaaaaggcuaccaccuaauguccuucccccaaagcgcgccacauggugucguguuucugcacguuacuuaugugccggcccaggagaagaauuucaccacagcuccugcaaucugucacgauggcaaagcccauuuucccagggaaggggucuucguaucuaacggaacucacugguuugugacccagcgcaauuucuacgagccacagauaauuacaacggacaacaccuuuguuagcggcaauugcgauguggucaucgggaucgugaacaauacuguauaugacccccuccaaccugagcuggauuccuucaaggaggaacuugacaaauacuucaagaaccauacaucaccagauguggacuugggagauauuaguggcaucaaugccagcgucguuaacauucagaaggaaauagaccgacugaaugagguggcuaaaaacuuaaacgaaucucucaucgaccugcaggagcuugguaaguaugagcaguacauuaaauggcccugguauaucuggcugggguuuauugcaggacuaaucgccauagugauggucaccaucaugcucuguugcaugacuuccuguugcucaugucugaagggcugcuguaguugcgguagcugcuguaaauucgaugaagacgauuccgagccuguguugaagggcguuaagcugcacuacacauga

SEQ ID NO: 11981 - RNA, 3822 nt, Artificial Sequence
  SARS-CoV-2/Tianmen/HBCDC-HB-07/2020__EPI_ISL_412983 spike protein CDS human (1-1273)
auguucguguuucugguccuccuuccccugguuagcucccagugcgugaacuugaccacaagaacucaauuaccuccagccuacacuaauucuuucaccaggggcguauauuacccggacaagguguuucggucaaguguccugcacagcacacaggaucuauuccuccccuuuuucuccaacgugacuugguuucaugcuauccacguuucugggaccaauggaacaaaacgcuucgacaacccugugcugccauuuaaugauggugucuauuucgcaucgaccgagaagucaaacauuauacgaggcuggaucuuugggacuacacuugacagcaaaacccagagucuguugauugugaauaacgccacgaauguaguuaucaaggugugugaguuccaguuuugcaacgaucccuuccucggagucuacuaucauaaaaauaacaaguccuggauggagucugaguuccguguguacagcuccgcgaauaacuguacuuuugaauaugugucacaaccuuuccugauggaccuggaaggcaagcaggguaauuuuaaaaaccucagagaguucgucuuuaagaacauugauggguacuucaaaaucuacaguaagcacaccccaauaaauuuaguuagggaccugccccagggauuuagcgcucuugagccuuugguggaucugccaaucggcauuaacaucacacgguuccagacucuacucgcccugcaucgcucuuaucuuaccccgggcgacuccucaagcggguggacagcaggagccgcugcauacuauguagguuaccugcaacccagaaccuuuuugcucaaauauaaugaaaacggcacgauuacugaugccguggacugcgcucuggauccuuuaagugagacaaaguguacccugaagucuuucacugucgaaaaagggaucuaccagacauccaauuuuagggugcagccaaccgagagcauaguucgguuccccaacauuacgaaucucugcccuuuuggagagguguucaacgccacccgcuucgcgucggucuaugcauggaaucgaaagagaaucucuaacuguguggccgacuacuccguacuuuacaauucagcuaguuuuagcacauucaaaugcuauggcguuuccccaacuaagcugaacgacuuguguuuuaccaauguguacgccgauucuuucgucauuaggggugacgaagugcggcagaucgcacccgggcaaacaggaaaaaucgcugauuauaacuacaagcuaccggacgauuuuacuggcugcgucauugccuggaauagcaacaaccuggacucaaaagugggcgggaauuauaacuaccucuaucgucuguuccgcaagaguaaucuuaagccuuuugagagagauauauccaccgaaaucuaccaggcgggaagcacacccuguaacgguguugagggcuucaauugcuacuuuccacugcagucuuauggguuccaaccuaccaacggagugggcuaccagcccuauaggguagucguguugucauuugaacuccugcacgccccagcaacuguuugcggucccaaaaagaguacgaauuuagugaaaaacaagugugucaauuucaacuuuaaugggcugacaggcaccggagugcuaacugagagcaacaaaaaguuccucccuuuccagcaguuuggccgggacauugcugauaccacagacgccguacgagauccacaaacccuggagauccuugacauaacuccgugcuccuucgggggagugucuguuauuacacccgguacgaauaccucgaaccaggucgcuguguuguaccaggaccugaauuguacugaagugccugucgccauccacgcagaucagcucacaccaaccuggcgcguuuauagcacaggcuccaacguguuucaaacuagagccgggugccugaucggagcugagcaugugaacaauucauacgaaugugacauucccaucggcgcggguauuugcgcaaguuaucagacccagacgaacucuccuaggcgggcccgcagcguagcuucccagucaauaaucgccuacaccaugagccuuggggcagaaaauucugucgccuacuccaacaauaguauugcuaucccaacaaacuucacuaucagcgugaccacagaaauucugcccguuucuaugacuaagaccuccguggauuguacgauguauauaugcggcgacucaacagaguguaguaauuugcuccugcaauacggcagcuuuugcacccaguuaaacagagcccugacuggaaucgcagucgagcaggauaaaaauacacaggaaguguucgcgcaaguuaagcagauuuauaaaaccccgccuaucaaggacuuugggggauucaacuuuucgcagauucuaccagaucccuccaaaccuucuaagaggagcuucaucgaggaccuccuguuuaauaaggugacucuugcugaugccgguuucauaaaacaauacggcgacuguuugggggauaucgcagcccgugaccugauuugcgcucagaaguucaacggacucaccguacugcccccauuacugacagaugaaaugaucgcccaguauacgucagcacuuuuggcuggcaccauuacgagugguuggacauuuggggccggcgcggcccuccagaucccuuucgcuaugcaaauggcauaccgguuuaauggaauaggcgucacccagaacgugcuguaugagaaucagaaacuaauugccaaccaguucaacuccgcuaucgggaagauucaagacucucugagcuccacagccucagcacucggaaaacugcaggacguggucaaucagaacgcgcaggcccuuaauacuuugguuaagcaacugagcaguaacuuuggcgcuaucucuuccguguuaaaugauauacucagccgacuggacaagguagaagccgaggugcagaucgauagacuuauuaccgguaggcugcagucguugcaaacguacgucacacagcagcucauccgcgcagcugagauucgggccucagcaaaccuggccgcuaccaaaaugucugaaugcgugcuagggcagaguaagagaguugacuucuguggaaaaggcuaccaccugauguccuuuccccaaagcgcgccacaugguguggucuuccuccacgugacuuauguuccggcccaggagaagaauuuuaccacagcuccugcaaucugccacgauggcaaagcccauuuccccagggaagggguguuugucucuaacggaacucacugguucguaacccagcgcaauuuuuacgagccacagauaauuacaacggacaacaccuucgugagcggcaauugugauguugugaucgggaucgucaacaauacuguguaugacccccugcaaccugagcuugauuccuucaaggaagaguuggacaaauacuuuaagaaccauacaucaccagauguagaccugggagauauuaguggcaucaaugccagcguggucaacauucagaaggaaauagaccgauuaaaugagguugcuaaaaaccucaacgaaucucugaucgaccuucaggagcuggguaaguaugagcaguacauuaaauggcccugguauaucuggcuaggguucauugcaggacucaucgccauagugauggugaccaucaugcugugcuguaugacuuccugcuguucaugcuugaagggcuguugcaguugugguagcugcugcaaauuugaugaagacgauuccgagccuguccugaagggcgugaaguuacacuacacauga

SEQ ID NO: 11982 - RNA, 3822 nt, Artificial Sequence
  SARS-CoV-2/Hong Kong/case42_VM20002493/2020__EPI_ISL_414527 spike protein CDS human (1-1273)
auguucguguuucugguccuccuuccccugguuagcucccagugcgugaacuugaccacaagaacucaauuaccuccagccuacacgaauagcuucaccaggggcguauauuacccggacaagguguuucggucaaguguccugcacagcacacaggaucuauuccuccccuuuuucuccaacgugacuugguuucaugcuauccacguuucugggaccaauggaacaaaacgcuucgacaacccugugcugccauuuaaugauggugucuauuucgcaucgaccgagaagucaaacauuauacgaggcuggaucuuugggacuacacuugacagcaaaacccagagucuguugauugugaauaacgccacgaauguaguuaucaaggugugugaguuccaguuuugcaacgaucccuuccucggagucuacuaucauaaaaauaacaaguccuggauggagucugaguuccguguguacagcuccgcgaauaacuguacuuuugaauaugugucacaaccuuuccugauggaccuggaaggcaagcaggguaauuuuaaaaaccucagagaguucgucuuuaagaacauugauggguacuucaaaaucuacaguaagcacaccccaauaaauuuaguuagggaccugccccagggauuuagcgcucuugagccuuugguggaucugccaaucggcauuaacaucacacgguuccagacucuacucgcccugcaucgcucuuaucuuaccccgggcgacuccucaagcggguggacagcaggagccgcugcauacuauguagguuaccugcaacccagaaccuuuuugcucaaauauaaugaaaacggcacgauuacugaugccguggacugcgcucuggauccuuuaagugagacaaaguguacccugaagucuuucacugucgaaaaagggaucuaccagacauccaauuuuagggugcagccaaccgagagcauaguucgguuccccaacauuacgaaucucugcccuuuuggagagguguucaacgccacccgcuucgcgucggucuaugcauggaaucgaaagagaaucucuaacuguguggccgacuacuccguacuuuacaauucagcuaguuuuagcacauucaaaugcuauggcguuuccccaacuaagcugaacgacuuguguuuuaccaauguguacgccgauucuuucgucauuaggggugacgaagugcggcagaucgcacccgggcaaacaggaaaaaucgcugauuauaacuacaagcuaccggacgauuuuacuggcugcgucauugccuggaauagcaacaaccuggacucaaaagugggcgggaauuauaacuaccucuaucgucuguuccgcaagaguaaucuuaagccuuuugagagagauauauccaccgaaaucuaccaggcgggaagcacacccuguaacgguguugagggcuucaauugcuacuuuccacugcagucuuauggguuccaaccuaccaacggagugggcuaccagcccuauaggguagucguguugucauuugaacuccugcacgccccagcaacuguuugcggucccaaaaagaguacgaauuuagugaaaaacaagugugucaauuucaacuuuaaugggcugacaggcaccggagugcuaacugagagcaacaaaaaguuccucccuuuccagcaguuuggccgggacauugcugauaccacagacgccguacgagauccacaaacccuggagauccuugacauaacuccgugcuccuucgggggagugucuguuauuacacccgguacgaauaccucgaaccaggucgcuguguuguaccaggacgugaauuguacugaagucccuguugccauccacgcagaucagcugacaccaaccuggcgcguguauagcacaggcuccaacguguuucaaacuagagccgggugccucaucggagcugagcauguaaacaauucauacgaaugugacauucccaucggcgcggguauuugcgcaaguuaucagacccagacgaacucuccuaggcgggcccgcagcgucgcuucccagucaauaaucgccuacaccaugagccugggggcagaaaauucuguggccuacuccaacaauaguauugcuaucccaacaaacuucgccaucagcguuacuaccgaaauucuucccgugucuaugacaaagacuuccgucgauuguaccauguauauaugcggcgacucaacggaguguaguaaucuguugcuccaauacggaucuuuuugcacacagcugaacagagcauuaaccggcaucgcgguggagcaggauaaaaauacucaggaaguuuucgcucaagugaagcagauuuauaaaacaccgccuaucaaggacuuugggggauucaacuuuucgcagauucugccagaucccuccaaaccuucuaagaggagcuucaucgaggaccuacucuuuaauaagguaacccuggccgaugcagguuucauaaaacaauacggcgacugucuuggggauaucgccgcucgugacuugauuugcgcccagaaguucaacggacugacuguccugcccccacucuuaaccgaugaaaugaucgcacaguauacaucagcucugcuugccggcacgauuaccagugguuggacuuuuggggcgggcgccgcuuugcagaucccuuucgcaaugcaaauggccuaccgguuuaauggaauaggcgugacacagaacgugcucuaugagaaucagaaacugauugcuaaccaguucaacuccgccaucgggaagauucaagacucucuaagcuccaccgcaucagcgcugggaaaacuccaggacgucguuaaucagaacgcccaggcucugaauacacuugugaagcaauugagcaguaacuuuggcgccaucucuuccguacugaaugauauauuaagccgacucgacaagguggaagcagagguccagaucgauagacugauuacugguaggcuucagucgcugcaaaccuacgugacgcagcaguugauccgcgcugccgagauucgggcaucagccaaccucgcugcgacaaaaaugucugaaugcguucuggggcagaguaagagaguggacuucuguggaaaaggcuaccaccuaauguccuuuccccaaagcgccccacauggugucguguuccugcacguuaccuaugugccggcacaggagaagaauuuuacuaccgcuccugccaucugccacgauggcaaagcccauuuccccagggaaggggucuuuguaucuaacggaacacacugguucgugacucagcgcaauuuuuacgagccacagauaauuaccacagacaacacguucguuagcggcaauugugauguggucaucgggaucgugaacaauaccguauaugacccccuccaaccugagcuggauuccuucaaggaggaacuugacaaauacuuuaagaaccauacuucaccagauguggacuugggagauauuaguggcaucaaugcuagcgucguuaacauucagaaggaaauagaccgacugaaugagguggccaaaaacuuaaacgaaucucucaucgaccugcaggagcuugguaaguaugagcaguacauuaaauggcccugguauaucuggcugggguucauugcaggacuaaucgcgauagugauggucacaaucaugcucugcuguaugaccuccugcuguucaugccugaagggcuguugcaguugugguagcugcugcaaauuugaugaagacgauuccgagccuguguugaagggcguuaagcugcacuacacuuga

SEQ ID NO: 11983 - RNA, 3822 nt, Artificial Sequence
  SARS-CoV-2/USA/CruiseA-23/2020__EPI_ISL_414482 spike protein CDS human (1-1273)
auguucguguuucugguccuccuuccccugguuagcucccagugcgugaacuugaccacaagaacucaauuaccuccagccuacacuaauucuuucaccaggggcguauauuacccggacaagguguuucggucaaguguccugcacagcacacaggaucuauuccuccccuuuuucuccaacgugacuugguuucaugcuauccacguuucugggaccaauggaacaaaacgcuucgacaacccugugcugccauuuaaugauggugucuauuucgcaucgaccgagaagucaaacauuauacgaggcuggaucuuugggacuacacuugacagcaaaacccagagucuguugauugugaauaacgccacgaauguaguuaucaaggugugugaguuccaguuuugcaacgaucccuuccucggagucuacuaucauaaaaauaacaaguccuggauggagucugaguuccguguguacagcuccgcgaauaacuguacuuuugaguaugugucacaaccuuuccugauggaccuggaagucaagcagggcaauuuuaaaaaccucagagaguucguuuuuaagaacauugaugguuacuucaaaaucuacaguaagcacaccccaauaaauuuagugagggaccugccccagggguuuagcgcucuugagccuuugguagaucugccaaucggaauuaacaucacacgguuccagacucuacucgcccugcaucgcucuuaucuuaccccgggcgacuccucaagcggcuggacagcaggggccgcugcauacuaugugggauaccugcaacccagaaccuuuuugcucaaauauaaugaaaacgguacgauuacugaugccgucgacugcgcucuggauccuuuaagugagacaaaguguacccugaagucuuucacuguggaaaaaggcaucuaccagacauccaauuuuaggguucagccaaccgagagcauagugcgguuccccaacauuacgaaucucugcccuuuuggggaggucuucaacgccacccgcuucgcgucgguguaugcauggaaucgaaagagaaucucuaacuguguagccgacuacuccguucuuuacaauucagcuaguuuuagcacauucaaaugcuauggaguguccccaacuaagcugaacgacuuguguuuuaccaaugucuacgccgauucuuucgugauuaggggcgacgaaguccggcagaucgcacccggucaaacagggaaaaucgcugauuauaacuacaagcuaccggacgauuuuacuggaugcgugauugccuggaauagcaacaaccuggacucaaaaguuggcggcaauuauaacuaccucuaucgucuguuccgcaagaguaaucuuaagccuuuugagagagauauauccaccgaaaucuaccaggcggggagcacacccuguaacggaguggaggguuucaauugcuacuuuccacugcagucuuauggcuuccaaccuaccaacgggguaggauaccagcccuauagggucgugguuuugucauuugaacuccugcacgccccagcaacugugugcggccccaaaaagaguacgaauuuagucaaaaacaagugugugaauuucaacuuuaauggucugacagggaccggcguacuaacugagagcaacaaaaaguuccucccuuuccagcaguuuggacgggacauugcugauaccacagacgccgugcgagauccacaaacccuggagauccuugacauaacuccgugcuccuucggcgggguuucugucauuacacccggaacgaauaccucgaaccagguggcuguguuguaccaggacgucaauuguacugaaguuccuguggccauccacgcagaucagcugacaccaaccuggcgcguguauagcacagguuccaacguauuucaaacuagagccggcugccucaucggggcugagcaugucaacaauucauacgaaugugacauucccaucggagcgggcauuugcgcaaguuaucagacccagacgaacucuccuaggcgggcccgcagcguggcuucccagucaauaaucgccuacaccaugagccugggugcagaaaauucuguugccuacuccaacaauaguauugcuaucccaacaaacuucacuaucagcgugaccacagaaauucuucccgucucuaugacuaagaccuccguggauuguacgauguauauaugcggggacucaacagaguguaguaaucuguugcuccaauacggcagcuuuugcacccagcugaacagagccuuaacuggaaucgcaguugagcaggauaaaaauacacaggaaguguucgcgcaaguaaagcagauuuauaaaaccccgccuaucaaggacuuuggcggguucaacuuuucgcagauucugccagaucccuccaaaccuucuaagaggagcuucaucgaggaccuacucuuuaauaaggucacucuggcugaugccggauucauaaaacaauacggugacugucuuggcgauaucgcagcccgugacuugauuugcgcucagaaguucaacgggcugaccgugcugcccccacucuuaacagaugaaaugaucgcccaguauacgucagcacugcuugcuggaaccauuacgaguggcuggacauuuggugccggggcggccuugcagaucccuuucgcuaugcaaauggcauaccgguuuaauggcauaggagugacccagaacguccucuaugagaaucagaaacugauugccaaccaguucaacuccgcuaucggcaagauucaagacucucuaagcuccacagccucagcacuggggaaacuccaggacguugugaaucagaacgcgcaggcccugaauacucuuguaaagcaauugagcaguaacuuuggagcuaucucuuccgugcugaaugauauauuaagccgacucgacaaggucgaagccgaggugcagaucgauagacugauuaccggcaggcuucagucgcugcaaacguacguuacacagcaguugauccgcgcagcugagauucgggccucagcaaaccucgccgcuaccaaaaugucugaaugcgugcugggucagaguaagagagucgacuucugugggaaaggauaccaccuaauguccuuuccccaaagcgcgccacauggcgugguuuuccugcacgugacuuaugucccggcccaggagaagaauuuuaccacagcuccugcaaucugccacgaugguaaagcccauuuccccagggaaggcguauuugugucuaacgggacucacugguucguuacccagcgcaauuuuuacgagccacagauaauuacaacggacaacaccuucgugagcggaaauugugaugucgugaucggcaucguaaacaauacuguguaugacccccuccaaccugagcuggauuccuucaaggaagaacuugacaaauacuuuaagaaccauacaucaccagaugucgacuugggggauauuaguggaaucaaugccagcguugugaacauucagaaggaaauagaccgacugaaugagguggcuaaaaacuuaaacgaaucucucaucgaccugcaggagcuuggcaaguaugagcaguacauuaaauggcccugguauaucuggcuggguuucauugcagggcuaaucgccauagucauggugaccaucaugcucugcuguaugacuuccugcuguucaugccugaagggauguugcaguuguggcagcugcugcaaauuugaugaagacgauuccgagccuguuuugaaggguguaaagcugcacuacacauga

SEQ ID NO: 11984 - RNA, 3822 nt, Artificial Sequence
  SARS-CoV-2/Hong Kong/case85_VM20002868/2020__EPI_ISL_414519 spike protein CDS human (1-1273)
auguucguguuucugguccucguuccccuugugagcucccagugcguaaaccugaccacaagaacucaauugccuccagccuacacuaauucuuucaccaggggcguguauuacccggacaaggucuuucggucaaguguguuacacagcacacaggaucuguuccuacccuuuuucuccaacguuacuugguuucaugcuauccacgugucugggaccaauggaacaaaacgcuucgacaacccuguccucccauuuaaugaugguguguauuucgcaucgaccgagaagucaaacauuauacgaggcuggaucuuugggacuacacuggacagcaaaacccagagucuucugauuguaaauaacgccacgaauguugugaucaaggucugugaguuccaguuuugcaacgaucccuucuugggaguguacuaucauaaaaauaacaaguccuggauggagucugaguuccguguguacagcuccgcgaauaacuguacuuuugaauaugucucacaaccuuuccucauggaccuggaaggcaagcaggguaauuuuaaaaaccugagagaguucguuuuuaagaacauugauggguacuucaaaaucuacaguaagcacaccccaauaaaucucgugagggacuuaccccagggauuuagcgcucuggagccucuuguagauuugccaaucggcauuaacaucacacgguuccagacucugcuagcccuccaucgcucuuaucugaccccgggcgacuccucaagcggguggacagcaggagccgcugcauacuauguggguuaccuucaacccagaaccuuucuguugaaauauaaugaaaacggcacgauuacugaugccgucgacugcgcucucgauccucugagugagacaaaguguaccuuaaagucuuucacuguggaaaaagggaucuaccagacauccaauuuuaggguucagccaaccgagagcauagugcgguuccccaacauuacgaaucugugcccuuuuggagaggucuucaacgccacccgcuucgcgucgguguaugcauggaaucgaaagagaaucucuaacuguguagccgacuacuccguucucuacaauucagcuaguuuuagcacauucaaaugcuauggcguguccccaacuaaacuuaacgaccuguguuuuaccaaugucuacgccgauucuuucgugauuaggggugacgaaguccggcagaucgcacccgggcaaacaggaaagaucgcugauuauaacuacaaguugccggacgauuuuacuggcugcgugauugccuggaauagcaacaaccuagacucaaaaguuggcgggaauuauaacuaccuguaucgucucuuccgcaagaguaaucugaagccuuuugagagagauauauccaccgaaaucuaccaggcgggaagcacacccuguaacgguguggagggcuucaauugcuacuuuccacuucagucuuauggguuccaaccuaccaacggaguaggcuaccagcccuauagggucgugguucugucauuugaauugcuccacgccccagcaacugugugcggucccaaaaagaguacgaaucuggucaaaaacaagugugugaauuucaacuuuaauggguuaacaggcaccggaguacugacugagagcaacaaaaaguuccuaccuuuccagcaguuuggccgggacauugcugauaccacagacgccgugcgagauccacaaacccucgagauccuggacauaacuccgugcuccuucgggggaguuucugucauuacacccgguacgaauaccucgaaccagguggcugugcuuuaccaggacgucaauuguacugaaguuccuguggccauccacgcagaucaguugacaccaaccuggcgcguguauagcacaggcuccaacguauuucaaacuagagccgggugccugaucggagcugagcaugucaacaauucauacgaaugugacauucccaucggcgcggguauuugcgcaaguuaucagacccagacgaacucuccuaggcgggcccgcagcguggcuucccagucaauaaucgccuacaccaugagccucggggcagaaaauucuguugccuacuccaacaauaguauugcuaucccaacaaacuucacuaucagcgugaccacagaaauucugcccgucucuaugacuaagaccuccguggauuguacgauguauauaugcggcgacucaacagaguguaguaaucuucuguugcaauacggcagcuuuugcacccagcucaacagagcccugacuggaaucgcaguugagcaggauaaaaauacacaggaaguguucgcgcaaguaaagcagauuuauaaaaccccgccuaucaaggacuuugggggauucaacuuuucgcagauuuuaccagaucccuccaaaccuucuaagaggagcuucaucgaggaccugcuauuuaauaaggucacucucgcugaugccgguuucauaaaacaauacggcgacugucugggggauaucgcagcccgugaccuuauuugcgcucagaaguucaacggauugaccgugcugcccccacuccugacagaugaaaugaucgcccaguauacgucagcauuacuggcuggcaccauuacgagugguuggacauuuggggccggcgcggcccuucagaucccuuucgcuaugcaaauggcauaccgguuuaauggaauaggcgugacccagaacgucuuguaugagaaucagaaacucauugccaaccaguucaacuccgcuaucgggaagauucaagacucucugagcuccacagccucagcacuaggaaaacugcaggacguugugaaucagaacgcgcaggcccucaauacucugguaaagcaacuuagcaguaacuuuggcgcuaucucuuccguguugaaugauauacugagccgauuagacaaggucgaagccgaggugcagaucgauagacucauuaccgguaggcugcagucgcuucaaacguacguuacacagcagcugauccgcgcagcugagauucgggccucagcaaacuuggccgcuaccaaaaugucugaaugcgugcucgggcagaguaagagagucgacuucuguggaaaaggcuaccaccugauguccuuuccccaaagcgcgccacauggugugguuuuccuacacgugacuuaugucccggcccaggagaagaauuuuaccacagcuccugcaaucugccacgauggcaaagcccauuuccccagggaagggguauuugugucuaacggaacucacugguucguuacccagcgcaauuuuuacgagccacagauaauuacaacggacaacaccuucgugagcggcaauugugaugucgugaucgggaucguaaacaauacuguguaugacccccugcaaccugagcucgauuccuucaaggaggaacuggacaaauacuuuaagaaccauacaucaccagaugucgaccuuggagauauuaguggcaucaaugccagcguugugaacauucagaaggaaauagaccgauugaaugagguggcuaaaaaccugaacgaaucuuuaaucgaccuccaggagcuggguaaguaugagcaguacauuaaauggcccugguauaucuggcuuggguucauugcaggacugaucgccauagucauggugaccaucaugcuaugcuguaugacuuccugcuguucaugccucaagggcuguugcaguugugguagcugcugcaaauuugaugaagacgauuccgagccuguucugaagggcguaaaguugcacuacacauga

SEQ ID NO: 11985 - RNA, 3822 nt, Artificial Sequence
  SARS-CoV-2/England/200990660/2020__EPI_ISL_414523 spike protein CDS human (1-1273)
auguucguguuucugguccuccuuccccugguuagcucccagugcgugaacuugaccacaagaacucaauuaccuccagccuacacuaauucuuucaccaggggcguauauuacccggacaagguguuucggucaaguguccugcacagcacacaggaucuauuccuccccuuuuucuccaacgugacuugguuucaugcuauccacguuucugggaccaauggaacaaaacgcuucgacaacccugugcugccauuuaaugauggugucuauuucgcaucgaccgagaagucaaacauuauacgaggcuggaucuuugggacuacacuugacagcaaaacccagagucuguugauugugaauaacgccacgaauguaguuaucaaggugugugaguuccaguuuugcaacgaucccuuccucggagucuacuaucauaaaaauaacaaguccuggauggagucugaguuccguguguacagcuccgcgaauaacuguacuuuugaguaugugucacaaccuuuccugauggaccuggaaggcaagcaggguaauuuuaaaaaccucagagaguucgucuuuaagaacauugauggguacuucaaaaucuacaguaagcacaccccaauaaauuuaguuagggaccugccccagggauuuagcgcucuugagccuuugguggaucugccaaucggcauuaacaucacacgguuccagacucuacucgcccugcaucgcucuuaucuuaccccgggcgacuccucaagcggguggacagcaggagccgcugcauacuauguagguuaccugcaacccagaaccuuuuugcucaaauauaaugaaaacggcacgauuacugaugccguggacugcgcucuggauccuuuaagugagacaaaguguacccugaagucuuucacugucgaaaaagggaucuaccagacauccaauuuuagggugcagccaaccgagagcauaguucgguuccccaacauuacgaaucucugcccuuuuggagagguguucaacgccacccgcuucgcgucggucuaugcauggaaucgaaagagaaucucuaacuguguggccgacuacuccguacuuuacaauucagcuaguuuuagcacauucaaaugcuauggcguuuccccaacuaagcugaacgacuuguguuuuaccaauguguacgccgauucuuucgucauuaggggugacgaagugcggcagaucgcacccgggcaaacaggaaaaaucgcugauuauaacuacaagcuaccggacgauuuuacuggcugcgucauugccuggaauagcaacaaccuggacucaaaagugggcgggaauuauaacuaccucuaucgucuguuccgcaagaguaaucuuaagccuuuugagagagauauauccaccgaaaucuaccaggcgggaagcacacccuguaacgguguugagggcuucaauugcuacuuuccacugcagucuuauggguuccaaccuaccaacggagugggcuaccagcccuauaggguagucguguugucauuugaacuccugcacgccccagcaacuguuugcggucccaaaaagaguacgaauuuagugaaaaacaagugugucaauuucaacuuuaaugggcugacaggcaccggagugcuaacugagagcaacaaaaaguuccucccuuuccagcaguuuggccgggacauugcugauaccacagacgccguacgagauccacaaacccuggagauccuugacauaacuccgugcuccuucgggggagugucuguuauuacacccgguacgaauaccucgaaccaggucgcuguguuguaccagggcgugaauuguacugaagucccuguugccauccacgcagaccagcugacaccaaccuggcgcguguauagcacaggguccaacguguuucaaacuagagccggaugccucaucggcgcugagcauguaaacaauucauacgaaugugauauucccaucggugcggggauuugcgcaaguuaucagacccagacgaacucuccuaggcgggcccgcagcgucgcuucccagucaauaaucgccuacaccaugagccugggcgcagaaaauucuguggccuacuccaacaauaguauugcuaucccaacaaacuucacuaucagcguuaccacagaaauucuucccgugucuaugacuaagaccuccgucgacuguacgauguauauaugcggagauucaacagaguguaguaaucuguugcuccaauacggcagcuuuugcacccagcugaacagagccuuaacugggaucgcaguggagcaggacaaaaauacacaggaaguuuucgcgcaagugaagcagauuuauaaaaccccgccuaucaaggauuuuggagguuucaacuuuucgcagauucugccagaccccuccaaaccuucuaagaggagcuucaucgaggaucuacucuuuaauaagguaacucuggcugacgccggcuucauaaaacaauacggggauugucuuggagacaucgcagcccgugauuugauuugcgcucagaaguucaacggccugaccguccugcccccacucuuaacagacgaaaugaucgcccaguauacgucagcacugcuugcugguaccauuacgaguggguggacauuuggcgccggagcggccuugcagaucccuuucgcuaugcaaauggcauaccgguuuaauggcauaggggugacccagaacgugcucuaugagaaucagaaacugauugccaaccaguucaacuccgcuaucggaaagauucaagauucucuaagcuccacagccucagcacugggcaaacuccaggacgucguuaaucagaacgcgcaggcccugaauacucuugugaagcaauugagcaguaacuuuggugcuaucucuuccguacugaaugacauauuaagccgacucgauaagguggaagccgagguccagaucgacagacugauuaccgggaggcuucagucgcugcaaacguacgugacacagcaguugauccgcgcagcugagauucgggccucagcaaaccucgccgcuaccaaaaugucugaaugcguucugggacagaguaagagaguggauuucuguggcaaagguuaccaccuaauguccuuuccccaaagcgcgccacauggcgucguguuccugcacguuacuuaugugccggcccaggagaagaauuuuaccacagcuccugcaaucugccacgacgggaaagcccauuuccccagggaaggagucuuuguaucuaacggcacucacugguucgugacccagcgcaauuuuuacgagccacagauaauuacaacggauaacaccuucguuagcgggaauugugacguggucaucggaaucgugaacaauacuguauaugauccccuccaaccugagcuggacuccuucaaggaagaacuugauaaauacuuuaagaaccauacaucaccagacguggauuugggcgacauuagugguaucaaugccagcgucguuaacauucagaaggaaauagaucgacugaaugagguggcuaaaaacuuaaacgaaucucucaucgaccugcaggagcuugggaaguaugagcaguacauuaaauggcccugguauaucuggcugggauucauugcaggccuaaucgccauagugauggucaccaucaugcucugcuguaugacuuccugcuguucaugccugaaggguuguugcaguuguggcagcugcugcaaauuugacgaagaugacuccgaguuggugcugaaggggguuaaguuacacuacacauga

SEQ ID NO: 11986 - RNA, 3822 nt, Artificial Sequence
  SARS-CoV-2/Australia/NSW09/2020__EPI_ISL_413595 spike protein CDS human (1-1273)
auguucguguuucugguccuccuuccccugguuagcucccagugcgugaacuugaccacaagaacucaauuaccuccagccuacacuaauucuuucaccaggggcguauauuacccggacaagguguuucggucaaguguccugcacagcacacaggaucuauuccuccccuuuuucuccaacgugacuugguuucaugcuauccacguuucugggaccaauggaacaaaacgcuucgacaacccugugcugccauuuaaugauggugucuauuucgcaucgaccgagaagucaaacauuauacgaggcuggaucuuugggacuacacuugacagcaaaacccagagucuguugauugugaauaacgccacgaauguaguuaucaaggugugugaguuccaguuuugcaacgaucccuuccucggagucuacuaucauaaaaauaacaaguccuggauggagucugaguuccguguguacagcuccgcgaauaacuguacuuuugaauaugugucacaaccuuuccugauggaccuggaaggcaagcaggguaauuuuaaaaaccucagagaguucgucuuuaagaacauugauggguacuucaaaaucuacaguaagcacaccccaauaaauuuaguuagggaccugccccagggauuuagcgcucuugagccuuugguggaucugccaaucggcauuaacaucacacgguuccagacucuacucgcccugcaucgcucuuaucuuaccccgggcgacuccucaagcggguggacagcaggagccgcugcauacuauguagguuaccugcaacccagaaccuuuuugcucaaauauaaugaaaacggcacgauuacugaugccguggacugcgcucuggauccuuuaagugagacaaaguguacccugaagucuuucacugucgaaaaagggaucuaccagacauccaauuuuagggugcagccaaccgagagcauaguucgguuccccaacauuacgaaucucugcccuuuuggagagguguucaacgccacccgcuucgcgucggucuaugcauggaaucgaaagagaaucucuaacuguguggccgacuacuccguacuuuacaauucagcuaguuuuagcacauucaaaugcuauggcguuuccccaacuaagcugaacgacuuguguuuuaccaauguguacgccgauucuuucgucauuaggggugacgaagugcggcagaucgcacccgggcaaacaggaaaaaucgcugauuauaacuacaagcuaccggacgauuuuacuggcugcgucauugccuggaauagcaacaaccuggacucaaaagugggcgggaauuauaacuaccucuaucgucuguuccgcaagaguaaucuuaagccuuuugagagagauauauccaccgaaaucuaccaggcgggaagcacacccuguaacgguguugagggcuucaauugcuacuuuccacugcagucuuauggguuccaaccuaccaacggagugggcuaccagcccuauaggguagucguguugucauuugaacuccugcacgccccagcaacuguuugcggucccaaaaagaguacgaauuuagugaaaaacaagugugucaauuucaacuuuaaugggcugacaggcaccggagugcuaacugagagcaacaaaaaguuccucccuuuccagcaguuuggccgggacauugcugauaccacagacgccguacgagauccacaaacccuggagauccuugacauaacuccgugcuccuucgggggagugucuguuauuacacccgguacgaauaccucgaaccaggucgcuguguuguaccaggacgugaauuguacugaagucccuguugccauccacgcagaucagcugacaccaaccuggcgcguguauagcacaggcuccaacguguuucaaacuagagccgggugccucaucggagcugagcauguaaacaauucauacgaaugugacauucccaucggcgcggguauuugcgcaaguuaucagacccagacgaacucuccuaggcgggcccgcagcgucgcuucccagucaauaaucgccuacaccaugagccugggggcagaaaauucuguggccuacuccaacaauaguauugcuaucccaacaaacuucacuaucagcguuaccacagaaauucuucccgugucuaugacuaagaccuccgucgauuguacgauguauauaugcggcgacucaacagaguguaguaaucuguugcuccaauacggcagcuuuugcacccagcugaacagagccuuaacuggaaucgcaguggagcaggauaaaaauacacaggaaguuuucgcgcaagugaagcagauuuauaaaaccccgccuaucaaggacuuugggggauucaacuuuucgcagauucugccagaucccuccaaaccuucuaagaggagcuucaucgaggaccuacucuuuaauaagguaacucuggcugaugccgguuucauaaaacaauacggcgacugucuuggggauaucgcagcccgugacuugauuugcgcucagaaguucaacggacugaccguccuacccccacuguuaacagaugaaaugaucgcccaguauacgucagcacugcuugcuggcaccauuacgagugguuggacauuuggggccggcgcggccuugcagaucccuuucgcuaugcaaauggcauaccgguuuaauggaauaggcgugacccagaacgugcucuaugagaaucagaaacugauugccaaccaguucaacuccgcuaucgggaagauucaagacucucucagcuuuacagccuccgcacugggaaaacuccaggacgucguuaaucagaacgcgcaggcccugaauacucuugugaagcaauugucaagcaacuucggcgcuaucaguucuguacugaaugauauauuaucccgacucgacaagguggaagccgagguccagaucgauagacugauuaccgguaggcuucagagccugcaaacguacgugacacagcaguugauccgcgcagcugagauucgggccucggcaaaccucgccgcuaccaaaaugucagaaugcguucuggggcagucuaagagaguggacuuuuguggaaaaggcuaccaccuaaugaguuucccccaauccgcgccacauggugucguguuucugcacguuacuuaugugccggcccaggagaagaauuucaccacagcuccugcaaucugccacgauggcaaagcccauuuucccagggaaggggucuucguaagcaacggaacucacugguuugugacccagcgcaauuucuacgagccacagauaauuacaacggacaacaccuucguuucuggcaauugugauguggucaucgggaucgugaacaauacuguauaugacccccuccaaccugagcuggauagcuuuaaggaggaacuugacaaauacuucaagaaccauacauccccagauguggacuugggagauauuucaggcaucaaugccagugucguuaacauucagaaggaaauagaccgacugaaugagguggcuaaaaacuuaaacgaaagccucaucgaccugcaggagcuugguaaguaugagcaguacauuaaauggcccugguauaucuggcugggguuuauugcaggacuaaucgccauagugauggucaccaucaugcucugcuguaugacuucuugcuguuccugccugaagggcuguugcucaugugguaguugcugcaaauucgaugaagacgauagcgagccuguguugaagggcguuaagcugcacuacacauga

SEQ ID NO: 11987 - RNA, 3822 nt, Artificial Sequence
  SARS-CoV-2/Australia/NSW10/2020__EPI_ISL_413596 spike protein CDS human (1-1273)
auguucguguuucugguccuccuuccccugguuagcucccagugcgugaacuugaccacaagaacucaauuaccuccagccuacacuaauucuuucaccaggggcguauauuacccggacaagguguuucggucaaguguccugcacagcacacaggaucuauuccuccccuuuuucuccaacgugacuugguuucaugcuauccacguuucugggaccaauggaacaaaacgcuucgacaacccugugcugccauuuaaugauggugucuauuucgcaucgaccgagaagucaaacauuauacgaggcuggaucuuugggacuacacuugacagcaaaacccagagucuguugauugugaauaacgccacgaauguaguuaucaaggugugugaguuccaguuuugcaacgaucccuuccucggagucuacuaucauaaaaauaacaaguccuggauggagucugaguuccguguguacagcuccgcgaauaacuguacuuuugaauaugugucacaaccuuuccugauggaccuggaaggcaagcaggguaauuuuaaaaaccucagagaguucgucuuuaagaacauugauggguacuucaaaaucuacaguaagcacaccccaauaaauuuaguuagggaccugccccagggauuuagcgcucuugagccuuugguggaucugccaaucggcauuaacaucacacgguuccagacucuacucgcccugcaucgcucuuaucuuaccccgggcgacuccucaagcggguggacagcaggagccgcugcauacuauguagguuaccugcaacccagaaccuuuuugcucaaauauaaugaaaacggcacgauuacugaugccguggacugcgcucuggauccuuuaagugagacaaaguguacccugaagucuuucacugucgaaaaagggaucuaccagacauccaauuuuagggugcagccaaccgagagcauaguucgguuccccaacauuacgaaucucugcccuuuuggagagguguucaacgccacccgcuucgcgucggucuaugcauggaaucgaaagagaaucucuaacuguguggccgacuacuccguacuuuacaauucagcuaguuuuagcacauucaaaugcuauggcguuuccccaacuaagcugaacgacuuguguuuuaccaauguguacgccgauucuuucgucauuaggggugacgaagugcggcagaucgcacccgggcaaacaggaaaaaucgcugauuauaacuacaagcuaccggacgauuuuacuggcugcgucauugccuggaauagcaacaaccuggacucaaaagugggcgggaauuauaacuaccucuaucgucuguuccgcaagaguaaucuuaagccuuuugagagagauauauccaccgaaaucuaccaggcgggaagcacacccuguaacgguguugagggcuucaauugcuacuuuccacugcagucuuauggguuccaaccuaccaacggagugggcuaccagcccuauaggguagucguguugucauuugaacuccugcacgccccagcaacuguuugcggucccaaaaagaguacgaauuuagugaaaaacaagugugucaauuucaacuuuaaugggcugacaggcaccggagugcuaacugagagcaacaaaaaguuccucccuuuccagcaguuuggccgggacauugcugauaccacagacgccguacgagauccacaaacccuggagauccuugacauaacuccgugcuccuucgggggagugucuguuauuacacccgguacgaauaccucgaaccaggucgcuguguuguaccaggacgugaauuguacugaagucccuguugccauccacgcagaucagcugacaccaaccuggcgcguguauagcacaggcuccaacguguuucaaacuagagccgggugccucaucggagcugagcauguaaacaauucauacgaaugugacauucccaucggcgcggguauuugcgcaaguuaucagacccagacgaacucuccuaggcgggcccgcagcgucgcuucccagucaauaaucgccuacaccaugagccugggggcagaaaauucuguggccuacuccaacaauaguauugcuaucccaacaaacuucacuaucagcguuaccacagaaauucuucccgugucuaugacuaagaccuccgucgauuguacgauguauauaugcggcgacucaacagaguguaguaaucuguugcuccaauacggcagcuuuugcacccagcugaacagagccuuaacuggaaucgcaguggagcaggauaaaaauacacaggaaguuuucgcgcaagugaagcagauuuauaaaaccccgccuaucaaggacuuugggggauucaacuuuucgcagauucugccagaucccuccaaaccuucuaagaggagcuucaucgaggaccuacucuuuaauaagguaacucuggcugaugccgguuucauaaaacaauacggcgacugucuuggggauaucgcagcccgugacuugauuugcgcucagaaguucaacggacugaccguccugcccccacucuuaacagaugaaaugaucgcccaguauacgucagcacugcuugcuggcaccauuacgagugguuggacauuuggggccggcgcggccuugcagaucccuuucgcuaugcaaauggcauaccgguuuaauggaauaggcgugacccagaacgugcucuaugagaaucagaaacugauugccaaccaguucaacuccgcuaucgggaagauucaagacucucuaagcuccacagccucagcacugggaaaacuccaggacgucguuaaucagaacgcgcaggcccugaauacucuugugaagcaauugagcaguaacuuuggcgcuaucucuuccguacugaaugauauauuaagccgacucgacaagguggaagccgagguccagaucgauagacugauuaccgguaggcuucagucgcugcaaacguacgugacacagcaguugauccgcgcagcugagauucgggccucagcaaaccucgccgcuaccaaaaugucugaaugcguucuggggcagaguaagagaguggacuucuguggaaaaggcuaccaccuaauguccuuuccccaaagcgcgccacauggugucguguuccugcacguuacuuaugugccggcccaggagaagaauuuuaccacagcuccugcaaucugccacgauggcaaagcccauuuccccagggaaggggucuuuguaucuaacggaacucacugguucgugacccagcgcaauuuuuacgagccacagauaauuacaacggacaacaccuucguuagcggcaauugugauguggucaucgggaucgugaacaauacuguauaugacccccuccaaccugagcuggauuccuucaaggaggaacuugacaaauacuuuaagaaccauacaucaccagauguggacuugggagauauuaguggcaucaaugccagcgucguuaacauucagaaggaaauagaccgacugaaugagguggcuaaaaacuuaaacgaaucucucaucgaccugcaggagcuugguaaguaugagcaguacauuaaauggcccugguauaucuggcugggguucauugcaggacuaaucgccauagugauggucaccaucaugcucugcuguaugacuuccugcuguucaugccugaagggcuguugcaguugugguagcugcuuuaaauucgaugaagacgauuccgagccuguguugaagggcguuaagcugcacuacacauga

SEQ ID NO: 11988 - RNA, 3822 nt, Artificial Sequence
  SARS-CoV-2/Switzerland/1000477797/2020__EPI_ISL_413023 spike protein CDS human (1-1273)
auguucguguuucugguccuccuuccccugguuagcucccagugcgugaacuugaccacaagaacucaauuaccuccagccuacacuaauucuuucaccaggggcguauauuacccggacaagguguuucggucaaguguccugcacagcacacaggaucuauuccuccccuuuuucuccaacgugacuugguuucaugcuauccacguuucugggaccaauggaacaaaacgcuucgacaacccugugcugccauuuaaugauggugucuauuucgcaucgaccgagaagucaaacauuauacgaggcuggaucuuugggacuacacuugacagcaaaacccagagucuguugauugugaauaacgccacgaauguaguuaucaaggugugugaguuccaguuuugcaacgaucccuuccucggagucuacuaucauaaaaauaacaaguccuggauggagucugaguuccguguguacagcuccgcgaauaacuguacuuuugaauaugugucacaaccuuuccugauggaccuggaaggcaagcaggguaauuuuaaaaaccucagagaguucgucuuuaagaacauugauggguacuucaauaucuacaguaaacacaccccaauaaacuuaguuagggaccugccccagggauuuagcgcucuugagccuuugguggaucugccaaucggcauuaauaucacacgguuccagacucuacucgcccugcaucgcucuuaucuuaccccgggcgacuccucaagcggguggacagcaggagccgcugcauacuauguagguuaccugcaacccagaaccuuuuugcucaaguauaacgaaaauggcacgauuacugaugccguggacugcgcucuggauccuuuaagugagacaaaauguacccugaagucuuucacugucgaaaaggggaucuaccagacauccaacuuuagggugcagccaaccgagagcauaguucgguuccccaauauuacgaaccucugcccuuuuggagagguguucaaugccacccgcuucgcgucggucuaugcauggaaccgaaaaagaaucucuaauuguguggccgacuacuccguacuuuacaacucagcuaguuuuagcacauucaagugcuauggcguuuccccaacuaaacugaaugacuuguguuuuaccaacguguacgccgauucuuucgucauuaggggugacgaagugcggcagaucgcacccgggcaaacaggaaagaucgcugauuauaauuacaaacuaccggacgauuuuacuggcugcgucauugccuggaacagcaacaaucuggacucaaaggugggcgggaacuauaauuaccucuaucgucuguuccgcaaaaguaaccuuaagccuuuugagagagauauauccaccgaaaucuaccaggcgggaagcacacccuguaaugguguugagggcuucaacugcuacuuuccacugcagucuuauggguuccaaccuaccaauggagugggcuaccagcccuauaggguagucguguugucauuugaacuccugcacgccccagcaacuguuugcggucccaagaaaaguacgaacuuagugaagaauaaaugugucaacuucaauuuuaacgggcugacaggcaccggagugcuaacugagagcaauaagaaauuccucccuuuccagcaguuuggccgggacauugcugauaccacagacgccguacgagauccacaaacccuggagauccuugacauaacuccgugcuccuucgggggagugucuguuauuacacccgguacgaacaccucgaaucaggucgcuguguuguaccagggcgugaacuguacugaagucccuguugccauccacgcagaccagcugacaccaaccuggcgcguguauagcacaggguccaacguguuucaaacuagagccggaugccucaucggcgcugagcauguaaauaacucauacgaaugugauauucccaucggugcggggauuugcgcaaguuaucagacccagaccaauucuccuaggcgggcccgcagcgucgcuucccagucaauaaucgccuacacgaugagccugggcgcagagaacucuguggccuacuccaauaacaguauugcuaucccaacaaauuucacuaucagcguuaccacagaaauucuucccgugucuaugacuaagaccuccgucgacuguacgauguauauaugcggagauucaacagaguguaguaaccuguugcuccaauacggcagcuuuugcacccagcugaauagagccuuaacugggaucgcaguggagcaggacaagaacacacaggaaguuuucgcgcaagugaaacagauuuauaagaccccgccuaucaaagauuuuggagguuucaauuuuucgcagauucugccagaccccuccaagccuucuaaaaggagcuucaucgaggaucuacucuuuaacaagguaacucuggcugacgccggcuucauaaagcaauacggggauugucuuggagacaucgcagcccgugauuugauuugcgcucagaaauucaauggccugaccguccugcccccacucuuaacagacgaaaugaucgcccaguauacgucagcacugcuugcugguaccauuacgaguggguggacauuuggcgccggagcggccuugcagaucccuuucgcuaugcaaauggcauaccgguuuaacggcauaggggugacccagaaugugcucuaugagaaccagaagcugauugccaaccaguucaauuccgcuaucggaaaaauucaagauucucuaagcuccacagccucagcacugggcaagcuccaggacgucguuaaccagaaugcgcaggcccugaacacucuugugaaacaauugagcaguaauuuuggugcuaucucuuccguacugaacgacauauuaagccgacucgauaagguggaagccgagguccagaucgacagacugauuaccgggaggcuucagucgcugcaaacguacgugacacagcaguugauccgcgcagcugagauucgggccucagcaaaucucgccgcuaccaagaugucugaaugcguucugggacagaguaaaagaguggauuucuguggcaaggguuaccaccuaauguccuuuccccaaagcgcgccacauggcgucguguuccugcacguuacuuaugugccggcccaggagaaaaacuuuaccacagcuccugcaaucugccacgacgggaaggcccauuuccccagggaaggagucuuuguaucuaauggcacucacugguucgugacccagcgcaacuuuuacgagccacagauaauuacaacggauaauaccuucguuagcgggaacugugacguggucaucggaaucgugaauaacacuguauaugauccccuccaaccugagcuggacuccuucaaagaagaacuugauaaguacuuuaaaaaucauacaucaccagacguggauuugggcgacauuagugguaucaacgccagcgucguuaauauucagaaggaaauagaucgacugaacgagguggcuaagaacuuaaaugaaucucucaucgaccugcaggagcuugggaaauaugagcaguacauuaaguggcccugguauaucuggcugggauucauugcaggccuaaucgccauagugauggucaccaucaugcucugcuguaugacuuccugcuguucaugccugaaagguuguugcaguuguggcagcugcugcaaguuugacgaagaugacuccgagccuguguugaaagggguuaagcugcacuacacauga

SEQ ID NO: 11989 - RNA, 3822 nt, Artificial Sequence
  SARS-CoV-2/Belgium/BA-02291/2020__EPI_ISL_415159 spike protein CDS human (1-1273)
auguucguguuucugguccuccuuccccugguuagcucccagugcgugaacuugaccacaagaacucaauuaccuccagccuacacuaauucuuucaccaggggcguauauuacccggacaagguguuucggucaaguguccugcacagcacacaggaucuauuccuccccuuuuucuccaacgugacuugguuucaugcuauccacguuucugggaccaauggaacaaaacgcuucgacaacccugugcugccauuuaaugauggugucuauuucgcaucgaccgagaagucaaacauuauacgaggcuggaucuuugggacuacacuugacagcaaaacccagagucuguugauugugaauaacgccacgaauguaguuaucaaggugugugaguuccaguuuugcaacgaucccuuccucggagucuacuaucauaaaaauaacaaguccuggauggagucugaguuccguguguacagcuccgcgaauaacuguacuuuugaguaugugucacaaccuuuccugauggaccuggaaggcaagcaggguaauuuuaaaaaccucagagaguucgucuuuaagaacauugauggguacuucaaaaucuacaguaagcacaccccaauaaauuuaguuagggaccugccccagggauuuagcgcucuugagccuuugguggaucugccaaucggcauuaacaucacacgguuccagacucuacucgcccugcaucgcucuuaucuuaccccgggcgacuccucaagcggguggacagcaggagccgcugcauacuauguagguuaccugcaacccagaaccuuuuugcucaaauauaaugaaaacggcacgauuacugaugccguggacugcgcucuggauccuuuaagugagacaaaguguacccugaagucuuucacugucgaaaaagggaucuaccagacauccaauuuuagggugcagccaaccgagagcauaguucgguuccccaacauuacgaaucucugcccuuuuggagagguguucaacgccacccgcuucgcgucggucuaugcauggaaucgaaagagaaucucuaacuguguggccgacuacuccguacuuuacaauucagcuaguuuuagcacauucaaaugcuauggcguuuccccaacuaagcugaacgacuuguguuuuaccaauguguacgccgauucuuucgucauuaggggugacgaagugcggcagaucgcacccgggcaaacaggaaaaaucgcugauuauaacuacaagcuaccggacgauuuuacuggcugcgucauugccuggaauagcaacaaccuggacucaaaagugggcgggaauuauaacuaccucuaucgucuguuccgcagaaguaaucuuaagccuuuugagagggauauauccaccgaaaucuaccaggcgggaagcacacccuguaacgguguugagggcuucaauugcuacuuuccacugcagucuuauggguuccaaccuaccaacggagugggcuaccagcccuaucggguagucguguugucauuugaacuccugccagcccccgcaacuguuugcgguccuaagaaaaguacgaauuuagugaagaacaaaugugucaauuucaacuuuaaugggcugacaggcaccggagugcuaacugagagcaacaagaaauuccucccauuccagcaguuuggccgagacauugcugauaccacagacgccguacgcgauccgcaaacccuggagauccuugacauaacucccugcuccuucgggggagugucuguuauuacaccugguacgaauaccucgaaccaggucgcuguguuguaccagggcgugaauuguacugaagucccaguugccauccacgcagaccagcugacacccaccuggagaguguauagcacaggguccaacguguuucaaacuagggccggaugccucaucggcgcugagcacguaaacaauucauacgaaugugauauuccuaucggugcggggauuugcgcaaguuaucagacccagacgaacucuccacggcgcgccagaagcgucgcuucccagucaauaaucgccuacaccaugagccugggcgcagaaaauucuguggccuacuccaacaauaguauugcuauccccacaaacuucacuaucagcguuaccacagaaauucuuccggugucuaugacuaagaccuccgucgacuguacgauguauauaugcggagauucaacagaguguaguaaucuguugcuccaauacggcagcuuuugcacccagcugaacagggccuuaacugggaucgcaguggagcaggacaagaauacacaggaaguuuucgcgcaagugaaacagauuuauaagaccccuccaaucaaagauuuuggagguuucaacuuuucgcagauucugcccgacccuuccaagcccucuaaacguagcuucaucgaggaucuacucuuuaauaagguaacucuggcugacgccggcuucauaaagcaauacggggauugucuuggagacaucgcagcccgggauuugauuugcgcucagaaauucaacggccugaccguccucccaccucuguuaacagacgaaaugaucgcccaguauacgucagcacugcuugcugguaccauuacgaguggguggacauuuggcgccggagcggccuugcagauccccuucgcuaugcaaauggcauaccgauuuaauggcauaggggugacccagaacgugcucuaugagaaucagaagcugauugccaaccaguucaacuccgcuaucggaaaaauucaagauucucuaagcuccgccgcaccagcgcugggcaagcuccaggacgucguuaaucagaacgcccaggcucugaauacacuugugaaacaauugucaagcaacuuuggugccaucaguucuguacugaaugacauauuauccagacucgauaagguggaagcagagguccagaucgacaggcugauuacugggcgccuucagagccugcaaaccuacgugacgcagcaguugauccgggcugccgagauuagagcaucggccaaccucgcugcgacaaagaugucagaaugcguucugggacagucuaaaaggguggauuucuguggcaaggguuaccaucuaaugaguuuuccgcaauccgccccucacggcgucguguuccugcauguuaccuaugugcccgcacaggagaaaaauuuuacuaccgcuccagccaucugccacgacgggaaggcccacuucccccgcgaaggagucuuuguaagcaacggcacacauugguucgugacucagcgaaauuuuuacgagccucagauaauuaccacagauaacacguucguuucugggaauugugacguggucaucggaaucgugaacaauaccguauaugauccacuccaacccgagcuggacagcuucaaagaagaacuugauaaguacuuuaaaaaccacacuuccccugacguggauuugggcgacauuucagguaucaaugcuagugucguuaacauucagaaggaaauagaucggcugaaugagguggcaaagaacuuaaacgaaagccucaucgaccugcaggagcuugggaaauaugagcaguacauuaaguggccgugguauaucuggcugggauucauugccggccuaaucgcgauagugauggucacaaucaugcucugcuguaugaccucuugcuguuccugccugaaagguuguugcucauguggcaguugcugcaaguuugacgaagaugacagcgagccaguguugaaagggguuaagcugcauuacacuuga

SEQ ID NO: 11990 - RNA, 3822 nt, Artificial Sequence
  SARS-CoV-2/USA/WA8-UW5/2020__EPI_ISL_413486 spike protein CDS human (1-1273)
auguucguguuucugguccuccuuccccugguuagcucccagugcgugaacuugaccacaagaacucaauuaccuccagccuacacuaauucuuucaccaggggcguauauuacccggacaagguguuucggucaaguguccugcacagcacacaggaucuauuccuccccuuuuucuccaacgugacuugguuucaugcuauccacguuucugggaccaauggaacaaaacgcuucgacaacccugugcugccauuuaaugauggugucuauuucgcaucgaccgagaagucaaacauuauacgaggcuggaucuuugggacuacacuugacagcaaaacccagagucuguugauugugaauaacgccacgaauguaguuaucaaggugugugaguuccaguuuugcaacgaucccuuccucggagucuacuaucauaaaaauaacaaguccuggauggagucugaguuccguguguacagcuccgcgaauaacuguacuuuugaauaugugucacaaccuuuccugauggaccuggaaggcaagcaggguaauuuuaaaaaccucagagaguucgucuuuaagaacauugauggguacuucaaaaucuacaguaagcacaccccaauaaauuuaguuagggaccugccccagggauuuagcgcucuugagccuuugguggaucugccaaucggcauuaacaucacacgguuccagacucuacucgcccugcaucgcucuuaucuuaccccgggcgacuccucaagcggguggacagcaggagccgcugcauacuauguagguuaccugcaacccagaaccuuuuugcucaaauauaaugaaaacggcacgauuacugaugccguggacugcgcucuggauccuuuaagugagacaaaguguacccugaagucuuucacugucgaaaaagggaucuaccagacauccaauuuuagggugcagccaaccgagagcauaguucgguuccccaacauuacgaaucucugcccuuuuggagagguguucaacgccacccgcuucgcgucggucuaugcauggaaucgaaagagaaucucuaacuguguggccgacuacuccguacuuuacaauucagcuaguuuuagcacauucaaaugcuauggcguuuccccaacuaagcugaacgacuuguguuuuaccaauguguacgccgauucuuucgucauuaggggugacgaagugcggcagaucgcacccgggcaaacaggaaaaaucgcugauuauaacuacaagcuaccggacgauuuuacuggcugcgucauugccuggaauagcaacaaccuggacucaaaagugggcgggaauuauaacuaccucuaucgucuguuccgcaagaguaaucuuaagccuuuugagagagauauauccaccgaaaucuaccaggcgggaagcacacccuguaacgguguugagggcuucaauugcuacuuuccacugcagucuuauggguuccaaccuaccaacggagugggcuaccagcccuauaggguagucguguugucauuugaacuccugcacgccccagcaacuguuugcggucccaaaaagaguacgaauuuagugaaaaacaagugugucaauuucaacuuuaaugggcugacaggcaccggagugcuaacugagagcaacaaaaaguuccucccuuuccagcaguuuggccgggacauugcugauaccacagacgccguacgagauccacaaacccuggagauccuugacauaacuccgugcuccuucgggggagugucuguuauuacacccgguacgaauaccucgaaccaggucgcuguguuguaccaggacgugaauuguacugaagucccuguugccauccacgcagaucagcugacaccaaccuggcgcguguauagcacaggcuccaacguguuucaaacuagagccgggugccucaucggagcugaguacguaaacaauucauaugaaugugacauucccaucggcgcggguauuugcgcaaguuaccagacccagacgaacucuccuaggcgggcccgcagcgucgcuucccagucaauaaucgccuacaccaugagccugggggcagaaaauucuguggccuauuccaacaauaguauugcuaucccaacaaacuucacuaucagcguuaccacagaaauucuucccgugucuaugacuaagaccuccgucgauuguacgauguacauaugcggcgacucaacagaguguaguaaucuguugcuccaauauggcagcuuuugcacccagcugaacagagccuuaacuggaaucgcaguggagcaggauaaaaauacacaggaaguuuucgcgcaagugaagcagauuuacaaaaccccgccuaucaaggacuuugggggauucaacuuuucgcagauucugccagaucccuccaaaccuucuaagaggagcuucaucgaggaccuacucuuuaauaagguaacucuggcugaugccgguuucauaaaacaauauggcgacugucuuggggauaucgcagcccgugacuugauuugcgcucagaaguucaacggacugaccguccugcccccacucuuaacagaugaaaugaucgcccaguacacgucagcacugcuugcuggcaccauuacgagugguuggacauuuggggccggcgcggccuugcagaucccuuucgcuaugcaaauggcauaucgguuuaauggaauaggcgugacccagaacgugcucuacgagaaucagaaacugauugccaaccaguucaacuccgcuaucgggaagauucaagacucucuaagcuccacagccucagcacugggaaaacuccaggacgucguuaaucagaacgcgcaggcccugaauacucuugugaagcaauugagcaguaacuuuggcgcuaucucuuccguacugaaugauauauuaagccgacucgacaagguggaagccgagguccagaucgauagacugauuaccgguaggcuucagucgcugcaaacguacgugacacagcaguugauccgcgcagcugagauucgggccucagcaaaccucgccgcuaccaaaaugucugaaugcguucuggggcagaguaagagaguggacuucuguggaaaaggcuaucaucuaauguccuuuccccaaagcgcgccacacggugucguguuccugcauguuacuuacgugccggcccaggagaagaauuuuaccacagcuccugcaaucugccacgauggcaaagcccacuuccccagggaaggggucuuuguaucuaacggaacucauugguucgugacccagcgcaauuuuuaugagccacagauaauuacaacggacaacaccuucguuagcggcaauugugauguggucaucgggaucgugaacaauacuguauacgacccccuccaaccugagcuggauuccuucaaggaggaacuugacaaauauuuuaagaaccacacaucaccagauguggacuugggagauauuaguggcaucaaugccagcgucguuaacauucagaaggaaauagaccgacugaaugagguggcuaaaaacuuaaacgaaucucucaucgaccugcaggagcuugguaaguacgagcaguauauuaaauggcccugguacaucuggcugggguucauugcaggacuaaucgccauagugauggucaccaucaugcucugcuguaugacuuccugcuguucaugccugaagggcuguugcaguugugguagcugcugcaaauuugaugaagacgauuccgagccuguguugaagggcguuaagcugcauuacacauga

SEQ ID NO: 11991 - RNA, 3822 nt, Artificial Sequence
  SARS-CoV-2/England/20102000506/2020__EPI_ISL_415147 spike protein CDS human (1-1273)
auguucguguuucugguccuccuuccccugguuagcucccagugcgugaacuugaccacaagaacucaauuaccuccagccuacacuaauucuuucaccaggggcguauauuacccggacaagguguuucggucaaguguccugcacagcacacaggaucuauuccuccccuuuuucuccaacgugacuugguuucaugcuauccacguuucugggaccaauggaacaaaacgcuucgacaacccugugcugccauuuaaugauggugucuauuucgcaucgaccgagaagucaaacauuauacgaggcuggaucuuugggacuacacuugacagcaaaacccagagucuguugauugugaauaacgccacgaauguaguuaucaaggugugugaguuccaguuuugcaacgaucccuuccucggagucuacuaucauaaaaauaacaaguccuggauggagucugaguuccguguguacagcuccgcgaauaacuguacuuuugaguaugugucacaaccuuuccugauggaccuggaaggcaagcaggguaauuuuaaaaaccucagagaguucgucuuuaagaacauugauggguacuucaaaaucuacaguaagcacaccccaauaaauuuaguuagggaccugccccagggauuuagcgcucuugagccuuugguggaucugccaaucggcauuaacaucacacgguuccagacucuacucgcccugcaucgcucuuaucuuaccccgggcgacuccucaagcggguggacagcaggagccgcugcauacuauguagguuaccugcaacccagaaccuuuuugcucaaauauaaugaaaacggcacgauuacugaugccguggacugcgcucuggauccuuuaagugagacaaaguguacccugaagucuuucacugucgaaaaagggaucuaccagacauccaauuuuagggugcagccaaccgagagcauaguucgguuccccaacauuacgaaucucugcccuuuuggagagguguucaacgccacccgcuucgcgucggucuaugcauggaaucgaaagagaaucucuaacuguguggccgacuacuccguacuuuacaauucagcuaguuuuagcacauucaaaugcuauggcguuuccccaacuaagcugaacgacuuguguuuuaccaauguguacgccgauucuuucgucauuaggggugacgaagugcggcagaucgcacccgggcaaacaggaaaaaucgcugauuauaacuacaagcuaccggacgauuuuacuggcugcgucauugccuggaauagcaacaaccuggacucaaaagugggcgggaauuauaacuaccucuaucgucuguuccgcaagaguaaucuuaagccuuuugagagagauauauccaccgaaaucuaccaggcgggaagcacacccuguaacgguguugagggcuucaauugcuacuuuccacugcagucuuauggguuccaaccuaccaacggagugggcuaccagcccuauaggguagucguguugucauuugaacuccugcacgccccagcaacuguuugcggucccaaaaagaguacgaauuuagugaaaaacaagugugucaauuucaacuuuaaugggcugacaggcaccggagugcuaacugagagcaacaaaaaguuccucccuuuccagcaguuuggccgggacauugcugauaccacagacgccguacgagauccacaaacccuggagauccuugacauaacuccgugcuccuucgggggagugucuguuauuacacccgguacgaauaccucgaaccaggucgcuguguuguaccagggcgugaauuguacugaagucccuguugccauccacgcagaccagcugacaccaaccuggcgcguguauagcacaggguccaacguguuucaaacuagagccggaugccucaucggcgcugagcauguaaacaauucauacgaaugugauauucccaucggugcggggauuugcgcaaguuaucagacccagacgaacucuccuaggcgggcccgcagcgucgcuucccagucaauaaucgccuacaccaugagccugggcgcagaaaauucuguggccuacuccaacaauaguauugcuaucccaacaaacuucacuaucagcguuaccacagaaauucuucccgugucuaugacuaagaccuccgucgacuguacgauguauauaugcggagauucaacagaguguaguaaucuguugcuccaauacggcagcuuuugcacccagcugaacagagccuuaacugggaucgcaguggagcaggacaaaaauacacaggaaguuuucgcgcaagugaagcagauuuauaaaaccccgccuaucaaggauuuuggagguuucaacuuuucgcagauucugccagaccccuccaaaccuucuaagaggagcuucaucgaggaucuacucuuuaauaagguaacucuggcugacgccggcuucauaaaacaauacggguauugucuuggagauaucgcagcccgugacuugauuugcgcucagaaguucaacggccugaccguccugcccccacucuuaacagaugaaaugaucgcccaguacacgucagcacugcuugcugguaccauuacgaguggguggacauuuggcgccggagcggccuugcagaucccuuucgcuaugcaaauggcauaucgguuuaauggcauaggggugacccagaacgugcucuacgagaaucagaaacugauugccaaccaguucaacuccgcuaucggaaagauucaagacucucuaagcuccacagccucagcacugggcaaacuccaggaugucguuaaucagaacgcgcaggcccugaauacucuugugaagcaauugagcaguaacuuuggugcuaucucuuccguacugaaugacauauuaagccgacucgacaagguggaagccgagguccagaucgauagacugauuaccgggaggcuucagucgcugcaaacguacgugacacagcaguugauccgcgcagcugagauucgggccucagcaaaccucgccgcuaccaaaaugucugaaugcguucugggacagaguaagagaguggacuucuguggcaaagguuaucaccuaauguccuuuccccaaagcgcgccacauggcgucguguuccugcacguuacuuacgugccggcccaggagaagaauuuuaccacagcuccugcaaucugccacgaugggaaagcccauuuccccagggaaggagucuuuguaucuaacggcacucacugguucgugacccagcgcaauuuuuaugagccacagauaauuacaacggacaacaccuucguuagcgggaauugugauguggucaucggaaucgugaacaauacuguauacgacccccuccaaccugagcuggauuccuucaaggaagaacuugacaaauauuuuaagaaccauacaucaccagauguggacuugggcgauauuagugguaucaaugccagcgucguuaacauucagaaggaaauagaccgacugaaugagguggcuaaaaacuuaaacgaaucucucaucgaucugcaggagcuugggaaguacgagcaguauauuaaauggcccugguacaucuggcugggauucauugcaggccuaaucgccauagugauggucaccaucaugcucugcuguaugacuuccugcuguucaugccugaaggguuguugcaguuguggcagcugcugcaaauuugacgaagacgauuccgagccuguguugaaggggguuaagcugcacuacacauga

SEQ ID NO: 11992 - RNA, 3822 nt, Artificial Sequence
  SARS-CoV-2/Belgium/VAG-03013/2020__EPI_ISL_415155 spike protein CDS human (1-1273)
auguucguguuucugguccuccuuccccugguuagcucccagugcgugaacuugaccacaagaacucaauuaccuccagccuacacuaauucuuucaccaggggcguauauuacccggacaagguguuucggucaaguguccugcacagcacacaggaucuauuccuccccuuuuucuccaacgugacuugguuucaugcuauccacguuucugggaccaauggaacaaaacgcuucgacaacccugugcugccauuuaaugauggugucuauuucgcaucgaccgagaagucaaacauuauacgaggcuggaucuuugggacuacacuugacagcaaaacccagagucuguugauugugaauaacgccacgaauguaguuaucaaggugugugaguuccaguuuugcaacgaucccuuccucggagucuacuaucauaaaaauaacaaguccuggauggagucugaguuccguguguacagcuccgcgaauaacuguacuuuugaguaugugucacaaccuuuccugauggaccuggaaggcaagcaggguaauuuuaaaaaccucagagaguucgucuuuaagaacauugauggguacuucaaaaucuacaguaagcacaccccaauaaauuuaguuagggaccugccccagggauuuagcgcucuugagccuuugguggaucugccaaucggcauuaacaucacacgguuccagacucuacucgcccugcaucgcucuuaucuuaccccgggcgacuccucaagcggguggacagcaggagccgcugcauacuauguagguuaccugcaacccagaaccuuuuugcucaaauauaaugaaaacggcacgauuacugaugccguggacugcgcucuggauccuuuaagugagacaaaguguacccugaagucuuucacugucgaaaaagggaucuaccagacauccaauuuuagggugcagccaaccgagagcauaguucgguuccccaacauuacgaaucucugcccuuuuggagagguguucaacgccacccgcuucgcgucggucuaugcauggaaucgaaagagaaucucuaacuguguggccgacuacuccguacuuuacaauucagcuaguuuuagcacauucaaaugcuauggcguuuccccaacuaagcugaacgacuuguguuuuaccaauguguacgccgauucuuucgucauuaggggugacgaagugcggcagaucgcacccgggcaaacaggaaaaaucgcugauuauaacuacaagcuaccggacgauuuuacuggcugcgucauugccuggaauagcaacaaccuggacucaaaagugggcgggaauuauaacuaccucuaucgucuguuccgcaagaguaaucuuaagccuuuugagagagauauauccaccgaaaucuaccaggcgggaagcacacccuguaacgguguugagggcuucaauugcuacuuuccacugcagucuuauggguuccaaccuaccaacggagugggcuaccagcccuauaggguagucguguugucauuugaacuccugcacgccccagcaacuguuugcggucccaaaaagaguacgaauuuagugaaaaacaagugugucaauuucaacuuuaaugggcugacaggcaccggagugcuaacugagagcaacaaaaaguuccucccuuuccagcaguuuggccgggacauugcugauaccacagacgccguacgagauccacaaacccuggagauccuugacauaacuccgugcuccuucgggggagugucuguuauuacacccgguacgaauaccucgaaccaggucgcuguguuguaccagggcgugaauuguacugaagucccuguugccauccacgcagaccagcugacaccaaccuggcgcguguauagcacaggguccaacguguuucaaacuagagccggaugccucaucggcgcugagcauguaaacaauucauacgaaugugauauucccaucggugcggggauuugcgcaaguuaucagacccagacgaacucuccuaggcgggcccgcagcgucgcuucccagucaauaaucgccuacaccaugagccugggcgcagaaaauucuguggccuacuccaacaauaguauugcuaucccaacaaacuucacuaucagcguuaccacagaaauucuucccgugucuaugacuaagaccuccgucgacuguacgauguauauaugcggagauucaacagaguguaguaaucuguugcuccaauacggcagcuuuugcacccagcugaacagagccuuaacugggaucgcaguggagcaggacaaaaauacacaggaaguuuucgcgcaagugaagcagauuuauaaaaccccgccuaucaaggauuuuggagguuucaacuuuucgcagauucugccagaccccuccaaaccuucuaagaggagcuucaucgaggaucuacucuuuaauaagguaacucuggcugacgccggcuucauaaaacaauacggggauugucuuggagacaucgcagcccgugauuugauuugcgcucagaaguucaacggccugaccguccugcccccacucuuaacagacgaaaugaucgcccaguauacgucagcacugcuugcugguaccauuacgaguggguggacauuuggcgccggagcggccuugcagaucccuuucgcuaugcaaauggcauaccgguuuaauggcauaggggugacccagaacgugcucuaugagaaucagaaacugauugccaaccaguucaacuccgcuaucggaaagauucaagauucucuaagcuccacagccacugcacugggcaaacuccaggacgucguuaaucagaacgcgcaggcccugaauacccuugugaagcaauugucaagcaacuuuggugcuaucaguucuguacugaaugacauauuaucccgacucgauaagguggaagccgagguccagaucgacagacugauuacggggaggcuucagagccugcaaacauacgugacccagcaguugauccgcgcagcugagauucgggccucggcaaaccucgccgcuacuaaaaugucagaaugcguucugggacagucuaagagaguggauuucuguggcaaagguuaccaccuaaugaguuuuccccaauccgcgccacauggcgucguguuccugcacguuaccuaugugccggcccaggagaagaauuuuacaacugcuccugcaaucugccacgacgggaaagcccauuuccccagggaaggagucuuuguaagcaacggcacccacugguucgugacacagcgcaauuuuuacgagccacagauaauuacgaccgauaacacuuucguuucugggaauugugacguggucaucggaaucgugaacaauacaguauaugauccccuccaaccugagcuggacagcuucaaggaagaacuugauaaauacuuuaagaaccauaccuccccagacguggauuugggcgacauuucagguaucaaugccagugucguuaacauucagaaggaaauagaucgacugaaugagguggcuaaaaacuuaaacgaaagccucaucgaccugcaggagcuugggaaguaugagcaguacauuaaauggcccugguauaucuggcugggauucauugcaggccuaaucgccauagugauggucacuaucaugcucugcuguaugacaucuugcuguuccugccugaaggguuguugcucauguggcaguugcugcaaauuugacgaagaugacagcgagccuguguugaaggggguuaagcugcacuacaccuga

SEQ ID NO: 11993 - RNA, 3822 nt, Artificial Sequence
  SARS-CoV-2/Belgium/BC-03016/2020__EPI_ISL_415157 spike protein CDS human (1-1273)
auguucguguuucugguccuccuuccccugguuagcucccagugcgugaacuugaccacaagaacucaauuaccuccagccuacacuaauucuuucaccaggggcguauauuacccggacaagguguuucggucaaguguccugcacagcacacaggaucuauuccuccccuuuuucuccaacgugacuugguuucaugcuauccacguuucugggaccaauggaacaaaacgcuucgacaacccugugcugccauuuaaugauggugucuauuucgcaucgaccgagaagucaaacauuauacgaggcuggaucuuugggacuacacuugacagcaaaacccagagucuguugauugugaauaacgccacgaauguaguuaucaaggugugugaguuccaguuuugcaacgaucccuuccucggagucuacuaucauaaaaauaacaaguccuggauggagucugaguuccguguguacagcuccgcgaauaacuguacuuuugaguaugugucacaaccuuuccugauggaccuggaaggcaagcaggguaauuuuaaaaaccucagagaguucgucuuuaagaacauugauggguacuucaaaaucuacaguaagcacaccccaauaaauuuaguuagggaccugccccagggauuuagcgcucuugagccuuugguggaucugccaaucggcauuaacaucacacgguuccagacucuacucgcccugcaucgcucuuaucuuaccccgggcgacuccucaagcggguggacagcaggagccgcugcauacuauguagguuaccugcaacccagaaccuuuuugcucaaauauaaugaaaacggcacgauuacugaugccguggacugcgcucuggauccuuuaagugagacaaaguguacccugaagucuuucacugucgaaaaagggaucuaccagacauccaauuuuagggugcagccaaccgagagcauaguucgguuccccaacauuacgaaucucugcccuuuuggagagguguucaacgccacccgcuucgcgucggucuaugcauggaaucgaaagagaaucucuaacuguguggccgacuacuccguacuuuacaauucagcuaguuuuagcacauucaaaugcuauggcguuuccccaacuaagcugaacgacuuguguuuuaccaauguguacgccgauucuuucgucauuaggggugacgaagugcggcagaucgcacccgggcaaacaggaaaaaucgcugauuauaacuacaagcuaccggacgauuuuacuggcugcgucauugccuggaauagcaacaaccuggacucaaaagugggcgggaauuauaacuaccucuaucgucuguuccgcaagaguaaucuuaagccuuuugagagagauauauccaccgaaaucuaccaggcgggaagcacacccuguaacgguguugagggcuucaauugcuacuuuccacugcagucuuauggguuccaaccuaccaacggagugggcuaccagcccuauaggguagucguguugucauuugaacuccugcacgccccagcaacuguuugcggucccaaaaagaguacgaauuuagugaaaaacaagugugucaauuucaacuuuaaugggcugacaggcaccggagugcuaacugagagcaacaaaaaguuccucccuuuccagcaguuuggccgggacauugcugauaccacagacgccguacgagauccacaaacccuggagauccuugacauaacuccgugcuccuucgggggagugucuguuauuacacccgguacgaauaccucgaaccaggucgcuguguuguaccagggcgugaauuguacugaagucccuguugccauccacgcagaccagcugacaccaaccuggcgcguguauagcacaggguccaacguguuucaaacuagagccggaugccucaucggcgcugagcauguaaacaauucauacgaaugugauauucccaucggugcggggauuugcgcaaguuaucagacccagacgaacucuccuaggcgggcccgcagcgucgcuucccagucaauaaucgccuacaccaugagccugggcgcagaaaauucuguggccuacuccaacaauaguauugcuaucccaacaaacuucacuaucagcguuaccacagaaauucuucccgugucuaugacuaagaccuccgucgacuguacgauguauauaugcggagauucaacagaguguaguaaucuguugcuccaauacggcagcuuuugcacccagcugaacagagccuuaacugggaucgcaguggagcaggacaaaaauacacaggaaguuuucgcgcaagugaagcagauuuauaaaaccccgccuaucaaggauuuuggagguuucaacuuuucgcagauucugccagaccccuccaaaccuucuaagaggagcuucaucgaggaucuacucuuuaauaagguaacucuggcugacgccggcuucauaaaacaauacggggauugucuuggagacaucgcagcccgugauuugauuugcgcucagaaguucaacggccugaccguccugcccccacucuuaacagacgaaaugaucgcccaguauacgucagcacugcuugcugguaccauuacgaguggguggacauuuggcgccggagcggccuugcagaucccuuucgcuaugcaaauggcauaccgguuuaauggcauaggggugacccagaacgugcucuaugagaaucagaaacugauugccaaccaguucaacuccgcuaucggaaagauucaagauucucuaagcuccacagcccccgcacugggcaaacuccaggacgucguuaaucagaacgcgcaggcccugaauacucuugugaagcaauugucaagcaacuuuggugcuaucaguucuguacugaaugacauauuaucccgacucgauaagguggaagccgagguccagaucgacagacugauuaccgggaggcuucagagccugcaaacguacgugacacagcaguugauccgcgcagcugagauucgggccucggcaaaccucgccgcuaccaaaaugucagaaugcguucugggacagucuaagagaguggauuucuguggcaaagguuaccaccuaaugaguuuuccacaauccgcgccgcauggcgucguguuccugcacguuacuuaugugccugcccaggagaagaauuuuaccacagcacccgcuaucugccacgacgggaaagcccauuucccaagggaaggagucuuuguaagcaacggcacucacugguucgugacccagcgcaauuuuuacgagccccagauaauuacaacggauaacaccuucguuucugggaauugugacguggucaucggaaucgugaacaauacuguauaugauccucuccaaccagagcuggacagcuucaaggaagaacuugauaaauacuuuaagaaccauacaucccccgacguggauuugggcgacauuucagguaucaaugccagugucguuaacauucagaaggaaauagaucgacugaaugagguggcuaaaaacuuaaacgaaagccucaucgaccugcaggagcuugggaaguaugagcaguacauuaaauggccuugguauaucuggcugggauucauugcaggccuaaucgccauagugauggucaccaucaugcucugcuguaugacuucuugcuguuccugccugaaggguuguugcucauguggcaguugcugcaaauuugacgaagaugacagcgagccgguguugaaggggguuaagcugcacuacacauga

SEQ ID NO: 11994 - RNA, 3822 nt, Artificial Sequence
  SARS-CoV-2/Germany/BavPat3/2020__EPI_ISL_414521 spike protein CDS human (1-1273)
auguucguguuucugguccuccuuccccugguuagcucccagugcgugaacuugaccacaagaacucaauuaccuccagccuacacuaauucuuucaccaggggcguauauuacccggacaagguguuucggucaaguguccugcacagcacacaggaucuauuccuccccuuuuucuccaacgugacuugguuucaugcuauccacguuucugggaccaauggaacaaaacgcuucgacaacccugugcugccauuuaaugauggugucuauuucgcaucgaccgagaagucaaacauuauacgaggcuggaucuuugggacuacacuugacagcaaaacccagagucuguugauugugaauaacgccacgaauguaguuaucaaggugugugaguuccaguuuugcaacgaucccuuccucggagucuacuaucauaaaaauaacaaguccuggauggagucugaguuccguguguacagcuccgcgaauaacuguacuuuugaauaugugucacaaccuuuccugauggaccuggaaggcaagcaggguaauuuuaaaaaccucagagaguucgucuuuaagaacauugauggguacuucaaaaucuacaguaagcacaccccaauaaauuuaguuagggaccugccccagggauuuagcgcucuugagccuuugguggaucugccaaucggcauuaacaucacacgguuccagacucuacucgcccugcaucgcucuuaucuuaccccgggcgacuccucaagcggguggacagcaggagccgcugcauacuauguagguuaccugcaacccagaaccuuuuugcucaaauauaaugaaaacggcacgauuacugaugccguggacugcgcucuggauccuuuaagugagacaaaguguacccugaagucuuucacugucgaaaaagggaucuaccagacauccaauuuuagggugcagccaaccgagagcauaguucgguuccccaacauuacgaaucucugcccuuuuggagagguguucaacgccacccgcuucgcgucggucuaugcauggaaucgaaagagaaucucuaacuguguggccgacuacuccguacuuuacaauucagcuaguuuuagcacauucaaaugcuauggcguuuccccaacuaagcugaacgacuuguguuuuaccaauguguacgccgauucuuucgucauuaggggugacgaagugcggcagaucgcacccgggcaaacaggaaaaaucgcugauuauaacuacaagcuaccggacgauuuuacuggcugcgucauugccuggaauagcaacaaccuggacucaaaagugggcgggaauuauaacuaccucuaucgucuguuccgcaagaguaaucuuaagccuuuugagagagauauauccaccgaaaucuaccaggcgggaagcacacccuguaacgguguugagggcuucaauugcuacuuuccacugcagucuuauggguuccaaccuaccaacggagugggcuaccagcccuauaggguagucguguugucauuugaacuccugcacgccccagcaacuguuugcggucccaaaaagaguacgaauuuagugaaaaacaagugugucaauuucaacuuuaaugggcugacaggcaccggagugcuaacugagagcaacaaaaaguuccucccuuuccagcaguuuggccgggacauugcugauaccacagacgccguacgagauccacaaacccuggagauccuugacauaacuccgugcuccuucgggggagugucuguuauuacacccgguacgaauaccucgaaccaggucgcuguguuguaccaggacgugaauuguacugaagucccuguugccauccacgcagaucagcugacaccaaccuggcgcguguauagcacaggcuccaacguguuucaaacuagagccgggugccucaucggagcugagcauguaaacaauucauacgaaugugacauucccaucggcgcggguauuugcgcaaguuaucagacccagacgaacucuccuaggcgggcccgcagcgucgcuucccagucaauaaucgccuacaccaugagccugggggcagaaaauucuguggccuacuccaacaauaguauugcuaucccaacaaacuucacuaucagcguuaccacagaaauucuucccgugucuaugacuaagaccuccgucgauuguacgauguauauaugcggcgacucaacagaguguaguaaucuguugcuccaauacggcagcuuuugcacccagcugaacagagccuuaacuggaaucgcaguggagcaggauaaaaauacacagcaaguuuucgcacaggugaagcagauuuauaaaaccccgccuaucaaggacuuugggggauucaacuuuucgcaaauucugccagaucccuccaaaccuucuaagaggagcuucaucgaagaccuacucuuuaauaagguaacucuggcugaugccgguuucauaaaacaguacggcgacugucuuggggauaucgcagcccgugacuugauuugcgcucagaaguucaacggacugaccguccugcccccacucuuaacagaugagaugaucgcccaguauacgucagcacugcuugcuggcaccauuacgagugguuggacauuuggggccggcgcggccuugcaaaucccuuucgcuaugcagauggcauaccgguuuaauggaauaggcgugacccagaacgugcucuaugaaaaucagaaacugauugccaaccaauucaacuccgcuaucgggaagauucaggacucucuaagcuccacagccucagcacugggaaaacuccaggacgucguuaaucagaacgcgcaagcccugaauacucuugugaagcaguugagcaguaacuuuggcgcuaucucuuccguacugaaugauauauuaagccgacucgacaagguggaggccgaaguccagaucgauagacugauuaccgguaggcuucaaucgcugcagacguacgugacacagcaguugauccgcgcagcugagauucgggccucagcaaaccucgccgcuaccaaaaugucugagugcguucuggggcaaaguaagagaguggacuucuguggaaaaggcuaccaccuaauguccuuuccccagagcgcgccacauggugucguguuccugcacguuacuuaugugccggcccaggaaaagaauuuuaccacagcgccugcuaucugccacgauggcaaagcccauuuccccagggagggggucuuuguaucuaacggaacucacugguucgugacccagcgcaauuuuuacgaaccacaaauaauuacaacggacaacaccuucguuagcggcaauugugauguggucaucgggaucgugaacaauacuguauaugacccccuccagccugagcuggauuccuucaaggaggaacuugacaaauacuuuaagaaccauacaucaccagauguggacuugggagauauuaguggcaucaaugccagcgucguuaacauucagaaggagauagaccgacugaaugaaguggcuaaaaacuuaaacgagucucucaucgaccugcaggaacuugguaaguaugagcaauacauuaaauggcccugguauaucuggcugggguucauugcaggacuaaucgccauagugauggucaccaucaugcucugcuguaugacuuccugcuguucaugccugaagggcuguugcaguugugguagcugcugcaaauuugaugaggacgauuccgaaccuguguugaagggcguuaagcugcacuacacauga

SEQ ID NO: 11995 - RNA, 3822 nt, Artificial Sequence
  SARS-CoV-2/France/HF1805/2020__EPI_ISL_414628 spike protein CDS human (1-1273)
auguucguguuucugguccuccuuccccugguuagcucccagugcgugaacuugaccacaagaacucaauuaccuccagccuacacuaauucuuucaccaggggcguauauuacccggacaagguguuucggucaaguguccugcacagcacacaggaucuauuccuccccuuuuucuccaacgugacuugguuucaugcuauccacguuucugggaccaauggaacaaaacgcuucgacaacccugugcugccauuuaaugauggugucuauuucgcaucgaccgagaagucaaacauuauacgaggcuggaucuuugggacuacacuugacagcaaaacccagagucuguugauugugaauaacgccacgaauguaguuaucaaggugugugaguuccaguuuugcaacgaucccuuccucggagucuacuaucauaaaaauaacaaguccuggauggagucugaguuccguguguacagcuccgcgaauaacuguacuuuugaguaugugucacaaccuuuccugauggaccuggaaggcaagcaggguaauuuuaaaaaccucagagaguucgucuuuaagaacauugauggguacuucaaaaucuacaguaagcacaccccaauaaauuuaguuagggaccugccccagggauuuagcgcucuugagccuuugguggaucugccaaucggcauuaacaucacacgguuccagacucuacucgcccugcaucgcucuuaucuuaccccgggcgacuccucaagcggguggacagcaggagccgcugcauacuauguagguuaccugcaacccagaaccuuuuugcucaaauauaaugaaaacggcacgauuacugaugccguggacugcgcucuggauccuuuaagugagacaaaguguacccugaagucuuucacugucgaaaaagggaucuaccagacauccaauuuuagggugcagccaaccgagagcauaguucgguuccccaacauuacgaaucucugcccuuuuggagagguguucaacgccacccgcuucgcgucggucuaugcauggaaucgaaagagaaucucuaacuguguggccgacuacuccguacuuuacaauucagcuaguuuuagcacauucaaaugcuauggcguuuccccaacuaagcugaacgacuuguguuuuaccaauguguacgccgauucuuucgucauuaggggugacgaagugcggcagaucgcacccgggcaaacaggaaaaaucgcugauuauaacuacaagcuaccggacgauuuuacuggcugcgucauugccuggaauagcaacaaccuggacucaaaagugggcgggaauuauaacuaccucuaucgucuguuccgcaagaguaaucuuaagccuuuugagagagauauauccaccgaaaucuaccaggcgggaagcacacccuguaacgguguugagggcuucaauugcuacuuuccacugcagucuuauggguuccaaccuaccaacggagugggcuaccagcccuauaggguagucguguugucauuugaacuccugcacgccccagcaacuguuugcggucccaaaaagaguacgaauuuagugaaaaacaagugugucaauuucaacuuuaaugggcugacaggcaccggagugcuaacugagagcaacaaaaaguuccucccuuuccagcaguuuggccgggacauugcugauaccacagacgccguacgagauccacaaacccuggagauccuugacauaacuccgugcuccuucgggggagugucuguuauuacacccgguacgaauaccucgaaccaggucgcuguguuguaccagggcgugaauuguacugaagucccuguugccauccacgcagaccagcugacaccaaccuggcgcguguauagcacaggguccaacguguuucaaacuagagccggaugccucaucggcgcugagcauguaaacaauucauacgaaugugauauucccaucggugcggggauuugcgcaaguuaucagacccagacgaacucuccuaggcgggcccgcagcgucgcuucccagucaauaaucgccuacaccaugagccugggcgcagaaaauucuguggccuacuccaacaauaguauugcuaucccaacaaacuucacuaucagcguuaccacagaaauucuucccgugucuaugacuaagaccuccgucgacuguacgauguauauaugcggagauucaacagaguguaguaaucuguugcuccaauacggcagcuuuugcacccagcugaacagagccuuaacugggaucgcaguggagcaggacaaaaauacacaggaaguuuucgcgcaagugaagcagauuuauaaaaccccgccuaucaaggauuuuggagguuucaacuuuucgcagauucugccagaccccuccaaaccuucuaagaggagcuucaucgaggaucuacucuuuaauaagguaacucuggcugacgccggcuucauaaaacaauacggggauugucuuggagacaucgcagcccgugauuugauuugcgcucagaaguucaacggccugaccguccugcccccacucuuaacagacgaaaugaucgcccaguauacgucagcacugcuugcugguaccauuacgaguggguggacauuuggcgccggagcggccuugcagaucccuuucgcuaugcaaauggcauaccgguuuaauggcauaggggugacccagaacgugcucuaugagaaucagaaacugauugccaaccaguucaacuccgcuaucggaaagauucaagauucucuaagcuccacagccucagcacugggcaaacuccaggacgucguuaaucagaacgcgcaggcccugaauacucuugugaagcaauugagcaguaacuuuggugcuaucucuuccguacugaaugacauauuaagccgacucgauaagguggaagccgagguccagaucgacagacugauuaccgggaggcuucagucgcugcaaacguacgugacacagcaguugauccgcgcagcugagauucgggccucagcaaaccucgccgcuaccaaaaugucugaaugcguucugggacagaguaagagaguggauuucuguggcaaagguuaccaccuaauguccuuuccccaaagcgcgccacauggcgucguguuccugcacguuacuuaugugccggcccaggagaagaauuuuaccacagcuccugcaaucugccacgacgggaaagcccauuuccccagggaaggagucuuuguaucuaacggcacucacugguucgugacccagcgcaauuuuuacgagccacagauaauuacaacggauaacaccuucguuagcgggaauugugacguggucaucggagugguaaacaauacuguguaugauccccuccaaccugagcuggacuccuucaaggaagaacuugauaaauacuuuaagaaccauacaucaccagacgucgauuugggcgacaucagugguauuaaugccagcguugugaacauccagaaggaaauugaucgacugaaugagguggcuaaaaacuuaaacgaaucucucauagaccugcaggagcuugggaaguaugagcaguacaucaaauggcccugguauauuuggcugggauucaucgcaggccuaauugccaucgucauggugaccauaaugcucugcuguaugacuuccugcuguucaugccugaaggguuguugcaguuguggcagcugcugcaaauuugacgaagaugacuccgagccuguuuugaaggggguaaagcugcacuacacauga

SEQ ID NO: 11996 - RNA, 3822 nt, Artificial Sequence
  SARS-CoV-2/Netherlands/ZuidHolland_9/2020__EPI_ISL_414445 spike protein CDS human (1-1273)
auguucguguuucugguccuccuuccccugguuagcucccagugcgugaacuugaccacaagaacucaauuaccuccagccuacacuaauucuuucaccaggggcguauauuacccggacaagguguuucggucaaguguccugcacagcacacaggaucuauuccuccccuuuuucuccaacgugacuugguuucaugcuauccacguuucugggaccaauggaacaaaacgcuucgacaacccugugcugccauuuaaugauggugucuauuucgcaucgaccgagaagucaaacauuauacgaggcuggaucuuugggacuacacuugacagcaaaacccagagucuguugauugugaauaacgccacgaauguaguuaucaaggugugugaguuccaguuuugcaacgaucccuuccucggagucuacuaucauaaaaauaacaaguccuggauggagucugaguuccguguguacagcuccgcgaauaacuguacuuuugaguaugugucacaaccuuuccugauggaccuggaaggcaagcaggguaauuuuaaaaaccucagagaguucgucuuuaagaacauugauggguacuucaaaaucuacaguaagcacaccccaauaaauuuaguuagggaccugccccagggauuuagcgcucuugagccuuugguggaucugccaaucggcauuaacaucacacgguuccagacucuacucgcccugcaucgcucuuaucuuaccccgggcgacuccucaagcggguggacagcaggagccgcugcauacuauguagguuaccugcaacccagaaccuuuuugcucaaauauaaugaaaacggcacgauuacugaugccguggacugcgcucuggauccuuuaagugagacaaaguguacccugaagucuuucacugucgaaaaagggaucuaccagacauccaauuuuagggugcagccaaccgagagcauaguucgguuccccaacauuacgaaucucugcccuuuuggagagguguucaacgccacccgcuucgcgucggucuaugcauggaaucgaaagagaaucucuaacuguguggccgacuacuccguacuuuacaauucagcuaguuuuagcacauucaaaugcuauggcguuuccccaacuaagcugaacgacuuguguuuuaccaauguguacgccgauucuuucgucauuaggggugacgaagugcggcagaucgcacccgggcaaacaggaaaaaucgcugauuauaacuacaagcuaccggacgauuuuacuggcugcgucauugccuggaauagcaacaaccuggacucaaaagugggcgggaauuauaacuaccucuaucgucuguuccgcaagaguaaucuuaagccuuuugagagagauauauccaccgaaaucuaccaggcgggaagcacacccuguaacgguguugagggcuucaauugcuacuuuccacugcagucuuauggguuccaaccuaccaacggagugggcuaccagcccuauaggguagucguguugucauuugaacuccugcacgccccagcaacuguuugcggucccaaaaagaguacgaauuuagugaaaaacaagugugucaauuucaacuuuaaugggcugacaggcaccggagugcuaacugagagcaacaaaaaguuccucccuuuccagcaguuuggccgggacauugcugauaccacagacgccguacgagauccacaaacccuggagauccuugacauaacuccgugcuccuucgggggagugucuguuauuacacccgguacgaauaccucgaaccaggucgcuguguuguaccagggcgugaauuguacugaagucccuguugccauccacgcagaccagcugacaccaaccuggcgcguguauagcacaggguccaacguguuucaaacuagagccggaugccucaucggcgcugagcauguaaacaauucauacgaaugugauauucccaucggugcggggauuugcgcaaguuaucagacccagacgaacucuccuaggcgggcccgcagcgucgcuucccagucaauaaucgccuacaccaugagccugggcgcagaaaauucuguggccuacuccaacaauaguauugcuaucccaacaaacuucacuaucagcguuaccacagaaauucuucccgugucuaugacuaagaccuccgucgacuguacgauguauauaugcggagauucaacagaguguaguaaucuguugcuccaauacggcagcuuuugcacccagcugaacagagccuuaacugggaucgcaguggagcaggacaaaaauacacaggaaguuuucgcgcaagugaagcagauuuauaaaaccccgccuaucaaggauuuuggagguuucaacuuuucgcagauucugccagaccccuccaaaccuucuaagaggagcuucaucgaggaucuacucuuuaauaagguaacucuggcugacgccggcuucauaaaacaauacggggauugucuuggagacaucgcagcccgugauuugauuugcguccagaaguucaacggccugaccgugcugcccccacucuuaacagacgaaaugaucgcucaguauacgucagcccugcuugcagguaccauuacgaguggguggacauuuggcgcuggagccgcguugcagaucccuuucgccaugcaaauggcuuaccgguuuaauggcauaggggugacccagaacguccucuaugagaaucagaaacugauugcaaaccaguucaacuccgccaucggaaagauucaagauucucuaagcuccacagcuucagcccugggcaaacuccaggacguugugaaucagaacgcacaggcgcugaauacucuuguaaagcaauugagcaguaacuuuggugccaucucuuccgugcugaaugacauauuaagccgacucgauaaggucgaagcugaggugcagaucgacagacugauuaccgggaggcuucagucgcugcaaacguacguuacacagcaguugauccgcgccgcagagauucgggcuucagccaaccucgcagccaccaaaaugucugaaugcgugcugggacagaguaagagagucgauuucuguggcaaagguuaccaccuaauguccuuuccccaaagcgcuccacauggcgugguuuuccugcacgugacuuaugucccggcgcaggagaagaauuuuaccacagccccugcaaucugccacgacgggaaagcucauuuccccagggaaggaguauuugugucuaacggcacucacugguucguuacccagcgcaauuuuuacgagccacagauaauuacaacggauaacaccuucgugagcgggaauugugacgucgugaucggaaucguaaacaauacuguguaugauccccuccaaccugagcuggacuccuucaaggaagaacuugauaaauacuuuaagaaccauacaucaccagacgucgauuugggcgacauuagugguaucaaugccagcguugugaacauucagaaggaaauagaucgacugaaugagguggccaaaaacuuaaacgaaucucucaucgaccugcaggagcuugggaaguaugagcaguacauuaaauggcccugguauaucuggcugggauucauugcuggccuaaucgcaauagucauggugaccaucaugcucugcuguaugacuuccugcuguucaugccugaaggguuguugcaguuguggcagcugcugcaaauuugacgaagaugacuccgagccuguuuugaaggggguaaagcugcacuacacauga

SEQ ID NO: 11997 - RNA, 3822 nt, Artificial Sequence
  SARS-CoV-2/Finland/FIN03032020A/2020__EPI_ISL_413602 spike protein CDS human (1-1273)
auguucguguuucugguccuccuuccccugguuagcucccagugcgugaacuugaccacaagaacucaauuaccuccagccuacaccaauucuuucacgaggggcguauauuacccggacaagguguuucggucaaguguccugcacagcacacaggaucuauuccuccccuuuuucuccaacgugacuugguuucaugcuauccacguuucugggaccaauggaacaaaacgcuucgacaacccugugcugccauuuaaugauggugucuauuucgcaucgaccgagaagucaaacauuauacgaggcuggaucuuugggacuacacuugacagcaaaacccagagucuguugauugugaauaacgccacgaauguaguuaucaaggugugugaguuccaguuuugcaacgaucccuuccucggagucuacuaucauaaaaauaacaaguccuggauggagucugaguuccguguguacagcuccgcgaauaacuguacuuuugaguaugugucacaaccuuuccugauggaccuggaaggcaagcaggguaauuuuaaaaaccucagagaguucgucuuuaagaacauugauggguacuucaaaaucuacaguaagcacaccccaauaaauuuaguuagggaccugccccagggauuuagcgcucuugagccuuugguggaucugccaaucggcauuaacaucacacgguuccagacucuacucgcccugcaucgcucuuaucuuaccccgggcgacuccucaagcggguggacagcaggagccgcugcauacuauguagguuaccugcaacccagaaccuuuuugcucaaauauaaugaaaacggcacgauuacugaugccguggacugcgcucuggauccuuuaagugagacaaaguguacccugaagucuuucacugucgaaaaagggaucuaccagacauccaauuuuagggugcagccaaccgagagcauaguucgguuccccaacauuacgaaucucugcccuuuuggagagguguucaacgccacccgcuucgcgucggucuaugcauggaaucgaaagagaaucucuaacuguguggccgacuacuccguacuuuacaauucagcuaguuuuagcacauucaaaugcuauggcguuuccccaacuaagcugaacgacuuguguuuuaccaauguguacgccgauucuuucgucauuaggggugacgaagugcggcagaucgcacccgggcaaacaggaaaaaucgcugauuauaacuacaagcuaccggacgauuuuacuggcugcgucauuagcuggaacucaaauaaccuggacaguaaagugggcgggaauuauaacuaccucuaucgucuguuccgcaaguccaaucuuaagccuuuugagagagauauaagcaccgaaaucuaccaggccggaucuacacccuguaacgguguugagggcuucaauugcuacuuuccacugcagucauauggguuccaaccuaccaacggagugggcuaccagcccuauaggguagucguguugaguuuugaacuccugcacgcgccagccacuguuugcggucccaaaaagagcacgaauuuagugaaaaacaagugugucaauuucaacuuuaaugggcugacaggcaccggagugcuaacugaguccaacaaaaaguuccucccuuuccagcaguuuggccgggacauugcagauaccacagacgcuguacgagauccacaaacccuggagauccuugacauaacuccgugcucuuucgggggagugucgguuauuacacccgguacgaauaccagcaaccaggucgccguguuguaccagggcgugaauuguacugaagucccuguugcuauccacgccgaccagcugacaccaaccuggcgcguguauuccacagggucaaacguguuucaaacuagagcaggaugccucaucggcgccgagcauguaaacaauaguuacgaaugugauauucccaucggugcugggauuugcgcgucuuaucagacccagacgaacagcccuaggcgggcacgcuccgucgccucacagagcauaaucgcuuacaccaugucucugggcgccgaaaauuccguggcauacaguaacaauagcauugccaucccaacaaacuucacuaucucuguuaccacagaaauucuucccguguccaugacuaagaccucagucgacuguacgauguauauaugcggagauaguacagaguguagcaaucuguugcuccaauacggcucguuuugcacccagcugaacagagcuuuaacugggaucgccguggagcaggacaaaaauacacaggaaguuuucgcacaagugaagcagauuuauaaaaccccgccuaucaaggauuuuggagguuucaacuuuucccagauucugccagaccccucuaaaccuagcaagaggucauucaucgaggaucuacucuuuaauaagguaacucuggcggacgcuggcuucauaaaacaauacggggauugucuuggagacaucgccgcacgugauuugauuugcgcccagaaguucaacggccugaccguccugcccccacucuuaacagacgaaaugaucgcucaguauacgagugcccugcuugcagguaccauuacuuccggguggacauuuggcgcuggagccgcguugcagaucccuuucgccaugcaaauggcuuaccgguuuaauggcauaggggugacccagaacgugcucuaugagaaucagaaacugauugcaaaccaguucaacucugccaucggaaagauucaagauagccuauccucaacagcuagcgcccugggcaaacuccaggacgucguuaaucagaacgcacaggcgcugaauacucuugugaagcaauugaguucuaacuuuggugccaucuccagcguacugaaugacauauuaucgcgacucgauaagguggaagcugagguccagaucgacagacugauuaccgggaggcuucagucacugcaaacguacgugacacagcaguugauccgcgccgcagagauucgggcuucugccaaccucgcagccaccaaaaugagugaaugcguucugggacaguccaagagaguggauuucuguggcaaagguuaccaccuaaugagcuuuccccaaucugcuccacauggcgucguguuccugcacguuacuuaugugccggcgcaggagaagaauuuuaccacagccccugcaaucugccacgacgggaaagcucauuuccccagggaaggagucuuuguaagcaacggcacucacugguucgugacccagcgcaauuuuuacgagccacagauaauuacaacggauaacaccuucguuuccgggaauugugacguggucaucggaaucgugaacaauacuguauaugauccccuccaaccugagcuggacucauucaaggaagaacuugauaaauacuuuaagaaccauacaaguccagacguggauuugggcgacauuagcgguaucaaugccucugucguuaacauucagaaggaaauagaucgacugaaugagguggccaaaaacuuaaacgaaucccucaucgaccugcaggagcuugggaaguaugagcaguacauuaaauggcccugguauaucuggcugggauucauugcuggccuaaucgcaauagugauggucaccaucaugcucugcuguaugacuucaugcuguaguugccugaaggguuguugcagcuguggcuccugcugcaaauuugacgaagaugacucugagccuguguugaaggggguuaagcugcacuacacauga

SEQ ID NO: 11998 - RNA, 3822 nt, Artificial Sequence
  SARS-CoV-2/France/GE1977/2020__EPI_ISL_414632 spike protein CDS human (1-1273)
auguucguguuucugguccuccuuccccugguuagcucccagugcgugaacuugaccacaagaacucaauuaccuccagccuacacuaauucuuucaccaggggcguauauuacccggacaagguguuucggucaaguguccugcacagcacacaggaucuauuccuccccuuuuucuccaacgugacuugguuucaugcuauccacguuucugggaccaauggaacaaaacgcuucgacaacccugugcugccauuuaaugauggugucuauuucgcaucgaccgagaagucaaacauuauacgaggcuggaucuuugggacuacacuugacagcaaaacccagagucuguugauugugaauaacgccacgaauguaguuaucaaggugugugaguuccaguuuugcaacgaucccuuccucggagucuacuaucauaaaaauaacaaguccuggauggagucugaguuccguguguacagcuccgcgaauaacuguacuuuugaguaugugucacaaccuuuccugauggaccuggaaggcaagcaggguaauuuuaaaaaccucagagaguucgucuuuaagaacauugauggguacuucaaaaucuacaguaagcacaccccaauaaauuuaguuagggaccugccccagggauuuagcgcucuugagccuuugguggaucugccaaucggcauuaacaucacacgguuccagacucuacucgcccugcaucgcucuuaucuuaccccgggcgacuccucaagcggguggacagcaggagccgcugcauacuauguagguuaccugcaacccagaaccuuuuugcucaaauauaaugaaaacggcacgauuacugaugccguggacugcgcucuggauccuuuaagugagacaaaguguacccugaagucuuucacugucgaaaaagggaucuaccagacauccaauuuuagggugcagccaaccgagagcauaguucgguuccccaacauuacgaaucucugcccuuuuggagagguguucaacgccacccgcuucgcgucggucuaugcauggaaucgaaagagaaucucuaacuguguggccgacuacuccguacuuuacaauucagcuaguuuuagcacauucaaaugcuauggcguuuccccaacuaagcugaacgacuuguguuuuaccaauguguacgccgauucuuucgucauuaggggugacgaagugcggcagaucgcacccgggcaaacaggaaaaaucgcugauuauaacuacaagcuaccggacgauuuuacuggcugcgucauugccuggaauagcaacaaccuggacucaaaagugggcgggaauuauaacuaccucuaucgucuguuccgcaagaguaaucuuaagccuuuugagagagauauauccaccgaaaucuaccaggcgggaagcacacccuguaacgguguugagggcuucaauugcuacuuuccacugcagucuuauggguuccaaccuaccaacggagugggcuaccagcccuauaggguagucguguugucauuugaacuccugcacgccccagcaacuguuugcggucccaaaaagaguacgaauuuagugaaaaacaagugugucaauuucaacuuuaaugggcugacaggcaccggagugcuaacugagagcaacaaaaaguuccucccuuuccagcaguuuggccgggacauugcugauaccacagacgccguacgagauccacaaacccuggagauccuugacauaacuccgugcuccuucgggggagugucuguuauuacacccgguacgaauaccucgaaccaggucgcuguguuguaccagggcgugaauuguacugaagucccuguugccauccacgcagaccagcugacaccaaccuggcgcguguauagcacaggguccaacguguuucaaacuagagccggaugccucaucggcgcugagcauguaaacaauucauacgaaugugauauucccaucggugcggggauuugcgcaaguuaucagacccagacgaacucuccuaggcgggcccgcagcgucgcuucccagucaauaaucgccuacaccaugagccugggcgcagaaaauucuguggccuacuccaacaauaguauugcuaucccaacaaacuucacuaucagcguuaccacagaaauucuucccgugucuaugacuaagaccuccgucgacuguacgauguauauaugcggagauucaacagaguguaguaaucuguugcuccaauacggcagcuuuugcacccagcugaacagagccuuaacugggaucgcaguggagcaggacaaaaauacacaggaaguuuucgcgcaagugaagcagauuuauaaaaccccgccuaucaaggauuuuggagguuucaacuuuucgcagauucugccagaccccuccaaaccuucuaagaggagcuucaucgaggaucuacucuuuaauaagguaacucuggcugacgccggcuucauaaaacaauacggggauugucuuggagacaucgcagcccgugauuugauuugcgcucagaaguucaacggccugaccguccugcccccacucuuaacagacgaaaugaucgcccaguauacgucagcacugcuugcugguaccauuacgaguggguggacauuuggcgccggagcggccuugcagaucccuuucgcuaugcaaauggcauaccgguuuaauggcauaggggugacccagaacgugcucuaugagaaucagaaacugauugccaaccaguucaacuccgcuaucggaaagauucaagauucucuauuuagcacagccuccgcacugggcaaacuccaggacgucguuaaucagaacgcgcaggcccugaauacucuugugaagcaauugucaagcaacuucggugcuaucaguucuguacugaaugacauauuaucccgacucgauaagguggaagccgagguccagaucgacagacugauuaccgggaggcuucagagccugcaaacguacgugacacagcaguugauccgcgcagcugagauucgggccucggcaaaccucgccgcuaccaaaaugucagaaugcguucugggacagucuaagagaguggauuuuuguggcaaagguuaccaccuaaugaguuucccccaauccgcgccacauggcgucguguuucugcacguuacuuaugugccggcccaggagaagaauuucaccacagcuccugcaaucugccacgacgggaaagcccauuuucccagggaaggagucuucguaagcaacggcacucacugguuugugacccagcgcaauuucuacgagccacagauaauuacaacggauaacaccuucguuucugggaauugugacguggucaucggaaucgugaacaauacuguauaugauccccuccaaccugagcuggacagcuuuaaggaagaacuugauaaauacuucaagaaccauacauccccagacguggauuugggcgacauuucagguaucaaugccagugucguuaacauucagaaggaaauagaucgacugaaugagguggcuaaaaacuuaaacgaaagccucaucgaccugcaggagcuugggaaguaugagcaguacauuaaauggcccugguauaucuggcugggauuuauugcaggccuaaucgccauagugauggucaccaucaugcucugcuguaugacuucuugcuguuccugccugaaggguuguugcucauguggcaguugcugcaaauucgacgaagaugacagcgagccuguguugaaggggguuaagcugcacuacacauga

SEQ ID NO: 11999 - RNA, 3822 nt, Artificial Sequence
  SARS-CoV-2/Finland/FIN-313/2020__EPI_ISL_414641 spike protein CDS human (1-1273)
auguucguguuucugguccuccuuccccugguuagcucccagugcgugaacuugaccacaagaacucaauuaccuccagccuacacuaauucuuucaccaggggcguauauuacccggacaagguguuucggucaaguguccugcacagcacacaggaucuauuccuccccuuuuucuccaacgugacuugguuucaugcuauccacguuucugggaccaauggaacaaaacgcuucgacaacccugugcugccauuuaaugauggugucuauuucgcaucgaccgagaagucaaacauuauacgaggcuggaucuuugggacuacacuugacagcaaaacccagagucuguugauugugaauaacgccacgaauguaguuaucaaggugugugaguuccaguuuugcaacgaucccuuccucggagucuacuaucauaaaaauaacaaguccuggauggagucugaguuccguguguacagcuccgcgaauaacuguacuuuugaguaugugucacaaccuuuccugauggaccuggaaggcaagcaggguaauuuuaaaaaccucagagaguucgucuuuaagaacauugauggguacuucaaaaucuacaguaagcacaccccaauaaauuuaguuagggaccugccccagggauuuagcgcucuugagccuuugguggaucugccaaucggcauuaacaucacacgguucaaaacucuacucgcccugcaucgcucuuaucuuaccccgggcgacuccucaagcggguggacagcaggagccgcugcauacuauguagguuaccugcagcccagaaccuuuuugcucaaguauaaugaaaacggcacgauuacugaugccguggacugcgcucuggauccuuuaagugagacaaaguguacccugaaaucuuucacugucgaaaaggggaucuaccaaacauccaauuuuagggugcagccaaccgagagcauaguucgguuccccaacauuacgaaucucugcccuuuuggagagguguucaacgccacccgcuucgcgucggucuaugcauggaaucgaaaaagaaucucuaacuguguggccgacuacuccguacuuuacaauucagcuaguuuuagcacauucaagugcuauggcguuuccccaacuaaacugaacgacuuguguuuuaccaauguguacgccgauucuuucgucauuaggggugacgaagugcggcagaucgcacccgggcagacaggaaagaucgcugauuauaacuacaaacuaccggacgauuuuacuggcugcgucauugccuggaauagcaacaaccuggacucaaaggugggcgggaauuauaacuaccucuaucgucuguuccgcaagaguaaucuuaaaccuuuugagagagauauauccaccgaaaucuaccaagcgggaagcacacccuguaacgguguugagggcuucaauugcuacuuuccacugcagucuuauggguuccagccuaccaacggagugggcuaccaacccuauaggguagucguguugucauuugaacuccugcacgccccagcaacuguuugcggucccaagaaaaguacgaauuuagugaagaacaaaugugucaauuucaacuuuaaugggcugacaggcaccggagugcuaacugagagcaacaagaaguuccucccuuuccagcaguuuggccgggacauugcugauaccacagacgccguacgagauccacagacccuggagauccuugacauaacuccgugcuccuucgggggagugucuguuauuacacccgguacgaauaccucgaaccaagucgcuguguuguaccagggcgugaauuguacugaagucccuguugccauccacgcagaccagcugacaccaaccuggcgcguguauagcacaggguccaacguguuucagacuagagccggaugccucaucggcgcugagcauguaaacaauucauacgaaugugauauucccaucggugcggggauuugcgcaaguuaucaaacccagacgaacucuccuaggcgggcccgcagcgucgcuucccagucaauaaucgccuacaccaugagccugggcgcagaaaauucuguggccuacuccaacaauaguauugcuaucccaacaaacuucacuaucagcguuaccacagaaauucuucccgugucuaugacuaaaaccuccgucgacuguacgauguauauaugcggagauucaacagaguguaguaaucuguugcuccaguacggcagcuuuugcacccaacugaacagagccuuaacugggaucgcaguggagcaggacaagaauacacaggaaguuuucgcacaggugaaacaaauuuauaagaccccgccuaucaaagauuuuggagguuucaacuuuucgcagauucugccagaccccuccaagccuucuaagaggagcuucaucgaggaucuacucuuuaauaaaguaacucuggcugacgccggcuucauaaagcaguacggggauugucuuggagacaucgcagcccgugauuugauuugcgcucaaaaauucaacggccugaccguccugcccccacucuuaacagacgaaaugaucgcccaguauacgucagcacugcuugcugguaccauuacgaguggguggacauuuggcgccggagcggccuugcagaucccuuucgcuaugcagauggcauaccgguuuaauggcauaggggugacccaaaacgugcucuaugagaaucagaagcugauugccaaccaguucaacuccgcuaucggaaaaauucaggauucucuaagcuccacagccucagcacugggcaagcuccaagacgucguuaaucagaacgcgcaggcccugaauacucuugugaagcaguugagcaguaacuuuggugcuaucucuuccguacugaaugacauauuaagccgacucgauaaaguggaagccgagguccaaaucgacagacugauuaccgggaggcuucagucgcugcagacguacgugacacaacaguugauccgcgcagcugagauucgggccucagcaaaccucgccgcuaccaagaugucugaaugcguucugggacagaguaaaagaguggauuucuguggcaaggguuaccaccuaauguccuuuccccagagcgcgccacauggcgucguguuccugcacguuacuuaugugccggcccaagagaaaaauuuuaccacagcgccugcuaucugccacgacgggaaggcccauuuccccagggaaggagucuuuguaucuaacggcacucacugguucgugacccagcgcaauuuuuacgagccacagauaauuacaacggauaacaccuucguuagcgggaauugugacguggucaucggaaucgugaacaauacuguauaugauccccuccagccugagcuggacuccuucaaagaagaacuugauaaguacuuuaagaaccauacaucaccagacguggauuugggcgacauuagugguaucaaugccagcgucguuaacauucaaaaagaaauagaucgacugaaugagguggcuaagaacuuaaacgaaucucucaucgaccugcaggagcuugggaaauaugagcaguacauuaaguggcccugguauaucuggcugggauucauugcaggccuaaucgccauagugauggucaccaucaugcucugcuguaugacuuccugcuguucaugccugaaagguuguugcaguuguggcagcugcugcaaguuugacgaagaugacuccgagccuguguugaaggggguuaaacugcacuacacauga

SEQ ID NO: 12000 - RNA, 3822 nt, Artificial Sequence
  SARS-CoV-2/Netherlands/ZuidHolland_2/2020__EPI_ISL_414556 spike protein CDS human (1-1273)
auguucguguuucugguccuccuuccccugguuagcucccagugcgugaacuugaccacaagaacucaauuaccuccagccuacacuaauucuuucaccaggggcguauauuacccggacaagguguuucggucaaguguccugcacagcacacaggaucuauuccuccccuuuuucuccaacgugacuugguuucaugcuauccacguuucugggaccaauggaacaaaacgcuucgacaacccugugcugccauuuaaugauggugucuauuucgcaucgaccgagaagucaaacauuauacgaggcuggaucuuugggacuacacuugacagcaaaacccagagucuguugauugugaauaacgccacgaauguaguuaucaaggugugugaguuccaguuuugcaacgaucccuuccucggagucuacuaucauaaaaauaacaaguccuggauggagucugaguuccguguguacagcuccgcgaauaacuguacuuuugaauaugugucacaaccuuuccugauggaccuggaaggcaagcaggguaauuuuaaaaaccucagagaguucgucuuuaagaacauugauggguacuucaaaaucuacaguaagcacaccccaauaaauuuaguuagggaccugccccagggauuuagcgcucuugagccuuugguggaucugccaaucggcauuaacaucacacgguuccagacucuacucgcccugcaucgcucuuaucuuaccccgggcgacuccucaagcggguggacagcaggagccgcugcauacuauguagguuaccugcaacccagaaccuuuuugcucaaauauaaugaaaacggcacgauuacugaugccguggacugcgcucuggauccuuuaagugagacaaaguguacccugaagucuuucacugucgaaaaagggaucuaccagacauccaauuuuagggugcagccaaccgagagcauaguucgguuccccaacauuacgaaucucugcccuuuuggagagguguucaacgccacccgcuucgcgucggucuaugcauggaaucgaaagagaaucucuaacuguguggccgacuacuccguacuuuacaauucagcuaguuuuagcacauucaaaugcuauggcguuuccccaacuaagcugaacgacuuguguuuuaccaauguguacgccgauucuuucgucauuaggggugacgaagugcggcagaucgcacccgggcaaacaggaaaaaucgcugauuauaacuacaagcuaccggacgauuuuacuggcugcgucauugccuggaauagcaacaaccuggacucaaaagugggcgggaauuauaacuaccucuaucgucuguuccgcaagaguaaucuuaagccuuuugagagagauauauccaccgaaaucuaccaggcgggaagcacacccuguaacgguguugagggcuucaauugcuacuuuccacugcagucuuauggguuccaaccuaccaacggagugggcuaccagcccuauaggguagucguguugucauuugaacuccugcacgccccagcaacuguuugcggucccaaaaagaguacgaauuuagugaaaaacaagugugucaauuucaacuuuaaugggcugacaggcaccggagugcuaacugagagcaacaaaaaguuccucccuuuccagcaguuuggccgggacauugcugauaccacagacgccguacgagauccacaaacccuggagauccuugacauaacuccgugcuccuucgggggagugucuguuauuacacccgguacgaauaccucgaaccaggucgcuguguuguaccagggcgugaauuguacugaagucccuguugccauccacgcagaccagcugacaccaaccuggcgcguguauagcacaggguccaacguguuucaaacuagagccggaugccucaucggcgcugagcauguaaacaauucauacgaaugugauauucccaucggugcggggauuugcgcaaguuaucagacccagacgaacucuccuaggcgggcccgcagcgucgcuucccagucaauaaucgccuacaccaugagccugggcgcagaaaauucuguggccuacuccaacaauaguauugcuaucccaacaaacuucacuaucagcguuaccacagaaauucuucccgugucuaugacuaagaccuccgucgacuguacgauguauauaugcggagauucaacagaguguaguaaucuguugcuccaauacggcagcuuuugcacccagcugaacagagccuuaacugggaucgcacuggagcaggacaaaaauacacaggaaguguucgcgcaaguuaagcagauuuauaaaaccccgccuaucaaggauuuuggagguuucaacuuuucgcagauucuaccagaccccuccaaaccuucuaagaggagcuucaucgaggaucuccuguuuaauaaggugacucuugcugacgccggcuucauaaaacaauacggggauuguuugggagacaucgcagcccgugaucugauuugcgcucagaaguucaacggccucaccguacugcccccauuacugacagacgaaaugaucgcccaguauacgucagcacuuuuggcugguaccauuacgaguggguggacauuuggcgccggagcggcccuccagaucccuuucgcuaugcaaauggcauaccgguuuaauggcauaggggucacccagaacgugcuguaugagaaucagaaacuaauugccaaccaguucaacuccgcuaucggaaagauucaagauucucugagcuccacagccucagcacucggcaaacugcaggacguggucaaucagaacgcgcaggcccuuaauacuuugguuaagcaacugagcaguaacuuuggugcuaucucuuccguguuaaaugacauacucagccgacuggauaagguagaagccgaggugcagaucgacagacuuauuaccgggaggcugcagucguugcaaacguacgucacacagcagcucauccgcgcagcugagauucgggccucagcaaaccuggccgcuaccaaaaugucugaaugcgugcuaggacagaguaagagaguugauuucuguggcaaagguuaccaccugauguccuuuccccaaagcgcgccacauggcguggucuuccuccacgugacuuauguuccggcccaggagaagaauuuuaccacagcuccugcaaucugccacgacgggaaagcccauuuccccagggaaggaguguuugucucuaacggcacucacugguucguaacccagcgcaauuuuuacgagccacagauaauuacaacggauaacaccuucgugagcgggaauugugacguugugaucggaaucgucaacaauacuguguaugauccccugcaaccugagcuugacuccuucaaggaagaguuggauaaauacuuuaagaaccauacaucaccagacguagaucugggcgacauuagugguaucaaugccagcguggucaacauucagaaggaaauagaucgauuaaaugagguugcuaaaaaccucaacgaaucucugaucgaccuucaggagcuggggaaguaugagcaguacauuaaauggcccugguauaucuggcuaggauucauugcaggccucaucgccauagugauggugaccaucaugcugugcuguaugacuuccugcuguucaugcuugaaggguuguugcaguuguggcagcugcugcaaauuugacgaagaugacuccgagccuguccugaagggggugaaguuacacuacacauga

SEQ ID NO: 12001 - RNA, 3822 nt, Artificial Sequence
  SARS-CoV-2/USA/WA-UW31/2020__EPI_ISL_414618 spike protein CDS human (1-1273)
auguucguguuucugguccuccuuccccugguuagcucccagugcgugaacuugaccacaagaacucaauuaccuccagccuacacuaauucuuucaccaggggcguauauuacccggacaagguguuucggucaaguguccugcacagcacacaggaucuauuccuccccuuuuucuccaacgugacuugguuucaugcuauccacguuucugggaccaauggaacaaaacgcuucgacaacccugugcugccauuuaaugauggugucuauuucgcaucgaccgagaagucaaacauuauacgaggcuggaucuuugggacuacacuugacagcaaaacccagagucuguugauugugaauaacgccacgaauguaguuaucaaggugugugaguuccaguuuugcaacgaucccuuccucggagucuacuaucauaaaaauaacaaguccuggauggagucugaguuccguguguacagcuccgcgaauaacuguacuuuugaauaugugucacaaccuuuccugauggaccuggaaggcaagcaggguaauuuuaaaaaccucagagaguucgucuuuaagaacauugauggguacuucaaaaucuacaguaagcacaccccaauaaauuuaguuagggaccugccccagggauuuagcgcucuugagccuuugguggaucugccaaucggcauuaacaucacacgguuccagacucuacucgcccugcaucgcucuuaucuuaccccgggcgacuccucaagcggguggacagcaggagccgcugcauacuauguagguuaccugcaacccagaaccuuuuugcucaaauauaaugaaaacggcacgauuacugaugccguggacugcgcucuggauccuuuaagugagacaaaguguacccugaagucuuucacugucgaaaaagggaucuaccagacauccaauuuuagggugcagccaaccgagagcauaguucgguuccccaacauuacgaaucucugcccuuuuggagagguguucaacgccacccgcuucgcgucggucuaugcauggaaucgaaagagaaucucuaacuguguggccgacuacuccguacuuuacaauucagcuaguuuuagcacauucaaaugcuauggcguuuccccaacuaagcugaacgacuuguguuuuaccaauguguacgccgauucuuucgucauuaggggugacgaagugcggcagaucgcacccgggcaaacaggaaaaaucgcugauuauaacuacaagcuaccggacgauuuuacuggcugcgucauugccuggaauagcaacaaccuggacucaaaagugggcgggaauuauaacuaccucuaucgucuguuccgcaagaguaaucuuaagccuuuugagagagauauauccaccgaaaucuaccaggcgggaagcacacccuguaacggugccgagggcuucaauugcuacuuuccacugcagucuuauggguuccaaccuaccaacggaguuggcuaccagcccuauagggugguagucuugucauuugaacuccugcacgcaccagcuacugugugcggucccaaaaagaguacgaauuuaguuaaaaacaagugugugaauuucaacuuuaaugggcugacaggcaccggaguccuaacugagagcaacaaaaaguuccucccuuuccagcaguuuggccgggacauugccgauaccacagacgcugugcgagauccacaaacccuggagauccuugacauaacuccgugcuccuucgggggaguaucugugauuacacccgguacgaauaccucgaaccagguugccgucuuguaccaggacgugaauuguacugaagugccugucgcaauccacgccgaucagcugacaccaaccuggcgcguuuauagcacaggcuccaacguguuucaaacuagagcugggugccucaucggagcggagcaugugaacaauucauacgaaugugacauucccaucggcgcagguauuugcgccaguuaucagacccagacgaacucuccuaggcgggcucgcagcguagccucccagucaauaaucgcauacaccaugagccugggggccgaaaauucugucgcuuacuccaacaauaguauugccaucccaacaaacuucacuaucagcgugaccacagaaauucuucccguuucuaugacuaagaccuccguggauuguacgauguauauaugcggcgacucaacagaguguaguaaucuguugcuccaauacggcagcuuuugcacccagcugaacagagcauuaacuggaaucgcggucgagcaggauaaaaauacacaggaaguguucgcucaaguuaagcagauuuauaaaaccccgccuaucaaggacuuugggggauucaacuuuucgcagauucugccagaucccuccaaaccuucuaagaggagcuucaucgaggaccuacucuuuaauaaggugacucuggccgaugcagguuucauaaaacaauacggcgacugucuuggggauaucgccgcucgugacuugauuugcgcccagaaguucaacggacugaccguacugcccccacucuuaacagaugaaaugaucgcacaguauacgucagcucugcuugccggcaccauuacgagugguuggacauuuggggcgggcgccgcuuugcagaucccuuucgcaaugcaaauggccuaccgguuuaauggaauaggcgucacccagaacgugcucuaugagaaucagaaacugauugcuaaccaguucaacuccgccaucgggaagauucaagacucucuaagcuccacagcaucagcgcugggaaaacuccaggacguggucaaucagaacgcccaggcucugaauacucuuguuaagcaauugagcaguaacuuuggcgccaucucuuccgugcugaaugauauauuaagccgacucgacaagguagaagcagaggugcagaucgauagacugauuaccgguaggcuucagucgcugcaaacguacgucacacagcaguugauccgcgcugccgagauucgggcaucagccaaccucgcugcgaccaaaaugucugaaugcgugcuggggcagaguaagagaguugacuucuguggaaaaggcuaccaccuaauguccuuuccccaaagcgccccacaugguguggucuuccugcacgugacuuauguuccggcacaggagaagaauuuuaccacagcuccugccaucugccacgauggcaaagcccauuuccccagggaagggguguuugucucuaacggaacucacugguucguaacccagcgcaauuuuuacgagccacagauaauuacaacggacaacaccuucgugagcggcaauugugauguugugaucgggaucgucaacaauacuguguaugacccccuccaaccugagcuggauuccuucaaggaggaacuugacaaauacuuuaagaaccauacaucaccagauguagacuugggagauauuaguggcaucaaugcuagcguggucaacauucagaaggaaauagaccgacugaaugagguugccaaaaacuuaaacgaaucucucaucgaccugcaggagcuugguaaguaugagcaguacauuaaauggcccugguauaucuggcugggguucauugcaggacuaaucgcgauagugauggugaccaucaugcucugcuguaugacuuccugcuguucaugccugaagggcuguugcaguugugguagcugcugcaaauuugaugaagacgauuccgagccugucuugaagggcgugaagcugcacuacacauga

SEQ ID NO: 12002 - RNA, 3822 nt, Artificial Sequence
  SARS-CoV-2/South Korea/SNU01/2020__EPI_ISL_411929 spike protein CDS human (1-1273)
auguucguguuucugguccuccuuccccugguuagcucccagugcgugaacuugaccacaagaacucaauuaccuccagccuacaccaauucuuucacgaggggcguauauuacccggacaagguguuucggucaaguguccugcacagcacacaggaucuauuccuccccuuuuucuccaacgugacuugguuucaugcuauccacguuucugggaccaauggaacaaaacgcuucgacaacccugugcugccauuuaaugauggugucuauuucgcaucgaccgagaagucaaacauuauacgaggcuggaucuuugggacuacacuugacagcaaaacccagagucuguugauugugaauaacgccacgaauguaguuaucaaggugugugaguuccaguuuugcaacgaucccuuccucggagucuacuaucauaaaaauaacaaguccuggauggagucugaguuccguguguacagcuccgcgaauaacuguacuuuugaauaugugucacaaccuuuccugauggaccuggaaggcaagcaggguaauuuuaaaaaccucagagaguucgucuuuaagaacauugauggguacuucaaaaucuacaguaagcacaccccaauaaauuuaguuagggaccugccccagggauuuugggcucuugagccuuugguggaucugccaaucggcauuaacaucacacgguuccagacucuacucgcccugcaucgcagcuaucuuaccccgggcgacucuuccucaggguggacagcaggagccgcugcauacuauguagguuaccugcaacccagaaccuuuuugcucaaauauaaugaaaacggcacgauuacugaugccguggacugcgcucuggauccuuuaagcgagacaaaguguacccugaagaguuucacugucgaaaaagggaucuaccagacaucuaauuuuagggugcagccaaccgaguccauaguucgguuccccaacauuacgaaucucugcccuuuuggagagguguucaacgccacccgcuucgcgagcgucuaugcauggaaucgaaagagaaucucgaacuguguggccgacuacucuguacuuuacaauuccgcuucauuuaguacauucaaaugcuauggcguuagcccaacuaagcugaacgacuuguguuuuaccaauguguacgccgauuccuucgucauuaggggugacgaagugcggcagaucgcacccgggcaaacaggaaaaaucgcugauuauaacuacaagcuaccggacgauuuuacuggcugcgucauugccuggaacucuaauaaccuggacagcaaagugggcgggaauuauaacuaccucuaucgucuguuccgcaagucaaaucuuaagccuuuugagagagauauaaguaccgaaaucuaccaggcgggauccacacccuguaacgguguugagggcuucaauugcuacuuuccacugcagagcuauggguuccaaccuaccaacggagugggcuaccagcccuauaggguagucguguugucuuuugaacuccugcacgccccagcaacuguuugcggucccaaaaagucaacgaauuuagugaaaaacaagugugucaauuucaacuuuaaugggcugacaggcaccggagugcuaacugagaguaacaaaaaguuccucccuuuccagcaguuuggccgggacauugcugauaccacagacgccguacgagauccacaaacccuggagauccuugacauaacuccgugcagcuucgggggaguguccguuauuacacccgguacgaauaccucuaaccaggucgcuguguuguaccaggacgugaauuguacugaagucccuguugccauccacgcagaucagcugacaccaaccuggcgcguguauucgacaggcagcaacguguuucaaacuagagccgggugccucaucggagcugagcauguaaacaauuccuacgaaugugacauucccaucggcgcggguauuugcgcaucauaucagacccagacgaacaguccuaggcgggcccgcucugucgcuagccaguccauaaucgccuacaccaugucacugggggcagagaauagcguggccuacucuaacaauuccauugcuaucccaacaaacuucacuaucaguguuaccacagaaauucuucccgugagcaugacuaagaccucugucgauuguacgauguauauaugcggcgacuccacagaguguucaaaucuguugcuccaauacggaaguuuuugcacccagcugaacagagccuuaacuggcaucgcaguggagcaggauaaaaauacacaggaaguuuucgcgcaagugaagcagauuuauaaaaccccgccuaucaaggacuuugggggauucaacuuuagccagauucugccagaucccucgaaaccuuccaagaggucuuucaucgaggaccuacucuuuaauaagguaacucuggcugaugccgguuucauaaaacaauacggcgacugucuuggggauaucgcagcccgugacuugauuugcgcucagaaguucaacggacugaccguccucccuccacuguuaacagaugaaaugaucgcccaguauacgagcgcacugcuugcuggcaccauuacuucagguuggacauuuggggccggcgcggccuugcagaucccuuucgcuaugcaaauggcauaccgguuuaauggaauaggcgugacccagaacgugcucuaugagaaucagaaacugauugccaaccaguucaacagugcuaucgggaagauucaagacucccuaucuagcacagccuccgcacugggaaaacuccaggacgucguuaaucagaacgcgcaggcccugaauacucuugugaagcaauugucaagcaacuuuggcgcuaucaguucuguacugaaugauauauuaucccgacucgacaagguggaagccgagguccagaucgauagacugauuaccgguaggcuucagagccugcaaacguacgugacacagcaguugauccgcgcagcugagauucgggccucggcaaaccucgccgcuaccaaaaugucagaaugcguucuggggcagucuaagagaguggacuucuguggaaaaggcuaccaccuaaugaguuuuccccaauccgcgccacauggugucguguuccugcacguuacuuaugugccggcccaggagaagaauuuuaccacagcacccgcuaucugccacgauggcaaagcccauuuccccagggaaggggucuuuguaagcaacggaacucacugguucgugacccagcgcaauuuuuacgagccacagauaauuacaacggacaacaccuucguuucuggcaauugugauguggucaucgggaucgugaacaauacuguauaugacccccuccaaccugagcuggauagcuucaaggaagaacuugacaaauacuuuaagaaccauacauccccagauguggacuugggagauauuucaggcaucaaugccagugucguuaacauucagaaggaaauagaccgacugaaugagguggcuaaaaacuuaaacgaaagccucaucgaccugcaggagcuugguaaguaugagcaguacauuaaauggcccugguauaucuggcugggguucauugcaggacuaaucgccauagugauggucaccaucaugcucugcuguaugacuucuugcuguuccugccugaagggcuguugcucaugugguaguugcugcaaauuugaugaagacgauagcgagccuguguugaagggcguuaagcugcacuacacauga

SEQ ID NO: 12003 - RNA, 3822 nt, Artificial Sequence
  SARS-CoV-2/China/WF0004/2020__EPI_ISL_413694 spike protein CDS human (1-1273)
auguucguguuucugguccuccuuccccugguuagcucccagugcgugaacuugaccacaagaacucaauuaccuccagccuacacgaauagcuucaccaggggcguauauuacccggacaagguguuucggucaaguguccugcacagcacacaggaucuauuccuccccuuuuucuccaacgugacuugguuucaugcuauccacguuucugggaccaauggaacaaaacgcuucgacaacccugugcugccauuuaaugauggugucuauuucgcaucgaccgagaagucaaacauuauacgaggcuggaucuuugggacuacacuugacagcaaaacccagagucuguugauugugaauaacgccacgaauguaguuaucaaggugugugaguuccaguuuugcaacgaucccuuccucggagucuacuaucauaaaaauaacaaguccuggacugagucugaguuccguguguacagcuccgcgaauaacuguaccuuugaguaugugucacaaccuuuccugauggaccuggaaggcaagcaggguaauuuuaaaaaccucagagaguucgucuuuaagaacauugauggguacuucaaaaucuacaguaagcacacaccaauaaauuuaguuagggaccugccccagggauuuagcgcucuugagccuuugguggaucugccaaucggcauuaacaucacucgguuccagacccuacucgcccugcaucgcucuuaucuuacaccgggcgacuccucaagcggguggaccgcaggagccgcugcauacuauguagguuaccugcaacccagaacguuuuugcucaaauauaaugaaaacggcacuauuacagaugccguggacugcgcucuggauccuuuaagugagaccaaguguacucugaagucuuucacagucgaaaaagggaucuaccagaccuccaauuuuagggugcagccaacggagagcauaguucgguuccccaacauuaccaaucucugcccuuuuggagagguguucaacgccacacgcuucgcgucggucuaugcauggaaucgaaagagaaucucuaacuguguggccgacuacuccguacuuuacaauucagcuaguuuuagcacuuucaaaugcuauggcguuuccccaaccaagcugaacgacuuguguuuuacaaauguguacgccgauucuuucgucauuaggggugacgaagugcggcagaucgcacccgggcaaacuggaaaaaucgcugauuauaacuacaagcuaccggacgauuuuaccggcugcgucauugccuggaauagcaacaaccuggacucaaaagugggcgggaauuauaacuaccucuaucgucuguuccgcaagaguaaucuuaagccuuuugagagagauauauccacagaaaucuaccaggcgggaagcacccccuguaacgguguugagggcuucaauugcuacuuuccacugcagucuuauggguuccaaccuacuaacggagugggcuaccagcccuauaggguagucguguugucauuugaacuccugcacgccccagcaacgguuugcggucccaaaaagaguacaaauuuagugaaaaacaagugugucaauuucaacuuuaaugggcugaccggcacuggagugcuaaccgagagcaacaaaaaguuccucccuuuccagcaguuuggccgggacauugcugauacaaccgacgccguacgagauccacaaacucuggagauccuugacauaacaccgugcuccuucgggggagugucuguuauuacgcccgguaccaauacuucgaaccaggucgcuguguuguaccaggacgugaauuguacagaagucccuguugccauccacgcagaucagcugaccccaacauggcgcguguauagcacuggcuccaacguguuucaaaccagagccgggugccucaucggagcugagcauguaaacaauucauacgaaugugacauucccaucggcgcggguauuugcgcaaguuaucagacgcagaccaacucuccuaggcgggcccgcagcgucgcuucccagucaauaaucgccuacacaaugagccugggggcagaaaauucuguggccuacuccaacaauaguauugcuaucccaacuaacuucaccaucagcguuacaacugaaauucuucccgugucuaugaccaagacguccgucgauuguacaauguauauaugcggcgacucaaccgaguguaguaaucuguugcuccaauacggaucuuuuugcacucagcugaacagagccuuaacaggcaucgcaguggagcaggauaaaaauacccaggaaguuuucgcgcaagugaagcagauuuauaaaacuccgccuaucaaggacuuugggggauucaacuuuucgcagauucugccagaucccuccaaaccuucuaagaggagcuucaucgaggaccuacucuuuaauaagguaacccuggcugaugccgguuucauaaaacaauacggcgacugucuuggggauaucgcagcccgugacuugauuugcgcucagaaguucaacggacugacaguccugcccccacucuuaacggaugaaaugaucgcccaguauaccucagcacugcuugcuggcacuauuacaagugguuggaccuuuggggccggcgcggccuugcagaucccuuucgcuaugcaaauggcauaccgguuuaauggaauaggcgugacacagaacgugcucuaugagaaucagaaacugauugccaaccaguucaacuccgcuaucgggaagauucaagacucucuaagcuccacugccucagcacugggaaaacuccaggacgucguuaaucagaacgcgcaggcccugaauacccuugugaagcaauugagcaguaacuuuggcgcuaucucuuccguacugaaugauauauuaagccgacucgacaagguggaagccgagguccagaucgauagacugauuacggguaggcuucagucgcugcaaacauacgugacccagcaguugauccgcgcagcugagauucgggccucagcaaaccucgccgcuacuaaaaugucugaaugcguucuggggcagaguaagagauucgacuuuuguggaaaaggcuaccaccuaauguccuucccccaaagcgcgccacaugguguggucuuucugcacgugaccuauguuccggcccaggagaagaauuucacaacugcuccugcaaucugccacgauggcaaagcccauuuucccagggaagggguguucgucucuaacggaacccacugguuuguaacacagcgcaauuucuacgagccacagauaauuacgaccgacaacacuuucgugagcggcaauugugauguugugaucgggaucgucaacaauacaguguaugacccccuccaaccugagcuggauuccuuuaaggaagaacuugacaaauacuucaagaaccauaccucaccagauguagacuugggagauauuaguggcaucaaugccagcguggucaacauucagaaggaaauagaccgacugaaugagguugcuaaaaacuuaaacgaaucucucaucgaccugcaggagcuugguaaguaugagcaguacauuaaauggcccugguauaucuggcugggguuuauugcaggacuaaucgccauagugauggugacuaucaugcucugcuguaugacauccugcuguucaugccugaagggcuguugcaguugugguagcugcugcaaauucgaugaagacgauuccgagccugucuugaagggcgugaagcugcacuacaccuga

SEQ ID NO: 12004 - RNA, 3822 nt, Artificial Sequence
  SARS-CoV-2/China/WF0028/2020__EPI_ISL_413791 spike protein CDS human (1-1273)
auguucguguuucugguccuccuuccccugguuagcucccagugcgugaacuugaccacaagaacucaauuaccuccagccuacacuaauucuuucaccaggggcguauauuacccggacaagguguuucggucaaguguccugcacagcacacaggaucuauuccuccccuuuuucuccaacgugacuugguuucaugcuauccacguuucugggaccaauggaacaaaacgcuucgacaacccugugcugccauuuaaugauggugucuauuucgcaucgaccgagaagucaaacauuauacgaggcuggaucuuugggacuacacuugacagcaaaacccagagucuguugauugugaauaacgccacgaauguaguuaucaaggugugugaguuccaguuuugcaacgaucccuuccucggagucuacuaucauaaaaauaacaaguccuggauggagucugaguuccguguguacagcuccgcgaauaacuguacuuuugaauaugugucacaaccuuuccugauggaccuggaaggcaagcaggguaauuuuaaaaaccucagagaguucgucuuuaagaacauugauggguacuucaaaaucuacaguaagcacaccccaauaaauuuaguuagggaccugccccagggauuuagcgcucuugagccuuugguggaucugccaaucggcauuaacaucacacgguuccagacucuacucgcccugcaucgcucuuaucuuaccccgggcgacuccucaagcggguggacagcaggagccgcugcauacuauguagguuaccugcaacccagaaccuuuuugcucaaauauaaugaaaacggcacgauuacugaugccguggacugcgcucuggauccuuuaagugagacaaaguguacccugaagucuuucacugucgaaaaagggaucuaccagacauccaauuuuagggugcagccaaccgagagcauaguucgguuccccaacauuacgaaucucugcccuuuuggagagguguucaacgccacccgcuucgcgucggucuaugcauggaaucgaaagagaaucucuaacuguguggccgacuacuccguacuuuacaauucagcuaguuuuagcacauucaaaugcuauggcguuuccccaacuaagcugaacgacuuguguuuuaccaauguguacgccgauucuuucgucauuaggggugacgaagugcggcagaucgcacccgggcaaacaggaaaaaucgcugauuauaacuacaagcuaccggacgauuuuacuggcugcgucauugccuggaauagcaacaaccuggacucaaaagugggcgggaauuauaacuaccucuaucgucuguuccgcaagaguaaucuuaagccuuuugagagagauauauccaccgaaaucuaccaggcgggaagcacacccuguaacgguguugagggcuucaauugcuacuuuccacugcagucuuauggguuccaaccuaccaacggagugggcuaccagcccuauaggguagucguguugucauuugaacuccugcacgccccagcaacuguuugcggucccaaaaagaguacgaauuuagugaaaaacaagugugucaauuucaacuuuaaugggcugacaggcaccggagugcuaacugagagcaacaaaaaguuccucccuuuccagcaguuuggccgggacauugcugauaccacagacgccguacgagauccacaaacccuggagauccuugacauaacuccgugcuccuucgggggagugucuguuauuacacccgguacgaauaccucgaaccaggucgcuguguuguaccaggacgugaauuguacugaagucccuguugccauccacgcagaucagcugacaccaaccuggcgcguguauagcacaggcuccaacguguuucaaacuagagccgggugccucaucggagcugagcauguaaacaauucauacgaaugugacauucccaucggcgcggguauuugcgcaaguuaucagacccagacgaacucuccuaggcgggcccgcagcgucgcuucccagucaauaaucgccuacaccaugagccugggggcagaaaauucuguggccuacuccaacaauaguauugcuaucccaacaaacuucacuaucagcguuaccacagaaauucuucccgugucuaugacuaagaccuccgucgauuguacgauguauauaugcggcgacucaacagaguguaguaaucuguugcuccaauacggcagcuuuugcacccagcugaacagagccuuaacuggaaucgcaguggagcaggauaaaaauacacaggaaguuuucgcgcaagugaagcagauuuauaaaaccccgccuaucaaggacuuugggggauucaacuuuucgcagauucugccagaucccuccaaaccuucuaagaggagcuucaucgaggaccuacucuuuaauaagguaacucuggcugaugccgguuucauaaaacaauacggcgacugucuuggggauaucgcagcccgugacuugauuugcgcucagaaguucaacggacugaccguccugcccccacucuuaacagaugaaaugaucgcccaguauacgucagcacugcuugcuggcaccauuacgagugguuggacauuuggggccggcgcggccuugcagaucccuuucgcuaugcaaauggcauaccgguuuaauggaauaggcgugacccagaacgugcucuaugagaaucagaaacugauugccaaccaguucaacuccgcuaucgggaagauucaagacucucuaagcuccacagccucagcacugggaaaacuccaggacgucguuaaucagaacgcgcaggcccugaauacucuugugaagcaauugagcaguaacuuuggcgcuaucucuuccguacugaaugauauauuaagccgacucgacaagguggaagccgagguccagaucgauagacugauuaccgguaggcuucagucgcugcaaacguacgugacacagcaguugauccgcgcagcugagauucgggccucagcaaaccucgccgcuaccaaaaugucugaaugcguucuggggcagaguaagagaguggacuucuguggaaaaggcuaccaccuaauguccuuuccccaaagcgcgccacauggugucguguuccugcacguuacuuaugugccggcccaggagaagaauuuuaccacagcuccugcaaucugccacgauggcaaagcccauuuccccagggaaggggucuuuguaucuaacggaacucacugguucgugacccagcgcaauuuuuacgagccacagauaauuacaacggacaacaccuucguuagcggcaauugugauguggucaucgggaucgugaacaauacuguauaugacccccuccaaccugagcuggaauccuucaaggaggaacuugauaaauacuuuaagaaccauacaucaccagacguggauuugggagacauuaguggcaucaaugccagcgucguuaacauucagaaggagauagaucgacugaaugaaguggcuaaaaacuuaaacgagucucucaucgaccugcaggagcuugguaaguaugaacaguacauuaaauggcccugguauaucuggcugggguucauugcaggacuaaucgccauagugauggucaccaucaugcucugcuguaugacuuccugcuguucaugccugaagggcuguugcaguugugguagcugcugcaaauuugacgaggaugacuccgaaccuguguugaagggcguuaagcugcacuacacauga

SEQ ID NO: 12005 - RNA, 3822 nt, Artificial Sequence
  SARS-CoV-2/2019-nCoV/USA-CruiseA-18/2020__MT159716.1 spike protein CDS human (1-1273)
auguucguguuucugguccuccuuccccugguuagcucccagugcgugaacuugaccacaagaacucaauuaccuccagccuacacuaauucuuucaccaggggcguauauuacccggacaagguguuucggucaaguguccugcacagcacacaggaucuauuccuccccuuuuucuccaacgugacuugguuucaugcuauccacguuucugggaccaauggaacaaaacgcuucgacaacccugugcugccauuuaaugauggugucuauuucgcaucgaccgagaagucaaacauuauacgaggcuggaucuuugggacuacacuugacagcaaaacccagagucuguugauugugaauaacgccacgaauguaguuaucaaggugugugaguuccaguuuugcaacgaucccuuccucggagucuacuaucauaaaaauaacaaguccuggauggagucugaacugcguguguacagcuccgcgaauaacuguacuuucgaguaugugucacaaccuuuucugauggaccucgaaggcaagcaggguaauuucaaaaacuuaagagaguuugucuucaagaacauugauggguacuuuaaaaucuacaguaagcacaccccaauaaaucugguuagggaccuuccccagggauucagcgcuuuggagccucugguggaucuaccaaucggcauuaacaucacacgguuucagacucuccuggcccuucaucgcucuuaucugaccccgggcgacuccucaagcggguggacagcaggagccgcugcauacuauguagguuacuugcaacccagaaccuuccuccugaaauauaaugaaaacggcacgauuacugaugccguggacugcgcuuuagauccucugagugagacaaaguguacccucaagucuuuuacugucgaaaaagggaucuaccagacauccaauuucagggugcagccaaccgagagcauaguucgguuucccaacauuacgaaucuuugcccuuucggagagguguuuaacgccacccgcuucgcgucggucuaugcauggaaucgaaagagaaucucuaacuguguggccgacuacuccguacuguacaauucagcuaguuucagcacauuuaaaugcuauggcguuuccccaacuaaguugaacgaccuauguuucaccaauguguacgccgauucuuuugucauuaggggugacgaagugcggcagaucgcacccgggcaaacaggaaaaaucgcugauuauaacuacaagcugccggacgauuucacuggcugcgucauugccuggaauagcaacaaccucgacucaaaagugggcgggaauuauaacuaccuguaucgucuuuuucgcaagaguaaucugaagccuuucgagagagauauauccaccgaaaucuaccaggcgggaagcacacccuguaacgguguugagggcuuuaauugcuacuucccauugcagucuuauggguuucaaccuaccaacggagugggcuaccagcccuauaggguagucgugcucucauucgaacuguuacacgccccagcaacuguuugcggucccaaaaagaguacgaaucuggugaaaaacaagugugucaauuuuaacuucaaugggcuaacaggcaccggagugcucacugagagcaacaaaaaguuucugccuuuccagcaguucggccgggacauugcugauaccacagacgccguacgagauccacaaacccuugagaucuuggacauaacuccgugcuccuuugggggagugucuguuauuacacccgguacgaauaccucgaaccaggucgcugugcuguaccaggacgugaauuguacugaagucccuguugccauccacgcagaucagcucacaccaaccuggcgcguguauagcacaggcuccaacguguuccaaacuagagccgggugccugaucggagcugagcauguaaacaauucauacgaaugugacauucccaucggcgcggguauuugcgcaaguuaucagacccagacgaacucuccuaggcgggcccgcagcgucgcuucccagucaauaaucgccuacaccaugagccuuggggcagaaaauucuguggccuacuccaacaauaguauugcuaucccaacaaacuuuacuaucagcguuaccacagaaauucugcccgugucuaugacuaagaccuccgucgauuguacgauguauauaugcggcgacucaacagaguguaguaauuugcuccugcaauacggcagcuucugcacccaguuaaacagagcccugacuggaaucgcaguggagcaggauaaaaauacacaggaaguuuuugcgcaagugaagcagauuuauaaaaccccgccuaucaaggacuucgggggauuuaacuucucgcagauucuaccagaucccuccaaaccuucuaagaggagcuuuaucgaggaccuccuguucaauaagguaacucuugcugaugccgguuuuauaaaacaauacggcgacuguuugggggauaucgcagcccgugaccugauuugcgcucagaaguucaacggacucaccguccugcccccauuacugacagaugaaaugaucgcccaguauacgucagcacuuuuggcuggcaccauuacgagugguuggacauucggggccggcgcggcccuccagaucccuuuugcuaugcaaauggcauaccgguucaauggaauaggcgugacccagaacgugcuguaugagaaucagaaacuaauugccaaccaguuuaacuccgcuaucgggaagauucaagacucucugagcuccacagccucagcacucggaaaacugcaggacgucguuaaucagaacgcgcaggcccuuaauacuuuggugaagcaacugagcaguaacuucggcgcuaucucuuccguauuaaaugauauacucagccgacuggacaagguggaagccgagguccagaucgauagacuuauuaccgguaggcugcagucguugcaaacguacgugacacagcagcucauccgcgcagcugagauucgggccucagcaaaccuggccgcuaccaaaaugucugaaugcguucuagggcagaguaagagaguggacuuuuguggaaaaggcuaccaccugauguccuucccccaaagcgcgccacauggugucguguuucuccacguuacuuaugugccggcccaggagaagaauuucaccacagcuccugcaaucugccacgauggcaaagcccauuuucccagggaaggggucuucguaucuaacggaacucacugguuugugacccagcgcaauuucuacgagccacagauaauuacaacggacaacaccuuuguuagcggcaauugugauguggucaucgggaucgugaacaauacuguauaugacccccugcaaccugagcuugauuccuucaaggaagaguuggacaaauacuucaagaaccauacaucaccagauguggaccugggagauauuaguggcaucaaugccagcgucguuaacauucagaaggaaauagaccgauuaaaugagguggcuaaaaaccucaacgaaucucugaucgaccuucaggagcuggguaaguaugagcaguacauuaaauggcccugguauaucuggcuaggguuuauugcaggacucaucgccauagugauggucaccaucaugcugugcuguaugacuuccugcuguucaugcuugaagggcuguugcaguugugguagcugcugcaaauucgaugaagacgauuccgagccugugcugaagggcguuaaguuacacuacacauga

SEQ ID NO: 12006 - RNA, 3822 nt, Artificial Sequence
  SARS-CoV-2/SARS-CoV-2/Yunnan-01/human/2020/CHN__MT049951.1 spike protein CDS human (1-1273)
auguucguguuucugguccuccuuccccugguuagcucccagugcgugaacuugaccacaagaacucaauuaccuccagccaauacgaacucuuucaccaggggcguauacuauccggacaagguguuucggucaaguguccugcacagcacacaggaucuauuccuccccuuuuucuccaaugugacuugguuucaugcuauccacguuucugggaccaacggaacaaaacgcuucgacaauccugugcugccauuuaacgauggugucuacuucgcaucgaccgagaagucaaauauuauacgaggcuggaucuuugggacuacacuugacagcaaaacccagagucuguugauugugaacaaugccacgaacguaguuaucaaggugugugaguuccaguuuugcaaugaucccuuccucggagucuauuaccauaaaaacaauaaguccuggauggagucugaguuccguguguauagcuccgcgaacaauuguacuuuugaauacgugucacaaccuuuccugauggaccuggaaggcaagcaggguaacuuuaaaaaccucagagaguucgucuuuaagaauauugauggguauuucaaaaucuacaguaagcacaccccaauaaacuuaguuagggaccugccccagggauuuagcgcucuugagccuuugguggaucugccaaucggcauuaauaucacacgguuccagacucuacucgcccugcaucgcucuuaccuuaccccgggcgacuccucaagcggguggacagcaggagccgcugcauauuacguagguuaucugcaacccagaaccuuuuugcucaaauacaacgaaaauggcacgauuacugaugccguggacugcgcucuggauccuuuaagugagacaaaguguacccugaagucuuucacugucgaaaaagggaucuaucagacauccaacuuuagggugcagccaaccgagagcauaguucgguuccccaauauuacgaaccucugcccuuuuggagagguguucaaugccacccgcuucgcgucggucuacgcauggaaccgaaagagaaucucuaauuguguggccgacuauuccguacuuuacaacucagcuaguuuuagcacauucaaaugcuacggcguuuccccaacuaagcugaaugacuuguguuuuaccaacguguaugccgauucuuucgucauuaggggugacgaagugcggcagaucgcacccgggcaaacaggaaaaaucgcugauuacaauuauaagcuaccggacgauuuuacuggcugcgucauugccuggaacagcaacaaucuggacucaaaagugggcgggaacuacaauuaucucuaccgucuguuccgcaagaguaaccuuaagccuuuugagagagauauauccaccgaaaucuaucaggcgggaagcacacccuguaaugguguugagggcuucaacugcuacuuuccacugcagucuuacggguuccaaccuaccaauggagugggcuaucagcccuacaggguagucguguugucauuugaacuccugcacgccccagcaacuguuugcggucccaaaaagaguacgaacuuagugaaaaauaagugugucaacuucaauuuuaacgggcugacaggcaccggagugcuaacugagagcaauaaaaaguuccucccuuuccagcaguuuggccgggacauugcugauaccacagacgccguacgagauccacaaacccuggagauccuugacauaacuccgugcuccuucgggggagugucuguuauuacacccgguacgaacaccucgaaucaggucgcuguguuguaucaggacgugaacuguacugaagucccuguugccauccacgcagaucagcugacaccaaccuggcgcguguacagcacaggcuccaacguguuucaaacuagagccgggugccucaucggagcugagcauguaaauaacucauaugaaugugacauucccaucggcgcggguauuugcgcaaguuaccagacccagacuaauucuccuaggcgggcccgcagcgucgcuucccagucaauaaucgccuauaccaugagccugggggcagagaacucuguggccuacuccaauaacaguauugcuaucccaacaaauuucacuaucagcguuaccacagaaauucuucccgugucuaugacuaagaccuccgucgauuguacgauguacauaugcggcgacucaacagaguguaguaaccuguugcuccaauauggcagcuuuugcacccagcugaauagagccuuaacuggaaucgcaguggagcaggauaaaaacacacaggaaguuuucgcgcaagugaagcagauuuacaaaaccccgccuaucaaggacuuugggggauucaauuuuucgcagauucugccagaucccuccaaaccuucuaagaggagcuucaucgaggaccuacucuuuaacaagguaacucuggcugaugccgguuucauaaaacaauauggcgacugucuuggggauaucgcagcccgugacuugauuugcgcucagaaguucaauggacugaccguccugcccccacucuuaacagaugaaaugaucgcccaguacacgucagcacugcuugcuggcaccauuacgagugguuggacauuuggggccggcgcggccuugcagaucccuuucgcuaugcaaauggcauaucgguuuaacggaauaggcgugacccagaaugugcucuacgagaaccagaaacugauugccaaccaguucaauuccgcuaucgggaagauucaagacucucuaagcuccacagccucagcacugggaaaacuccaggacgucguuaaccagaaugcgcaggcccugaacacucuugugaagcaauugagcaguaauuuuggcgcuaucucuuccguacugaacgauauauuaagccgacucgacaagguggaagccgagguccagaucgauagacugauuaccgguaggcuucagucgcugcaaacguaugugacacagcaguugauccgcgcagcugagauucgggccucagcaaaucucgccgcuaccaaaaugucugaaugcguucuggggcagaguaagagaguggacuucuguggaaaaggcuaccaccuaauguccuuuccccaaagcgcgccacauggugucguguuccugcacguuacuuacgugccggcccaggagaagaacuuuaccacagcuccugcaaucugccacgauggcaaagcccauuuccccagggaaggggucuuuguaucuaauggaacucacugguucgugacccagcgcaacuuuuaugagccacagauaauuacaacggacaauaccuucguuagcggcaacugugauguggucaucgggaucgugaauaacacuguauacgacccccuccaaccugagcuggauuccuucaaggaagaacuugacaaauauuuuaagaaucauacaucaccagauguggacuugggagauauuaguggcaucaacgccagcgucguuaauauucagaaggaaauagaccgacugaacgagguggcuaaaaacuuaaaugaaucucucaucgaccugcaggagcuugguaaguacgagcaguauauuaaauggcccugguacaucuggcugggguucauugcaggacuaaucgccauagugauggucaccaucaugcucugcuguaugacuuccugcuguucaugccugaagggcuguugcaguugugguagcugcugcaaauuugaugaagacgauuccgagccuguguugaagggcguuaagcugcacuauacauga

SEQ ID NO: 12007 - RNA, 3822 nt, Artificial Sequence
  SARS-CoV-2/USA/WA-UW292/2020__EPI_ISL_418077 spike protein CDS human (1-1273)
auguucguguuucugguccuccuuccccugguuagcucccagugcgugaacuugaccacaagaacucaauuaccuccagccuacaccaauucuuucacgaggggcguauauuacccggacaagguguuucggucaaguguccugcacagcacacaggaucuauuccuccccuuuuucuccaacgugacuugguuucaugcuauccacguuucugggaccaauggaacaaaacgcuucgacaacccugugcugccauuuaaugauggugucuauuucgcaucgaccgagaagucaaacauuauacgaggcuggaucuuugggacuacacuugacagcaaaacccagagucuguugauugugaauaacgccacgaauguaguuaucaaggugugugaguuccaguuuugcaacgaucccuuccucggagucuacuaucauaaaaauaacaaguccuggauggagucugaguuccguguguacagcuccgcgaauaacuguacuuuugaguaugugucacaaccuuuccugauggaccuggaaggcaagcaggguaauuuuaaaaaccucagagaguucgucuuuaagaacauugauggguacuucaaaaucuacaguaagcacaccccaauaaauuuaguuagggaccugccccagggauuuagcgcucuugagccuuugguggaucugccaaucggcauuaacaucacacgguuccagacucuacucgcccugcaucgcucuuaucuuaccccgggcgacuccucaagcggguggacagcaggagccgcugcauacuauguagguuaccugcaacccagaaccuuuuugcucaaauauaaugaaaacggcacgauuacugaugccguggacugcgcucuggauccuuuaagugagacaaaguguacccugaagucuuucacugucgaaaaagggaucuaccagacauccaauuuuagggugcagccaaccgagagcauaguucgguuccccaacauuacgaaucucugcccuuuuggagagguguucaacgccacccgcuucgcgucggucuaugcauggaaucgaaagagaaucucuaacuguguggccgacuacuccguacuuuacaauucagcuaguuuuagcacauucaaaugcuauggcguuuccccaacuaagcugaacgacuuguguuuuaccaauguguacgccgauucuuucgucauuaggggugacgaagugcggcagaucgcacccgggcaaacaggaaaaaucgcugauuauaacuacaagcuaccggacgauuuuacuggcugcgucauugccuggaauagcaacaaccuggacucaaaagugggcgggaauuauaacuaccucuaucgucuguuccgcaagaguaaucuuaagccuuuugagagagauauauccaccgaaaucuaccaggcgagcucuacacccuguaacggaguugaggguuucaauugcuacuuuccacugcagucauauggcuuccaaccuaccaacggggugggauaccagcccuauaggguagucguguugaguuuugaacuccugcacgccccagcaacuguuugcggccccaaaaagagcacgaauuuagugaaaaacaagugugucaauuucaacuuuaauggucugacagggaccggcgugcuaacugaguccaacaaaaaguuccucccuuuccagcaguuuggacgggacauugcugauaccacagacgccguacgagauccacaaacccuggagauccuugacauaacuccgugcucuuucggcggggugucgguuauuacacccggaacgaauaccagcaaccaggucgcuguguuguaccaggacgugaauuguacugaagucccuguugccauccacgcagaucagcugacaccaaccuggcgcguguauuccacagguucaaacguguuucaaacuagagccggcugccucaucggggcugagcauguaaacaauaguuacgaaugugacauucccaucggagcgggcauuugcgcaucuuaucagacccagacgaacagcccuaggcgggcccgcuccgucgcuucacagagcauaaucgccuacaccaugucucugggugcagaaaauuccguggccuacaguaacaauagcauugcuaucccaacaaacuucacuaucucuguuaccacagaaauucuucccguguccaugacuaagaccucagucgauuguacgauguauauaugcggggacaguacagaguguagcaaucuguugcuccaauacggcucguuuugcacccagcugaacagagccuuaacuggaaucgcaguggagcaggauaaaaauacacaggaaguuuucgcgcaagugaagcagauuuauaaaaccccgccuaucaaggacuuuggcggguucaacuuuucccagauucugccagaucccucuaaaccuagcaagaggucauucaucgaggaccuacucuuuaauaagguaacucuggcugaugccggauucauaaaacaauacggugacugucuuggcgauaucgcagcccgugacuugauuugcgcucagaaguucaacgggcugaccguccucccuccacuguuaacagaugaaaugaucgcccaguauacgagugcacugcuugcuggaaccauuacuuccggcuggacauuuggugccggggcggccuugcagaucccuuucgcuaugcaaauggcauaccgguuuaauggcauaggagugacccagaacgugcucuaugagaaucagaaacugauugccaaccaguucaacucugcuaucggcaagauucaagacagccuauccucaacagccagcgcacuggggaaacuccaggacgucguuaaucagaacgcgcaggcccugaauacucuugugaagcaauugaguucuaacuuuggagcuaucuccagcguacugaaugauauauuaucgcgacucgacaagguggaagccgagguccagaucgauagacugauuaccggcaggcuucagucacugcaaacguacgugacacagcaguugauccgcgcagcugagauucgggccucugcaaaccucgccgcuaccaaaaugagugaaugcguucugggucaguccaagagaguggacuucugugggaaaggauaccaccuaaugagcuuuccccaaucugcgccacauggcgucguguuccugcacguuacuuaugugccggcccaggagaagaauuuuaccacagcacccgcuaucugccacgaugguaaagcccauuuccccagggaaggcgucuuuguaagcaacgggacucacugguucgugacccagcgcaauuuuuacgagccacagauaauuacaacggacaacaccuucguuuccggaaauugugauguggucaucggcaucgugaacaauacuguauaugacccccuccaaccugagcuggauucauucaaggaagaacuugacaaauacuuuaagaaccauacaaguccagauguggacuugggggauauuagcggaaucaaugccucugucguuaacauucagaaggaaauagaccgacugaaugagguggcuaaaaacuuaaacgaaucccucaucgaccugcaggagcuuggcaaguaugagcaguacauuaaauggcccugguauaucuggcuggguuucauugcagggcuaaucgccauagugauggucaccaucaugcucugcuguaugacuucaugcuguaguugccugaagggauguugcagcuguggcuccugcugcaaauuugaugaagacgauucugagccuguguugaaggguguuaagcugcacuacacauga

SEQ ID NO: 12008 - RNA, 3822 nt, Artificial Sequence
  SARS-CoV-2/Iceland/192/2020__EPI_ISL_417819 spike protein CDS human (1-1273)
auguucguguuuuucguccugcucccccuuguuagcucccagugcgugaaccugaccacaagaacucaauugccuccagccuacacuaauucuuuuaccaggggcguauauuacccggacaagguguuccggucaagugucuuacacagcacacaggaucuguuucuacccuucuuuuccaacgugacuugguuccaugcuauccacguuucugggaccaauggaacaaaacgcuuugacaacccugugcucccauucaaugauggugucuauuuugcaucgaccgagaagucaaacauuauacgaggcuggaucuucgggacuacacuggacagcaaaacccagagucuucugauugugaauaacgccacgaauguaguuaucaaggugugugaauuucaguucugcaacgaucccuucuugggagucuacuaucauaaaaauaacaaguccuggauggagucugaauuucguguguacagcuccgcgaauaacuguacuuucgaguaugugucacaaccuuuucucauggaccuggaaggcaagcaggguaauuucaaaaaccugagagaguuugucuucaagaacauugauggguacuuuaaaaucuacaguaagcacaccccaauaaaucucguuagggacuuaccccagggauucagcgcucuggagccucuuguggauuugccaaucggcauuaacaucacacgguuucagacucugcuagcccuccaucgcucuuaucugaccccgggcgacuccucaagcggguggacagcaggagccgcugcauacuauguagguuaccuucaacccagaaccuuccuguugaaauauaaugaaaacggcacgauuacugaugccguggacugcgcucucgauccucugagugagacaaaguguaccuuaaagucuuuuacugucgaaaaagggaucuaccagacauccaauuucagggugcagccaaccgagagcauaguucgguuucccaacauuacgaaucugugcccuuucggagagguguucaacgccacccgcuuugcgucggucuaugcauggaaucgaaagagaaucucuaacuguguggccgacuacuccguacucuacaauucagcuaguuucagcacauuuaaaugcuauggcguuuccccaacuaaacuuaacgaccuguguuucaccaauguguacgccgauucuuuugucauuaggggugacgaagugcggcagaucgcacccgggcaaacaggaaagaucgcugauuauaacuacaaguugccggacgauuucacuggcugcgucauugccuggaauagcaacaaccuagacucaaaagugggcgggaauuauaacuaccuguaucgucucuuucgcaagaguaaucugaagccuuucgagagagauauauccaccgaaaucuaccaggcgggaagcacacccuguaacgguguugagggcuuuaauugcuacuucccacuucagucuuauggguuucaaccuaccaacggagugggcuaccagcccuauaggguagucgugcugucauucgaauugcuccacgccccagcaacuguuugcggucccaaaaagaguacgaaucuggugaaaaacaagugugucaauuuuaacuucaauggguuaacaggcaccggagugcugacugagagcaacaaaaaguuccuaccuuuucagcaguucggccgggacauugcugauaccacagacgccguacgagauccacaaacccucgagauccuggacauaacuccgugcuccuuugggggagugucuguuauuacacccgguacgaauaccucgaaccaggucgcugugcuuuaccagggcgugaauuguacugaagucccuguugccauccacgcagaccaguugacaccaaccuggcgcguguauagcacaggguccaacguguuccaaacuagagccggaugccugaucggcgcugagcauguaaacaauucauacgaaugugauauucccaucggugcggggauuugcgcaaguuaucagacccagacgaacucuccuaggcgggcccgcagcgucgcuucccagucaauaaucgccuacaccaugagccucggcgcagaaaauucuguggccuacuccaacaauaguauugcuaucccaacaaacuuuacuaucagcguuaccacagaaauucugcccgugucuaugacuaagaccuccgucgacuguacgauguauauaugcggagauucaacagaguguaguaaucuucuguugcaauacggcagcuucugcacccagcucaacagagcccugacugggaucgcaguggagcaggacaaaaauacacaggaaguuuuugcgcaagugaagcagauuuauaaaaccccgccuaucaaggauuucggagguuuuaacuucucgcagauuuuaccagaccccuccaaaccuucuaagaggagcuuuaucgaggaucugcuauucaauaagguaacucucgcugacgccggcuucauaaaacaauacggggauugucugggagacaucgcagcccgugaucuuauuugcgcucagaaguuuaacggcuugaccguccugcccccacuccugacagacgaaaugaucgcccaguauacgucagcauuacuggcugguaccauuacgaguggguggacauucggcgccggagcggcccuucagaucccuuuugcuaugcaaauggcauaccgguucaauggcauaggggugacccagaacguguuguaugagaaucagaaacucauugccaaccaguuuaacuccgcuaucggaaagauucaagauucucugagcuccacagccucagcacuaggcaaacugcaggacgucguuaaucagaacgcgcaggcccucaauacucuggugaagcaacuuagcaguaacuucggugcuaucucuuccguauugaaugacauacugagccgauuagauaagguggaagccgagguccagaucgacagacucauuaccgggaggcugcagucgcuucaaacguacgugacacagcagcugauccgcgcagcugagauucgggccucagcaaacuuggccgcuaccaaaaugucugaaugcguucucggacagaguaagagaguggauuuuuguggcaaagguuaccaccugauguccuucccccaaagcgcgccacauggcgucguguuucuacacguuacuuaugugccggcccaggagaagaauuucaccacagcuccugcaaucugccacgacgggaaagcccauuuucccagggaaggagucuucguaucuaacggcacucacugguuugugacccagcgcaauuucuacgagccacagauaauuacaacggauaacaccuucguuagcgggaauugugacguggucaucggaaucgugaacaauacuguauaugauccccugcaaccugagcucgacuccuuuaaggaggagcuggauaaauacuucaagaaccauacaucaccagacguggaucuuggcgacauuagugguaucaaugccagcgucguuaacauucagaaggaaauagaucgauugaaugagguggcuaaaaaccugaacgaaucuuuaaucgaccuccaggagcuggggaaguaugagcaguacauuaaauggcccugguauaucuggcuuggauuuauugcaggccugaucgccauagugauggucaccaucaugcuaugcuguaugacuuccugcuguucaugccucaaggguuguugcaguuguggcagcugcugcaaauucgacgaagaugacuccgagccugugcugaaggggguuaaguugcacuacacauga

SEQ ID NO: 12009 - RNA, 3822 nt, Artificial Sequence
  SARS-CoV-2/Belgium/ULG-6939/2020__EPI_ISL_417020 spike protein CDS human (1-1273)
auguucguguuucugguccuccuuccccugguuagcucccagugcgugaacuugaccacaagaacucaauuaccuccagccuacacuaauucuuucaccaggggcguauauuacccggacaagguguuucggucaaguguccugcacagcacacaggaucuauuccuccccuuuuucuccaacgugacuugguuucaugcuauccacguuucugggaccaauggaacaaaacgcuucgacaacccugugcugccauuuaaugauggugucuauuucgcaucgaccgagaagucaaacauuauacgaggcuggaucuuugggacuacacuugacagcaaaacccagagucuguugauugugaauaacgccacgaauguaguuaucaaggugugugaguuccaguuuugcaacgaucccuuccucggagucuacuaucauaaaaauaacaaguccuggauggagucugaguuccguguguacagcuccgcgaauaacuguacuuuugaguaugugucacaaccuuuccugauggaccuggaaggcaagcaggguaauuuuaaaaaccucagagaguucgucuuuaagaacauugauggguacuucaaaaucuacaguaagcacaccccaauaaauuuaguuagggaccugccccagggauuuagcgcucuugagccuuugguggaucugccaaucggcauuaacaucacacgguuccagacucuacucgcccugcaucgcucuuaucuuaccccgggcgacuccucaagcggguggacagcaggagccgcugcauacuauguagguuaccugcaacccagaaccuuuuugcucaaauauaaugaaaacggcacgauuacugaugccguggacugcgcucuggauccuuuaagugagacaaaguguacccugaagucuuucacugucgaaaaagggaucuaccagacauccaauuuuagggugcagccaaccgagagcauaguucgguuccccaacauuacgaaucucugcccuuuuggagagguguucaacgccacccgcuucgcgucggucuaugcauggaaucgaaagagaaucucuaacuguguggccgacuacuccguacuuuacaauucagcuaguuuuagcacauucaaaugcuauggcguuuccccaacuaagcugaacgacuuguguuuuaccaauguguacgccgauucuuucgucauuaggggugacgaagugcggcagaucgcacccgggcaaacaggaaaaaucgcugauuauaacuacaagcuaccggacgauuuuacuggcugcgucauugccuggaauagcaacaaccuggacucaaaagugggcgggaauuauaacuaccucuaucgucuguuccgcaagaguaaucuuaagccuuuugagagagauauauccaccgaaaucuaccaggcgggaagcacacccuguaacgguguugagggcuucaauugcuacuuuccacugcagucuuauggguuccaaccuaccaacggagugggcuaccagcccuauaggguagucguguugucauuugaacuccugcacgccccagcaacuguuugcggucccaaaaagaguacgaauuuagugaaaaacaagugugucaauuucaacuuuaaugggcugacaggcaccggagugcuaacugagagcaacaaaaaguuccucccuuuccagcaguuuggccgggacauugcugauaccacagacgccguacgagauccacaaacccuggagauccuugacauaacuccgugcuccuucgggggagugucuguuauuacacccgguacgaauaccucgaaccaggucgcuguguuguaccagggcgugaauuguacugaagucccuguugccauccacgcagaccagcugacaccaaccuggcgcguguauagcacaggguccaacguguuucaaacuagagccggaugccucaucggcgcugagcauguaaacaauucauacgaaugugauauucccaucggugcggggauuugcgcaaguuaucagacccagacgaacucuccuaggcgggcccgcagcgucgcuucccagucaauaaucgccuacaccaugagccugggcgcagaaaauucugugguuuacuccaacaauaguauugccaucccaacaaacuucacuaucagcgugaccacagaaauucuucccgucucuaugacuaagaccuccguggacuguacgauguauauaugcggagauucaacagaguguaguaaucuguugcuccaauacggcagcuuuugcacccagcugaacagagcuuuaacugggaucgccguugagcaggacaaaaauacacaggaaguguucgcacaaguaaagcagauuuauaaaaccccgccuaucaaggauuuuggagguuucaacuuuucgcagauucugccagaccccuccaaaccuucuaagaggagcuucaucgaggaucuacucuuuaauaaggucacucuggcggacgcuggcuucauaaaacaauacggggauugucuuggagacaucgccgcacgugauuugauuugcgcccagaaguucaacggccugaccgugcugcccccacucuuaacagacgaaaugaucgcucaguauacgucagcccugcuugcagguaccauuacgaguggguggacauuuggcgcuggagccgcguugcagaucccuuucgccaugcaaauggcuuaccgguuuaauggcauaggggugacccagaacguccucuaugagaaucagaaacugauugcaaaccaguucaacuccgccaucggaaagauucaagauucucuaagcuccacagcuucagcccugggcaaacuccaggacguugugaaucagaacgcacaggcgcugaauacucuuguaaagcaauugagcaguaacuuuggugccaucucuuccgugcugaaugacauauuaagccgacucgauaaggucgaagcugaggugcagaucgacagacugauuaccgggaggcuucagucgcugcaaacguacguuacacagcaguugauccgcgccgcagagauucgggcuucagccaaccucgcagccaccaaaaugucugaaugcgugcugggacagaguaagagagucgauuucuguggcaaagguuaccaccuaauguccuuuccccaaagcgcuccacauggcgugguuuuccugcacgugacuuaugucccggcgcaggagaagaauuuuaccacagccccugcaaucugccacgacgggaaagcucauuuccccagggaaggaguauuugugucuaacggcacucacugguucguuacccagcgcaauuuuuacgagccacagauaauuacaacggauaacaccuucgugagcgggaauugugacgucgugaucggaaucguaaacaauacuguguaugauccccuccaaccugagcuggacuccuucaaggaagaacuugauaaauacuuuaagaaccauacaucaccagacgucgauuugggcgacauuagugguaucaaugccagcguugugaacauucagaaggaaauagaucgacugaaugagguggccaaaaacuuaaacgaaucucucaucgaccugcaggagcuugggaaguaugagcaguacauuaaauggcccugguauaucuggcugggauucauugcuggccuaaucgcaauagucauggugaccaucaugcucugcuguaugacuuccugcuguucaugccugaaggguuguugcaguuguggcagcugcugcaaauuugacgaagaugacuccgagccuguuuugaaggggguaaagcugcacuacacauga

SEQ ID NO: 12010 - RNA, 3822 nt, Artificial Sequence
  SARS-CoV-2/France/HF2496/2020__EPI_ISL_418231 spike protein CDS human (1-1273)
auguucguguuucugguccuccuuccccugguuagcucccagugcgugaacuugaccacaagaacucaauuaccuccagccuacacuaauucuuucaccaggggcguauauuacccggacaagguguuucggucaaguguccugcacagcacacaggaucuauuccuccccuuuuucuccaacgugacuugguuucaugcuauccacguuucugggaccaauggaacaaaacgcuucgacaacccugugcugccauuuaaugauggugucuauuucgcaucgaccgagaagucaaacauuauacgaggcuggaucuuugggacuacacuugacagcaaaacccagagucuguugauugugaauaacgccacgaauguaguuaucaaggugugugaguuccaguuuugcaacgaucccuuccucggagucuacuaucauaaaaauaacaaguccuggauggagucugaguuccguguguacagcuccgcgaauaacuguacuuuugaguaugugucacaaccuuuccugauggaccuggaaggcaagcaggguaauuuuaaaaaccucagagaguucgucuuuaagaacauugauggguacuucaaaaucuacaguaagcacaccccaauaaauuuaguuagggaccugccccagggauuuagcgcucuugagccuuugguggaucugccaaucggcauuaacaucacacgguuccagacucuacucgcccugcaucgcucuuaucuuaccccgggcgacuccucaagcggguggacagcaggagccgcugcauacuauguagguuaccugcaacccagaaccuuuuugcucaaauauaaugaaaacggcacgauuacugaugccguggacugcgcucuggauccuuuaagugagacaaaguguacccugaagucuuucacugucgaaaaagggaucuaccagacauccaauuuuagggugcagccaaccgagagcauaguucgguuccccaacauuacgaaucucugcccuuuuggagagguguucaacgccacccgcuucgcgucggucuaugcauggaaucgaaagagaaucucuaacuguguggccgacuacuccguacuuuacaauucagcuaguuuuagcacauucaaaugcuauggcguuuccccaacuaagcugaacgacuuguguuuuaccaauguguacgccgauucuuucgucauuaggggugacgaagugcggcagaucgcacccgggcaaacaggaaaaaucgcugauuauaacuacaagcuaccggacgauuuuacuggcugcgucauugccuggaauagcaacaaccuggacucaaaagugggcgggaauuauaacuaccucuaucgucuguuccgcaagaguaaucuuaagccuuuugagagagauauauccaccgaaaucuaccaggcgggaagcacacccuguaacgguguugagggcuucaauugcuacuuuccacugcagucuuauggguuccaaccuaccaacggagugggcuaccagcccuauaggguagucguguugucauuugaacuccugcacgccccagcaacuguuugcggucccaaaaagaguacgaauuuagugaaaaacaagugugucaauuucaacuuuaaugggcugacaggcaccggagugcuaacugagagcaacaaaaaguuccucccuuuccagcaguuuggccgggacauugcugauaccacagacgccguacgagauccacaaacccuggagauccuugacauaacuccgugcuccuucgggggagugucuguuauuacacccgguacgaauaccucgaaccaggucgcuguguuguaccagggcgugaauuguacugaagucccuguugccauccacgcagaccagcugacaccaaccuggcgcguguauagcacaggguccaacguguuucaaacuagagccggaugccucaucggcgcugagcauguaaacaauucauacgaaugugauauucccaucggugcggggauuugcgcaaguuaucagacccagacgaacucuccuaggcgggcccgcagcgucgcuucccagucaauaaucgccuacaccaugagccugggcgcagaaaauucuguggccuacuccaacaauaguauugcuaucccaacaaacuucacuaucagcguuaccacagaaauucuucccgugucuaugacuaagaccuccgucgacuguacgauguauauaugcggagauucaacagaguguaguaaucuguugcuccaauacggcagcuuuugcacccagcugaacagagccuuaacugggaucgcaguggagcaggacaaaaauacacaggaaguuuucgcgcaagugaagcagauuuauaaaaccccgccuaucaaggauuuuggagguuucaacuuuucgcagauucugccagaccccuccaaaccuucuaagaggagcuucaucgaggaucuacucuuuaauaagguaacucuggcugacgccggcuucauaaaacaauacggggauugucuuggagacaucgucgcacgugauuugauuugcgcccagaaguucaacggccugaccgugcugcccccacucuuaacagacgaaaugaucgcucaguauacgucagcccugcuugcagguaccauuacgaguggguggacauuuggcgcuggagccgcguugcagaucccuuucgccaugcaaauggcuuaccgguuuaauggcauaggggugacccagaacguccucuaugagaaucagaaacugauugcaaaccaguucaacuccgccaucggaaagauucaagauucucuaagcuccacagcuucagcccugggcaaacuccaggacguugugaaucagaacgcacaggcgcugaauacucuuguaaagcaauugagcaguaacuuuggugccaucucuuccgugcugaaugacauauuaagccgacucgauaaggucgaagcugaggugcagaucgacagacugauuaccgggaggcuucagucgcugcaaacguacguuacacagcaguugauccgcgccgcagagauucgggcuucagccaaccucgcagccaccaaaaugucugaaugcgugcugggacagaguaagagagucgauuucuguggcaaagguuaccaccuaauguccuuuccccaaagcgcuccacauggcgugguuuuccugcacgugacuuaugucccggcgcaggagaagaauuuuaccacagccccugcaaucugccacgacgggaaagcucauuuccccagggaaggaguauuugugucuaacggcacucacugguucguuacccagcgcaauuuuuacgagccacagauaauuacaacggauaacaccuucgugagcgggaauugugacgucgugaucggaaucguaaacaauacuguguaugauccccuccaaccugagcuggacuccuucaaggaagaacuugauaaauacuuuaagaaccauacaucaccagacgucgauuugggcgacauuagugguaucaaugccagcguugugaacauucagaaggaaauagaucgacugaaugagguggccaaaaacuuaaacgaaucucucaucgaccugcaggagcuugggaaguaugagcaguacauuaaauggcccugguauaucuggcugggauucauugcuggccuaaucgcaauagucauggugaccaucaugcucugcuguaugacuuccugcuguucaugccugaaggguuguugcaguuguggcagcugcugcaaauuugacgaagaugacuccgagccuguuuugaaggggguaaagcugcacuacacauga

SEQ ID NO: 12011 - RNA, 3822 nt, Artificial Sequence
  SARS-CoV-2/USA/WA-UW291/2020__EPI_ISL_418076 spike protein CDS human (1-1273)
auguucguguuucugguccuccuuccccugguuagcucccagugcgugaacuugaccacaagaacucaauuaccuccagccuacacuaauucuuucaccaggggcguauauuacccggacaagguguuucggucaaguguccugcacagcacacaggaucuauuccuccccuuuuucuccaacgugacuugguuucaugcuauccacguuucugggaccaauggaacaaaacgcuucgacaacccugugcugccauuuaaugauggugucuauuucgcaucgaccgagaagucaaacauuauacgaggcuggaucuuugggacuacacuugacagcaaaacccagagucuguugauugugaauaacgccacgaauguaguuaucaaggugugugaguuccaguuuugcaacgaucccuuccucggagucuacuaucauaaaaauaacaaguccuggauggagucugaguuccguguguacagcuccgcgaauaacuguacuuuugaguaugugucacaaccuuuccugauggaccuggaaggcaagcaggguaauuuuaaaaaccucagagaguucgucuuuaagaacauugauggguacuucaaaaucuacaguaagcacaccccaauaaauuuaguuagggaccugccccagggauuuagcgcucuugagccuuugguggaucugccaaucggcauuaacaucacacgguuccagacucuacucgcccugcaucgcucuuaucuuaccccgggcgacuccucaagcggguggacagcaggagccgcugcauacuauguagguuaccugcaacccagaaccuuuuugcucaaauauaaugaaaacggcacgauuacugaugccguggacugcgcucuggauccuuuaagugagacaaaguguacccugaagucuuucacugucgaaaaagggaucuaccagacauccaauuuuagggugcagccaaccgagagcauaguucgguuccccaacauuacgaaucucugcccuuuuggagagguguucaacgccacccgcuucgcgucggucuaugcauggaaucgaaagagaaucucuaacuguguggccgacuacuccguacuuuacaauucagcuaguuuuagcacauucaaaugcuauggcguuuccccaacuaagcugaacgacuuguguuuuaccaauguguacgccgauucuuucgucauuaggggugacgaagugcggcagaucgcacccgggcaaacaggaaaaaucgcugauuauaacuacaagcuaccggacgauuuuacuggcugcgucauugccuggaauagcaacaaccuggacucaaaagugggcgggaauuauaacuaccucuaucgucuguuccgcaagaguaaucuuaagccuuuugagagagauauauccaccgaaaucuaccaggcgggaagcacacccuguaacgguguugagggcuucaauugcuacuuuccacugcagucuuauggguuccaaccuaccaacggagugggcuaccagcccuauaggguagucguguugucauuugaacuccugcacgccccagcaacuguuugcggucccaaaaagaguacgaauuuagugaaaaacaagugugucaauuucaacuuuaaugggcugacaggcaccggagugcuaacugagagcaacaaaaaguuccucccuuuccagcaguuuggccgggacauugcugauaccacagacgccguacgagauccacaaacccuggagauccuugacauaacuccgugcuccuucgggggagugucuguuauuacacccgguacgaauaccucgaaccaggucgcuguguuguaccagggcgugaauuguacugaagucccuguugccauccacgcagaccagcugacaccaaccuggcgcguguauagcacaggguccaacguguuucaaacuagagccggaugccucaucggcgcugagcauguaaacaauucauacgaaugugauauucccaucggugcggggauuugcgcaaguuaucagacccagacgaacucuccuaggcgggcccgcagcgucgcuucccagucaauaaucgccuacaccaugagccugggcgcagaaaauucuguggccuacuccaacaauaguauugcuaucccaacaaacuucacuaucagcguuaccacagaaauucuucccgugucuaugacuaagaccuccgucgacuguacgauguauauaugcggagauucaacagaguguaguaaucuguugcuccaauacggcagcuuuugcacccagcugaacagagccuuaacugggaucgcaguggagcaggacaaaaauacacaggaaguuuucgcgcaagugaagcagauuuauaaaaccccgccuaucaaggauuuuggagguuucaacuuuucgcagauucugccagaccccuccaaaccuucuaagaggagcuucaucgaggaucuacucuuuaauaagguaacucuggcugacgccggcuucauaaaacaauacggggauugucuuggagacaucgcagcccgugauuugauuugcgcucagaaguucaacggccugaccguccugcccccacucuuaacagacgaaaugaucgcccaguauacgucagcacugcuugcugguaccauuacgaguggguggacauuuggcgccggagcggccuugcagaucccuuucgcuaugcaaauggcauaccgguuuaauggcauaggggugacccagaacgugcucuaugagaaucagaaacugauugccaaccaguucaacuccgcuaucggaaagauucaauacucucuaagcuccacagccucagcacugggcaaacuccaggaugucguuaaucagaacgcgcaggcccugaauacucuugugaagcaauugagcaguaacuuuggugcuaucucuuccguacugaaugacauauuaagccgacucgacaagguggaagccgagguccagaucgauagacugauuaccgggaggcuucagucgcugcaaacguacgugacacagcaguugauccgcgcagcugagauucgggccucagcaaaccucgccgcuaccaaaaugucugaaugcguucugggacagaguaagagaguggacuucuguggcaaagguuaucaccuaauguccuuuccccaaagcgcgccacauggcgucguguuccugcacguuacuuacgugccggcccaggagaagaauuuuaccacagcuccugcaaucugccacgaugggaaagcccauuuccccagggaaggagucuuuguaucuaacggcacucacugguucgugacccagcgcaauuuuuaugagccacagauaauuacaacggacaacaccuucguuagcgggaauugugauguggucaucggaaucgugaacaauacuguauacgacccccuccaaccugagcuggauuccuucaaggaagaacuugacaaauauuuuaagaaccauacaucaccagauguggacuugggcgauauuagugguaucaaugccagcgucguuaacauucagaaggaaauagaccgacugaaugagguggcuaaaaacuuaaacgaaucucucaucgaucugcaggagcuugggaaguacgagcaguauauuaaauggcccugguacaucuggcugggauucauugcaggccuaaucgccauagugauggucaccaucaugcucugcuguaugacuuccugcuguucaugccugaaggguuguugcaguuguggcagcugcugcaaauuugacgaagacgauuccgagccuguguugaaggggguuaagcugcacuacacauga

SEQ ID NO: 12012 - RNA, 3822 nt, Artificial Sequence
  SARS-CoV-2/Portugal/PT0034/2020__EPI_ISL_418019 spike protein CDS human (1-1273)
auguucguguuucugguccuccuuccccugguuagcucccagugcgugaacuugaccacaagaacucaauuaccuccagccuacacuaauucuuucaccaggggcguauauuacccggacaagguguuucggucaaguguccugcacagcacacaggaucuauuccuccccuuuuucuccaacgugacuugguuucaugcuauccacguuucugggaccaauggaacaaaacgcuucgacaacccugugcugccauuuaaugauggugucuauuucgcaucgaccgagaagucaaacauuauacgaggcuggaucuuugggacuacacuugacagcaaaacccagagucuguugauugugaauaacgccacgaauguaguuaucaaggugugugaguuccaguuuugcaacgaucccuuccucggagucuacuaucauaaaaauaacaaguccuggauggagucugaguuccguguguacagcuccgcgaauaacuguacuuuugaguaugugucacaaccuuuccugauggaccuggaaggcaagcaggguaauuuuaaaaaccucagagaguucgucuuuaagaacauugauggguacuucaaaaucuacaguaagcacaccccaauaaauuuaguuagggaccugccccagggauuuagcgcucuugagccuuugguggaucugccaaucggcauuaacaucacacgguuccagacucuacucgcccugcaucgcucuuaucuuaccccgggcgacuccucaagcggguggacagcaggagccgcugcauacuauguagguuaccugcaacccagaaccuuuuugcucaaauauaaugaaaacggcacgauuacugaugccguggacugcgcucuggauccuuuaagugagacaaaguguacccugaagucuuucacugucgaaaaagggaucuaccagacauccaauuuuagggugcagccaaccgagagcauaguucgguuccccaacauuacgaaucucugcccuuuuggagagguguucaacgccacccgcuucgcgucggucuaugcauggaaucgaaagagaaucucuaacuguguggccgacuacuccguacuuuacaauucagcuaguuuuagcacauucaaaugcuauggcguuuccccaacuaagcugaacgacuuguguuuuaccaauguguacgccgauucuuucgucauuaggggugacgaagugcggcagaucgcacccgggcaaacaggaaaaaucgcugauuauaacuacaagcuaccggacgauuuuacuggcugcgucauugccuggaauagcaacaaccuggacucaaaagugggcgggaauuauaacuaccucuaucgucuguuccgcaagaguaaucuuaagccuuuugagagagauauauccaccgaaaucuaccaggcgggaagcacacccuguaacgguguugagggcuucaauugcuacuuuccacugcagucuuauggguuccaaccuaccaacggagugggcuaccagcccuauaggguagucguguugucauuugaacuccugcacgccccagcaacuguuugcggucccaaaaagaguacgaauuuagugaaaaacaagugugucaauuucaacuuuaaugggcugacaggcaccggagugcuaacugagagcaacaaaaaguuccucccuuuccagcaguuuggccgggacauugcugauaccacagacgccguacgagauccacaaacccuggagauccuugacauaacuccgugcuccuucgggggagugucuguuauuacacccgguacgaauaccucgaaccaggucgcuguguuguaccagggcgugaauuguacugaagucccuguugccauccacgcagaccagcugacaccaaccuggcgcguguauagcacaggguccaacguguuucaaacuagagccggaugccucaucggcgcugagcauguaaacaauucauacgaaugugauauucccaucggugcggggauuugcgcaaguuaucagacccagacgaacucuccuaggcgggcccgcagcgucgcuucccagucaauaaucgccuacaccaugagccugggcgcagaaaauucuguggccuacuccaacaauaguauugcuaucccaacaaacuucacuaucagcguuaccacagaaauucuucccgugucuaugacuaagaccuccgucgacuguacgauguauauaugcggagauucaacagaguguaguaaucuguugcuccaauacggcagcuuuugcacccagcugaacagagccuuaacugggaucgcaguggagcaggacaaaaauacacaggaaguuuucgcgcaagugaagcagauuuauaaaaccccgccuaucaaggauuuuggagguuucaacuuuucgcagauucugccagaccccuccaaaccuucuaagaggagcuucaucgaggaucuacucuuuaauaagguaacucuggcugacgccggcuucauaaaacaauacggggauugucuuggagacaucgcagcccgugauuugauuugcgcucagaaguucaacggccugaccguccugcccccacucuuaacagacgaaaugaucgcccaguauacgucagcacugcuugcugguaccauuacgaguggguggacauuuggcgccggagcggccuugcagaucccuuucgcuaugcaaauggcauaccgguuuaauggcauaggggugacccagaacgugcucuaugagaaucagaaacugauugccaaccaguucaacuccgcuaucggaaagauucaagauucucuaagcuccacagccucagcacugggcaaacuccaggacgucguuaaucagaacgcgcaggcccugaauacucuugugaagcaauugagcaguaacuuuggugcuaucucuuccguacugaaugacauauuaagccgacucgauaagguggaagccgagguccagaucgacagacugauuaccgggaggcuucagucgcugcaaacguacgugacacagcaguugauccgcgcagcugagauucgggccucagcaaaccucgccgcuaccaaaaugucugaaugcguucugggacagaguaagagaguggauuucuguggcaaagguuaccaccuaauguccuuuccccaaagcgcgccacauggcgucguguuccugcacguuacuuaugugccggcccaggagaagaauuuuaccacagcuccugcaaucugccacgacgggaaagcccauuuccccagggaaggagucuuuguaucuaacggcacucacugguucgugacccagcgcaauuuuuacgagccacagauaauuacaacggauaacaccuucguuagcgggaauugugacguggucaucggaaucgugaacaauacuguauaugauccccuccaaccugagcuggacuccuucaaggaagaacuugauaaauacuuuaagaaccauacaucaccagacguggauuugggcgacauuagugguaucaaugccagcgucguuaacauucagaaggaaauagaucgacugaaugagguggcuaaaaacuuaaacgaaucucucaucgaccugcaggagcuugggaaguaugagcaguacauuaaauggcccugguauaucuggcugggauucauugcaggccuaaucgccauagugauggucaccaucaugcucugcuguauuacuuccugcuguucaugccugaaggguuguugcaguuguggcagcugcugcaaauuugacgaagaugacuccgagccuguguugaaggggguuaagcugcacuacacauga

SEQ ID NO: 12013 - RNA, 3822 nt, Artificial Sequence
  SARS-CoV-2/Iceland/202/2020__EPI_ISL_417750 spike protein CDS human (1-1273)
auguucguguuucugguccuccuuccccugguuagcucccagugcgugaacuugaccacaagaacucaauuaccuccagccuacacuaauucuuucaccaggggcguauauuacccggacaagguguuucggucaaguguccugcacagcacacaggaucuauuccuccccuuuuucuccaacgugacuugguuucaugcuauccacguuucugggaccaauggaacaaaacgcuucgacaacccugugcugccauuuaaugauggugucuauuucgcaucgaccgagaagucaaacauuauacgaggcuggaucuuugggacuacacuugacagcaaaacccagagucuguugauugugaauaacgccacgaauguaguuaucaaggugugugaguuccaguuuugcaacgaucccuuccucggagucuacuaucauaaaaauaacaaguccuggauggagucugaguuccguguguacagcuccgcgaauaacuguacuuuugaauaugugucacaaccuuuccugauggaccuggaaggcaagcaggguaauuuuaaaaaccucagagaguucgucuuuaagaacauugauggguacuucaaaaucuacaguaagcacaccccaauaaauuuaguuagggaccugccccagggauuuagcgcucuugagccuuugguggaucugccaaucggcauuaacaucacacgguuccagacucuacucgcccugcaucgcucuuaucuuaccccgggcgacuccucaagcggguggacagcaggagccgcugcauacuauguagguuaccugcaacccagaaccuuuuugcucaaauauaaugaaaacggcacgauuacugaugccguggacugcgcucuggauccuuuaagugagacaaaguguacccugaagucuuucacugucgaaaaagggaucuaccagacauccaauuuuagggugcagccaaccgagagcauaguucgguuccccaacauuacgaaucucugcccuuuuggagagguguucaacgccacccgcuucgcgucggucuaugcauggaaucgaaagagaaucucuaacuguguggccgacuacuccguacuuuacaauucagcuaguuuuagcacauucaaaugcuauggcguuuccccaacuaagcugaacgacuuguguuuuaccaauguguacgccgauucuuucgucauuaggggugacgaagugcggcagaucgcacccgggcaaacaggaaaaaucgcugauuauaacuacaagcuaccggacgauuuuacuggcugcgucauugccuggaauagcaacaaccuggacucaaaagugggcgggaauuauaacuaccucuaucgucuguuccgcaagaguaaucuuaagccuuuugagagagauauauccaccgaaaucuaccaggcgggaagcacacccuguaacgguguugagggcuucaauugcuacuuuccacugcagucuuauggguuccaaccuaccaacggagugggcuaccagcccuauaggguagucguguugucauuugaacuccugcacgccccagcaacuguuugcggucccaaaaagaguacgaauuuagugaaaaacaagugugucaauuucaacuuuaaugggcugacaggcaccggagugcuaacugagagcaacaaaaaguuccucccuuuccagcaguuuggccgggacauugcugauaccacagacgccguacgagauccacaaacccuggagauccuugacauaacuccgugcuccuucgggggagugucuguuauuacacccgguacgaauaccucgaaccaggucgcuguguuguaccaggacgugaauuguacugaagucccuguugccauccacgcagaucagcugacaccaaccuggcgcguguauagcacaggcuccaacguguuucaaacuagagccgggugccucaucggagcugagcauguaaacaauucauacgaaugugacauucccaucggcgcggguauuugcgcaaguuaucagacccagacgaacucuccuaggcgggcccgcagcgucgcuucccagucaauaaucgccuacaccaugagccugggggcagaaaauucuguggccuacuccaacaauaguauugcuaucccaacaaacuucacuaucagcguuaccacagaaauucuucccgugucuaugacuaagaccuccgucgauuguacgauguauauaugcggcgacucaacagaguguaguaaucuguugcuccaauacggcagcuuuugcacccagcugaacagagccuuaacuggaaucgcaguggagcaggauaaaaauacacaggaaguuuucgcgcaagugaagcagauuuauaaaaccccgccuaucaaggacuuugggggauucaacuuuucgcagauucugccagaucccuccaaaccuucuaagaggagcuucaucgaggaccuacucuuuaauaagguaacucuggcugaugccgguuucauaaaacaauacggcgacugucuuggggauaucgcagcccgugacuugauuugcgcucagaaguucaacggacugaccguccugcccccacucuuaacagaugaaaugaucgcccaguauacgucagcacugcuugcuggcaccauuacgagugguuggacauuuggggccggcgcggccuugcagaucccuuucgcuaugcaaauggcauaccgguuuaauggaauaggcgugacccagaacgugcucuaugagaaucagaaacugauugccaaccaguucaacuccgcuaucgggaagauucaagacucucuaagcuccacagccucagcacugggaaaacuccaggacgucguuaaucagaacgcgcaggcccugaauacucuugugaagcaauugagcaguaacuuuggcgcuaucucuuccguacugaaugauauauuaagccgacucgacaagguggaagccgagguccagaucgauagacugauuaccgguaggcuucagucgcugcaaacguacgugacacagcaguugauccgcgcagcugagauucgggccucagcaaaccucgccgcuaccaaaaugucugaaugcguucuggggcagaguaagagaguggacuucuguggaaaaggcuaccaccuaauguccuuuccccaaagcgcgccacauggugucguguuccugcacguuacuuaugugccggcccaggagaagaauuuuaccacagcuccugcaaucugccacgauggcaaagcccauuuccccagggaaggggucuuuguaucuaacggaacucacugguucgugacccagcgcaauuuuuacgagccacagauaauuacaacggacaacaccuucguuagcggcaauugugauguggucaucgggaucgugaacaauacuguauaugacccccuccaaccugagcuggauuccuucaaggaggaacuugacaaauacuuuaagaaccauacaucaccagauguggacuugggagauauucccggcaucaaugccagugucguuaacauucagaaggaaauagaccgacugaaugagguggcuaaaaacuuaaacgaaagccucaucgaccugcaggagcuugguaaguaugagcaguacauuaaauggccuugguauaucuggcugggguucauugcaggacuaaucgccauagugauggucaccaucaugcucugcuguaugacuucuugcuguuccugccugaagggcuguugcucaugugguaguugcugcaaauuugaugaagacgauagcgagccgguguugaagggcguuaagcugcacuacacauga

SEQ ID NO: 12014 - RNA, 3822 nt, Artificial Sequence
  SARS-CoV-2/USA/WA-UW261/2020__EPI_ISL_418046 spike protein CDS human (1-1273)
auguucguguuucugguccuccuuccccugguuagcucccagugcgugaacuugaccacaagaacucaauuaccuccagccuacacgaauagcuucaccaggggcguauauuacccggacaagguguuucggucaaguguccugcacagcacacaggaucuauuccuccccuuuuucuccaacgugacuugguuucaugcuauccacguuucugggaccaauggaacaaaacgcuucgacaacccugugcugccauuuaaugauggugucuauuucgcaucgaccgagaagucaaacauuauacgaggcuggaucuuugggacuacacuugacagcaaaacccagagucuguugauugugaauaacgccacgaauguaguuaucaaggugugugaguuccaguuuugcaacgaucccuuccucggagucuacuaucauaaaaauaacaaguccuggauggagucugaguuccguguguacagcuccgcgaauaacuguacuuuugaguaugugucacaaccuuuccugauggaccuggaaggcaagcaggguaauuuuaaaaaccucagagaguucgucuuuaagaacauugauggguacuucaaaaucuacaguaagcacaccccaauaaauuuaguuagggaccugccccagggauuuagcgcucuugagccuuugguggaucugccaaucggcauuaacaucacacgguuccagacucuacucgcccugcaucgcucuuaucuuaccccgggcgacuccucaagcggguggacagcaggagccgcugcauacuauguagguuaccugcaacccagaaccuuuuugcucaaauauaaugaaaacggcacgauuacugaugccguggacugcgcucuggauccuuuaagugagacaaaguguacccugaagucuuucacugucgaaaaagggaucuaccagacauccaauuuuagggugcagccaaccgagagcauaguucgguuccccaacauuacgaaucucugcccuuuuggagagguguucaacgccacccgcuucacaucggucuaugcguggaaucgaaagagaaucucuaacuguguggcagacuacuccguacuuuacaauucagccaguuuuagcacuuucaaaugcuauggcguuuccccaaccaagcugaacgacuuguguuuuacaaauguguacgcugauucuuucgucauuaggggugacgaagugcggcagaucgcccccgggcaaacuggaaaaaucgcagauuauaacuacaagcuaccggacgauuuuaccggcugcgucauugcuuggaauagcaacaaccuggacucaaaagugggcgggaauuauaacuaccucuaucgucuguuccgcaagaguaaucuuaagccuuuugagagagauauauccacagaaaucuaccaggccggaagcacccccuguaacgguguugagggcuucaauugcuacuuuccacugcagucuuauggguuccaaccuacuaacggagugggcuaccagcccuauaggguagucguguugucauuugaacuccugcacgcgccagccacgguuugcggucccaaaaagaguacaaauuuagugaaaaacaagugugucaauuucaacuuuaaugggcugaccggcacuggagugcuaaccgagagcaacaaaaaguuccucccuuuccagcaguuuggccgggacauugcagauacaaccgacgcuguacgagauccacaaacucuggagauccuugacauaacaccgugcuccuucgggggagugucuguuauuacgcccgguaccaauacuucgaaccaggucgccguguuguaccaggacgugaauuguacagaagucccuguugcuauccacgccgaucagcugaccccaacauggcgcguguauagcacuggcuccaacguguuucaaaccagagcagggugccucaucggagccgagcauguaaacaauucauacgaaugugacauucccaucggcgcugguauuugcgcgaguuaucagacgcagaccaacucuccuaggcgggcacgcagcgucgccucccagucaauaaucgcuuacacaaugagccugggggccgaaaauucuguggcauacuccaacaauaguauugccaucccaacuaacuucaccaucagcguuacaacugaaauucuucccgugucuaugaccaagacguccgucgauuguacaauguauauaugcggcgacucaaccgaguguaguaaucuguugcuccaauacggaucuuuuugcacucagcugaacagagcuuuaacaggcaucgccguggagcaggauaaaaauacccaggaaguuuucgcacaagugaagcagauuuauaaaacuccgccuaucaaggacuuugggggauucaacuuuucgcagauucugccagaucccuccaaaccuucuaagaggagcuucaucgaggaccuacucuuuaauaagguaacccuggcggaugcugguuucauaaaacaauacggcgacugucuuggggauaucgccgcacgugacuugauuugcgcccagaaguucaacggacugacaguccugcccccacucuuaacggaugaaaugaucgcucaguauaccucagcccugcuugcaggcacuauuacaagugguuggaccuuuggggcuggcgccgcguugcagaucccuuucgccaugcaaauggcuuaccgguuuaauggaauaggcgugacacagaacgugcucuaugagaaucagaaacugauugcaaaccaguucaacuccgccaucgggaagauucaagacucucuaagcuccacugcuucagcccugggaaaacuccaggacgucguuaaucagaacgcacaggcgcugaauacccuugugaagcaauugagcaguaacuuuggcgccaucucuuccguacugaaugauauauuaagccgacucgacaagguggaagcugagguccagaucgauagacugauuacggguaggcuucagucgcugcaaacauacgugacccagcaguugauccgcgccgcagagauucgggcuucagccaaccucgcagccacuaaaaugucugaaugcguucuggggcagaguaagagaguggacuucuguggaaaaggcuaccaccuaauguccuuuccccaaagcgcuccacauggugucguguuccugcacguuaccuaugugccggcgcaggagaagaauuuuacaacugccccugcaaucugccacgauggcaaagcucauuuccccagggaaggggucuuuguaucuaacggaacccacugguucgugacacagcgcaauuuuuacgagccacagauaauuacgaccgacaacacuuucguuagcggcaauugugauguggucaucgggaucgugaacaauacaguauaugacccccuccaaccugagcuggauuccuucaaggaagaacuugacaaauacuuuaagaaccauaccucaccagauguggacuugggagauauuaguggcaucaaugccagcgucguuaacauucagaaggaaauagaccgacugaaugagguggccaaaaacuuaaacgaaucucucaucgaccugcaggagcuugguaaguaugagcaguacauuaaauggcccugguauaucuggcugggguucauugcuggacuaaucgcaauagugauggucacuaucaugcucugcuguaugacauccugcuguucaugccugaagggcuguugcaguugugguagcugcugcaaauuugaugaagacgauuccgagccuguguugaagggcguuaagcugcacuacaccuga

SEQ ID NO: 12015 - RNA, 3822 nt, Artificial Sequence
  SARS-CoV-2/Portugal/PT0035/2020__EPI_ISL_418020 spike protein CDS human (1-1273)
auguucguguuucugguccuccuuccccugguuagcucccagugcgugaacuugaccacaagaacucaauuaccuccagccuacacgaauagcuucaccaggggcguauauuacccggacaagguguuucggucaaguguccugcacagcacacaggaucuauuccuccccuuuuucuccaacgugacuugguuucaugcuauccacguuucugggaccaauggaacaaaacgcuucgacaacccugugcugccauuuaaugauggugucuauuucgcaucgaccgagaagucaaacauuauacgaggcuggaucuuugggacuacacuugacagcaaaacccagagucuguugauugugaauaacgccacgaauguaguuaucaaggugugugaguuccaguuuugcaacgaucccuuccucggagucuacuaucauaaaaauaacaaguccuggauggagucugaguuccguguguacagcuccgcgaauaacuguacuuuugaguaugugucacaaccuuuccugauggaccuggaaggcaagcaggguaauuuuaaaaaccucagagaguucgucuuuaagaacauugauggguacuucaaaaucuacaguaagcacaccccaauaaauuuaguuagggaccugccccagggauuuagcgcucuugagccuuugguggaucugccaaucggcauuaacaucacacgguuccagacucuacucgcccugcaucgcucuuaucuuaccccgggcgacuccucaagcggguggacagcaggagccgcugcauacuauguagguuaccugcaacccagaaccuuuuugcucaaauauaaugaaaacggcacgauuacugaugccguggacugcgcucuggauccuuuaagugagacaaaguguacccugaagucuuucacugucgaaaaagggaucuaccagacauccaauuuuagggugcagccaaccgagagcauaguucgguuccccaacauuacgaaucucugcccuuuuggagagguguucaacgccacccgcuucgcgucggucuaugcauggaaucgaaagagaaucucuaacuguguggccgacuacuccguacuuuacaauucagcuaguuuuagcacauucaaaugcuauggcguuuccccaacuaagcugaacgacuuguguuuuaccaauguguacgccgauucuuucgucauuaggggugacgaagugcggcagaucgcacccgggcaaacaggaaaaaucgcugauuauaacuacaagcuaccggacgauuuuacuggcugcgucauugccuggaauagcaacaaccuggacucaaaagugggcgggaauuauaacuaccucuaucgucuguuccgcaagaguaaucuuaagccuuuugagagagauauauccaccgaaaucuaccaggcgggaagcacacccuguaacgguguugagggcuucaauugcuacuuuccacugcagucuuauggguuccaaccuaccaacggagugggcuaccagcccuauaggguagucguguugucauuugaacuccugcacgccccagcaacuguuugcggucccaaaaagaguacgaauuuagugaaaaacaagugugucaauuucaacuuuaaugggcugacaggcaccggagugcuaacugagagcaacaaaaaguuccucccuuuccagcaguuuggccgggacauugcugauaccacagacgccguacgagauccacaaacccuggagauccuugacauaacuccgugcuccuucgggggagugucuguuauuacacccgguacgaauaccucgaaccaggucgcuguguuguaccaggacgugaauuguacugaagucccuguugccauccacgcagaucagcugacaccaaccuggcgcguguauagcacaggcuccaacguguuucaaacuagagccgggugccucaucggagcugagcauguaaacaauucauacgaaugugacauucccaucggcgcggguauuugcgcaaguuaucagacccagacgaacucuccuaggcgggcccgcagcgucgcuucccagucaauaaucgccuacaccaugagccugggggcagaaaauucuguggccuacuccaacaauaguauugcuaucccaacaaacuucacuaucagcguuaccacagaaauucuucccgugucuaugacuaagaccuccgucgauuguacgauguauauaugcggcgacucaacagaguguaguaaucuguugcuccaauacggaucuuuuugcacccagcugaacagagccuuaacuggcaucgcaguggagcaggauaaaaauacacaggaaguuuucgcgcaagugaagcagauuuauaaaaccccgccuaucaaggacuuugggggauucaacuuuucgcagauucugccagaucccuccaaaccuucuaagaggagcuucaucgaggaccuacucuuuaauaagguaacucuggcugaugccgguuucauaaaacaauacggcgacugucuuggggauaucucagcacgugacuugauuugcgcccagaaguucaacggacugaccguccugcccccacucuuaacagaugaaaugaucgcucaguauacgagugcccugcuugcaggcaccauuacuuccgguuggacauuuggggcuggcgccgcguugcagaucccuuucgccaugcaaauggcuuaccgguuuaauggaauaggcgugacccagaacgugcucuaugagaaucagaaacugauugcaaaccaguucaacucugccaucgggaagauucaagacagccuauccucaacagcuagcgcccugggaaaacuccaggacgucguuaaucagaacgcacaggcgcugaauacucuugugaagcaauugaguucuaacuuuggcgccaucuccagcguacugaaugauauauuaucgcgacucgacaagguggaagcugagguccagaucgauagacugauuaccgguaggcuucagucacugcaaacguacgugacacagcaguugauccgcgccgcagagauucgggcuucugccaaccucgcagccaccaaaaugagugaaugcguucuggggcaguccaagagaguggacuucuguggaaaaggcuaccaccuaaugagcuuuccccaaucugcuccacauggugucguguuccugcacguuacuuaugugccggcgcaggagaagaauuuuaccacagccccugcaaucugccacgauggcaaagcucauuuccccagggaaggggucuuuguaagcaacggaacucacugguucgugacccagcgcaauuuuuacgagccacagauaauuacaacggacaacaccuucguuuccggcaauugugauguggucaucgggaucgugaacaauacuguauaugacccccuccaaccugagcuggauucauucaaggaagaacuugacaaauacuuuaagaaccauacaaguccagauguggacuugggagauauuagcggcaucaaugccucugucguuaacauucagaaggaaauagaccgacugaaugagguggccaaaaacuuaaacgaaucccucaucgaccugcaggagcuugguaaguaugagcaguacauuaaauggcccugguauaucuggcugggguucauugcuggacuaaucgcaauagugauggucaccaucaugcucugcuguaugacuucaugcuguaguugccugaagggcuguugcagcugugguuccugcugcaaauuugaugaagacgauucugagccuguguugaagggcguuaagcugcacuacacauga

SEQ ID NO: 12016 - RNA, 3822 nt, Artificial Sequence
  SARS-CoV-2/USA/NY-NYUMC7/2020__EPI_ISL_418192 spike protein CDS human (1-1273)
auguucguguuucugguccuccuuccccugguuagcucccagugcgugaacuugaccacaagaacucaauuaccuccagccuacacuaauucuuucaccaggggcguauauuacccggacaagguguuucggucaaguguccugcacagcacacaggaucuauuccuccccuuuuucuccaacgugacuugguuucaugcuauccacguuucugggaccaauggaacaaaacgcuucgacaacccugugcugccauuuaaugauggugucuauuucgcaucgaccgagaagucaaacauuauacgaggcuggaucuuugggacuacacuugacagcaaaacccagagucuguugauugugaauaacgccacgaauguaguuaucaaggugugugaguuccaguuuugcaacgaucccuuccucggagucuaccaucacaaaaauaacaaguccuggauggagucugaguuccguguguauagcuccgcgaauaacuguacuuuugaguacgugucacaaccuuuccugauggaccuggaaggcaagcaggguaauuuuaaaaaccucagagaguucgucuuuaagaacauugauggguauuucaaaaucuacaguaagcauaccccaauaaauuuaguuagggaccugccccagggauuuagcgcucuugagccuuugguggaucugccaaucggcauuaacaucacacgguuccagacucuacucgcccugcaccgcucuuaccuuaccccgggcgacuccucaagcggguggacagcaggagccgcugcauauuacguagguuaucugcaacccagaaccuuuuugcucaaauacaaugaaaacggcacgauuacugaugccguggacugcgcucuggauccuuuaagugagacaaaguguacccugaagucuuucacugucgaaaaagggaucuaucagacauccaauuuuagggugcagccaaccgagagcauaguucgguuccccaacauuacgaaucucugcccuuuuggagagguguucaacgccacccgcuucgcgucggucuacgcauggaaucgaaagagaaucucuaacuguguggccgacuauuccguacuuuacaauucagcuaguuuuagcacauucaaaugcuacggcguuuccccaacuaagcugaacgacuuguguuuuaccaauguguaugccgauucuuucgucauuaggggugacgaagugcggcagaucgcacccgggcaaacaggaaaaaucgcugauuacaacuauaagcuaccggacgauuuuacuggcugcgucauugccuggaauagcaacaaccuggacucaaaagugggcgggaauuacaacuaucucuaccgucuguuccgcaagaguaaucuuaagccuuuugagagagauauauccaccgaaaucuaucaggcgggaagcacacccuguaacgguguugagggcuucaauugcuacuuuccacugcagucuuacggguuccaaccuaccaacggagugggcuaucagcccuacaggguagucguguugucauuugaacuccugcacgccccagcaacuguuugcggucccaaaaagaguacgaauuuagugaaaaacaagugugucaauuucaacuuuaaugggcugacaggcaccggagugcuaacugagagcaacaaaaaguuccucccuuuccagcaguuuggccgggacauugcugauaccacagacgccguacgagauccacaaacccuggagauccuugacauaacuccgugcuccuucgggggagugucuguuauuacacccgguacgaauaccucgaaccaggucgcuguguuguaucagggcgugaauuguacugaagucccuguugccauccaugcagaccagcugacaccaaccuggcgcguguacagcacaggguccaacguguuucaaacuagagccggaugccucaucggcgcugagcacguaaacaauucauaugaaugugauauucccaucggugcggggauuugcgcaaguuaccagacccagacgaacucuccuaggcgggcccgcagcgucgcuucccagucaauaaucgccuauaccaugagccugggcgcagaaaauucuguggccuacuccaacaauaguauugcuaucccaacaaacuucacuaucagcguuaccacagaaauucuucccgugucuaugacuaagaccuccgucgacuguacgauguacauaugcggagauucaacagaguguaguaaucuguugcuccaauauggcagcuuuugcacccagcugaacagagccuuaacugggaucgcaguggagcaggacaaaaauacacaggaaguuuucgcgcaagugaagcagauuuacaaaaccccgccuaucaaggauuuuggagguuucaacuuuucgcagauucugccagaccccuccaaaccuucuaagaggagcuucaucgaggaucuacucuuuaauaagguaacucuggcugacgccggcuucauaaaacaauauggggauugucuuggagacaucgcagcccgugauuugauuugcgcucagaaguucaacggccugaccguccugcccccacucuuaacagacgaaaugaucgcccaguacacgucagcacugcuugcugguaccauuacgaguggguggacauuuggcgccggagcggccuugcagaucccuuucgcuaugcaaauggcauaucgguuuaauggcauaggggugacccagaacgugcucuacgagaaucagaaacugauugccaaccaguucaacuccgcuaucggaaagauucaagauucucuaagcuccacagccucagcacugggcaaacuccaggacgucguuaaucagaacgcgcaggcccugaauacucuugugaagcaauugagcaguaacuuuggugcuaucucuuccguacugaaugacauauuaagccgacucgauaagguggaagccgagguccagaucgacagacugauuaccgggaggcuucagucgcugcaaacguaugugacacagcaguugauccgcgcagcugagauucgggccucagcaaaccucgccgcuaccaaaaugucugaaugcguucugggacagaguaagagaguggauuucuguggcaaagguuaccaucuaauguccuuuccccaaagcgcgccacacggcgucguguuccugcacguuacuuacgugccggcccaggagaagaauuuuaccacagcuccugcaaucugccaugacgggaaagcccacuuccccagggaaggagucuuuguaucuaacggcacucauugguucgugacccagcgcaauuuuuaugagccacagauaauuacaacggauaacaccuucguuagcgggaauugugacguggucaucggaaucgugaacaauacuguauacgauccccuccaaccugagcuggacuccuucaaggaagaacuugauaaauauuuuaagaaccacacaucaccagacguggauuugggcgacauuagugguaucaaugccagcgucguuaacauucagaaggaaauagaucgacugaaugagguggcuaaaaacuuaaacgaaucucucaucgaccugcaggagcuugggaaguacgagcaguauauuaaauggcccugguacaucuggcugggauucauugcaggccuaaucgccauagugauggucaccaucaugcucugcuguaugacuuccugcuguucaugccugaaggguuguugcaguuguggcagcugcugcaaauuugacgaagaugacuccgagccuguguugaaggggguuaagcugcauuauacauga

SEQ ID NO: 12017 - RNA, 3822 nt, Artificial Sequence
  SARS-CoV-2/Iceland/189/2020__EPI_ISL_417709 spike protein CDS human (1-1273)
auguucguguuucugguccuccuuccccugguuagcucccagugcgugaacuugaccacaagaacucaauuaccuccagccuacaccaauucuuucacgaggggcguauauuacccggacaagguguuucggucaaguguccugcacagcacacaggaucuauuccuccccuuuuucuccaacgugacuugguuucaugcuauccacguuucugggaccaauggaacaaaacgcuucgacaacccugugcugccauuuaaugauggugucuauuucgcaucgaccgagaagucaaacauuauacgaggcuggaucuuugggacuacacuugacagcaaaacccagagucuguugauugugaauaacgccacgaauguaguuaucaaggugugugaguuccaguuuugcaacgaucccuuccucggagucuacuaucauaaaaauaacaaguccuggauggagucugaguuccguguguacagcuccgcgaauaacuguacuuuugaguaugugucacaaccuuuccugauggaccuggaaggcaagcaggguaauuuuaaaaaccucagagaguucgucuuuaagaacauugauggguacuucaaaaucuacaguaagcacaccccaauaaauuuaguuagggaccugccccagggauuuagcgcucuugagccuuugguggaucugccaaucggcauuaacaucacacgguuccagacucuacucgcccugcaucgcucuuaucuuaccccgggcgacuccucaagcggguggacagcaggagccgcugcauacuauguagguuaccugcaacccagaaccuuuuugcucaaauauaaugaaaacggcacgauuacugaugccguggacugcgcucuggauccuuuaagugagacaaaguguacccugaagucuuucacugucgaaaaagggaucuaccagacauccaauuuuagggugcagccaaccgagagcauaguucgguuccccaacauuacgaaucucugcccuuuuggagagguguucaacgccacccgcuucgcgucggucuaugcauggaaucgaaagagaaucucuaacuguguggccgacuacuccguacuuuacaauucagcuaguuuuagcacauucaaaugcuauggcguuuccccaacuaagcugaacgacuuguguuuuaccaauguguacgccgauucuuucgucauuaggggugacgaagugcggcagaucgcacccgggcaaacaggaaaaaucgcugauuauaacuacaagcuaccggacgauuuuacuggcugcgucauugccuggaauagcaacaaccuggacucaaaagugggcgggaauuauaacuaccucuaucgucuguuccgcaagaguaaucuuaagccuuuugagagagauauauccaccgaaaucuaccaggcgggaagcacacccuguaacgguguugagggcuucaauugcuacuuuccacugcagucuuauggguuccaaccuaccaacggagugggcuaccagcccuauaggguagucguguugucauuugaacuccugcacgccccagcaacuguuugcggucccaaaaagaguacgaauuuagugaaaaacaagugugucaauuucaacuuuaaugggcugacaggcaccggagugcuaacugagagcaacaaaaaguuccucccuuuccagcaguuuggccgggacauugcugauaccacagacgccguacgagauccacaaacccuggagauccuugacauaacuccgugcuccuucgggggagugucuguuauuacacccgguacgaauaccucgaaccaggucgcuguguuguaccagggcgugaauuguacugaagucccuguugccauccacgcagaccagcugacaccaaccuggcgcguguauagcacaggguccaacguguuucaaacuagagccggaugccucaucggcgcugagcauguaaacaauucauacgaaugugauauucccaucggugcggggauuugcgcaaguuaucagacccagacgaacucuccuaggcgggcccgcagcgucgcuucccagucaauaaucgccuacaccaugagccugggcgcagaaaauucuguggccuacuccaacaauaguauugcuaucccaacaaacuucacuaucagcguuaccacagaaauucuucccgugucuaugacuaagaccuccgucgacuguacgauguauauaugcggagauucaacagaguguaguaaucuguugcuccaauacggcagcuuuugcacccagcugaacagagccuuaacugggaucgcaguggagcaggacaaaaauacacaggaaguuuucgcgcaagugaagcagauuuauaaaaccccgccuaucaaggauuuuggagguuucaacuuuucgcagauucugccagaccccuccaaaccuucuaagaggagcuucaucgaggaucuacucuuuaauaagguaacucuggcugacgccggcuucaccaaacaauacggggauugucuuggagacauagcagcccgugauuugaucugcgcucagaaguucaacggccugacaguccucccuccacuguuaacggacgaaaugauugcccaguauaccucagcacugcuugcugguacuaucacaaguggguggaccuuuggcgccggagcggccuugcagauuccuuucgcuaugcaaauggcauaccgguuuaauggcaucggggugacacagaacgugcucuaugagaaucagaaacugauagccaaccaguucaacuccgcuauuggaaagauccaagauucucuaagcuccacugccucagcacugggcaaacuccaggacgucguuaaucagaacgcgcaggcccugaauacccuugugaagcaauugagcaguaacuuuggugcuauuucuuccguacugaaugacaucuuaagccgacucgauaagguggaagccgagguccagauagacagacugaucacggggaggcuucagucgcugcaaacauacgugacccagcaguugauucgcgcagcugagauccgggccucagcaaaccucgccgcuacuaaaaugucugaaugcguucugggacagaguaagagaguggauuucuguggcaaagguuaccaccuaauguccuuuccccaaagcgcgccacauggcgucguguuccugcacguuaccuaugugccggcccaggagaagaauuuuacaacugcacccgcuauuugccacgacgggaaagcccauuuccccagggaaggagucuuuguaucuaacggcacccacugguucgugacacagcgcaauuuuuacgagccacagaucauaacgaccgauaacacuuucguuagcgggaauugugacguggucauuggaaucgugaacaauacaguauaugauccccuccaaccugagcuggacuccuucaaggaagaacuugauaaauacuuuaagaaccauaccucaccagacguggauuugggcgacaucagugguauuaaugccagcgucguuaacauccagaaggaaauugaucgacugaaugagguggcuaaaaacuuaaacgaaucucucauagaccugcaggagcuugggaaguaugagcaguacaucaaauggcccugguauauuuggcugggauucaucgcaggccuaauugccaucgugauggucacuauaaugcucugcuguaugacauccugcuguucaugccugaaggguuguugcaguuguggcagcugcugcaaauuugacgaagaugacuccgagccuguguugaaggggguuaagcugcacuacaccuga

SEQ ID NO: 12018 - RNA, 3822 nt, Artificial Sequence
  SARS-CoV-2/Australia/NSW56/2020__EPI_ISL_417408 spike protein CDS human (1-1273)
auguucguguuucugguccuccuuccccugguuagcucccagugcgugaacuugaccacaagaacucaauuaccuccagccuacacgaauagcuucaccaggggcguauauuacccggacaagguguuucggucaaguguccugcacagcacacaggaucuauuccuccccuuuuucuccaacgugacuugguuucaugcuauccacguuucugggaccaauggaacaaaacgcuucgacaacccugugcugccauuuaaugauggugucuauuucgcaucgaccgagaagucaaacauuauacgaggcuggaucuuugggacuacacuugacagcaaaacccagagucuguugauugugaauaacgccacgaauguaguuaucaaggugugugaguuccaguuuugcaacgaucccuuccucggagucuacuaucauaaaaauaacaaguccuggauggagucugaguuccguguguacagcuccgcgaauaacuguacuuuugaguaugugucacaaccuuuccugauggaccuggaaggcaagcaggguaauuuuaaaaaccucagagaguucgucuuuaagaacauugauggguacuucaaaaucuacaguaagcacaccccaauaaauuuaguuagggaccugccccagggauuuagcgcucuugagccuuugguggaucugccaaucggcauuaacaucacacgguuccagacucuacucgcccugcaucgcucuuaucuuaccccgggcgacuccucaagcggguggacagcaggagccgcugcauacuauguagguuaccugcaacccagaaccuuuuugcucaaauauaaugaaaacggcacgauuacugaugccguggacugcgcucuggauccuuuaagugagacaaaguguacccugaagucuuucacugucgaaaaagggaucuaccagacauccaauuuuagggugcagccaaccgagagcauaguucgguuccccaacauuacgaaucucugcccuuuuggagagguguucaacgccacccgcuucgcgucggucuaugcauggaaucgaaagagaaucucuaacuguguggccgacuacuccguacuuuacaauucagcuaguuuuagcacauucaaaugcuauggcguuuccccaacuaagcugaacgacuuguguuuuaccaauguguacgccgauucuuucgucauuaggggugacgaagugcggcagaucgcacccgggcaaacaggaaaaaucgcugauuauaacuacaagcuaccggacgauuuuacuggcugcgucauugccuggaauagcaacaaccuggacucaaaagugggcgggaauuauaacuaccucuaucgucuguuccgcaagaguaaucuuaagccuuuugagagagauauauccaccgaaaucuaccaggcgggaagcacacccuguaacgguguugagggcuucaauugcuacuuuccacugcagucuuauggguuccaaccuaccaacggagugggcuaccagcccuauaggguagucguguugucauuugaacuccugcacgccccagcaacuguuugcggucccaaaaagaguacgaauuuagugaaaaacaagugugucaauuucaacuuuaaugggcugacaggcaccggagugcuaacugagagcaacaaaaaguuccucccuuuccagcaguuuggccgggacauugcugauaccacagacgccguacgagauccacaaacccuggagauccuugacauaacuccgugcuccuucgggggagugucuguuauuacacccgguacgaauaccucgaaccaggucgcuguguuguaccaggacgugaauuguacugaagucccuguugccauccacgcagaucagcugacaccaaccuggcgcguguauagcacaggcuccaacguguuucaaacuagagccgggugccucaucggagcugagcauguaaacaauucauacgaaugugacauucccaucggcgcggguauuugcgcaaguuaucagacccagacgaacucuccuaggcgggcccgcagcgucgcuucccagucaauaaucgccuacaccaugagccugggggcagaaaauucuguggccuacuccaacaauaguauugcuaucccaacaaacuucacuaucagcguuaccacagaaauucuucccgugucuaugacuaagaccuccgucgauuguacgauguauauaugcggcgacucaacagaguguaguaaucuguugcuccaauacggaucuuuuugcacccagcugaacagagccuuaacuggcaucgcaguggagcaggauaaaaauacacaggaaguuuucgcgcaagugaagcagauuuauaaaaccccgccuaucaaggacuuugggggauucaacuuuucgcagauucugccagauuccucuaaacccagcaagaggucauucaucgaggaccuacucuuuaauaagguaacucuggcugaugccgguuucauaaaacaauacggcgacugucuuggggauaucgcagcccgugacuugauuugcgcucagaaguucaacggacugaccguccucccuccccuguuaacagaugaaaugaucgcccaguauacgagugcacugcuugcuggcaccauuacuuccgguuggacauuuggggccggcgcggccuugcagaucccauucgcuaugcaaauggcauaccgguuuaauggaauaggcgugacccagaacgugcucuaugagaaucagaaacugauugccaaccaguucaacucugcuaucgggaagauucaagacagccuauccucaacagccagcgcacugggaaaacuccaggacgucguuaaucagaacgcgcaggcccugaauacucuugugaagcaauugaguucuaacuuuggcgcuaucuccagcguacugaaugauauauuaucgcgacucgacaagguggaagccgagguccagaucgauagacugauuaccgguaggcuucagucacugcaaacguacgugacacagcaguugauccgcgcagcugagauucgggccucugcaaaccucgccgcuaccaaaaugagugaaugcguucuggggcaguccaagagaguggacuucuguggaaaaggcuaccaccuaaugagcuuuccucaaucugcgccccauggugucguguuccugcacguuacuuaugugccagcccaggagaagaauuuuaccacagcaccggcuaucugccacgauggcaaagcccauuucccuagggaaggggucuuuguaagcaacggaacucacugguucgugacccagcgcaauuuuuacgagccccagauaauuacaacggacaacaccuucguuuccggcaauugugauguggucaucgggaucgugaacaauacuguauaugacccacuccaacccgagcuggauucauucaaggaagaacuugacaaauacuuuaagaaccauacaaguccugauguggacuugggagauauuagcggcaucaaugccucugucguuaacauucagaaggaaauagaccgacugaaugagguggcuaaaaacuuaaacgaaucccucaucgaccugcaggagcuugguaaguaugagcaguacauuaaauggccaugguauaucuggcugggguucauugcaggacuaaucgccauagugauggucaccaucaugcucugcuguaugacuucaugcuguaguugccugaagggcuguugcagcugugguuccugcugcaaauuugaugaagacgauucugagcccguguugaagggcguuaagcugcacuacacauga

SEQ ID NO: 12019 - RNA, 3822 nt, Artificial Sequence
  SARS-CoV-2/Iceland/280/2020__EPI_ISL_417608 spike protein CDS human (1-1273)
auguucguguuucugguccuccuuccccugguuagcucccagugcgugaacuugaccacaagaacucaauuaccuccagccuacacuaauucuuucaccaggggcguauauuacccggacaagguguuucggucaaguguccugcacagcacacaggaucuauuccuccccuuuuucuccaacgugacuugguuucaugcuauccacguuucugggaccaauggaacaaaacgcuucgacaacccugugcugccauuuaaugauggugucuauuucgcaucgaccgagaagucaaacauuauacgaggcuggaucuuugggacuacacuugacagcaaaacccagagucuguugauugugaauaacgccacgaauguaguuaucaaggugugugaguuccaguuuugcaacgaucccuuccucggagucuacuaucauaaaaauaacaaguccuggauggagucugaguuccguguguacagcuccgcgaauaacuguacuuuugaguaugugucacaaccuuuccugauggaccuggaaggcaagcaggguaauuuuaaaaaccucagagaguucgucuuuaagaacauugauggguacuucaaaaucuacaguaagcacaccccaauaaauuuaguuagggaccugccccagggauuuagcgcucuugagccuuugguggaucugccaaucggcauuaacaucacacgguuccagacucuacucgcccugcaucgcucuuaucuuaccccgggcgacuccucaagcggguggacagcaggagccgcugcauacuauguagguuaccugcaacccagaaccuuuuugcucaaauauaaugaaaacggcacgauuacugaugccguggacugcgcucuggauccuuuaagugagacaaaguguacccugaagucuuucacugucgaaaaagggaucuaccagacauccaauuuuagggugcagccaaccgagagcauaguucgguuccccaacauuacgaaucucugcccuuuuggagagguguucaacgccacccgcuucgcgucggucuaugcauggaaucgaaagagaaucucuaacuguguggccgacuacuccguacuuuacaauucagcuaguuuuagcacauucaaaugcuauggcguuuccccaacuaagcugaacgacuuguguuuuaccaauguguacgccgauucuuucgucauuaggggugacgaagugcggcagaucgcacccgggcaaacaggaaaaaucgcugauuauaacuacaagcuaccggacgauuuuacuggcugcgucauugccuggaauagcaacaaccuggacucaaaagugggcgggaauuauaacuaccucuaucgucuguuccgcaagaguaaucuuaagccuuuugagagagauauauccaccgaaaucuaccaggcgggaagcacacccuguaacgguguugagggcuucaauugcuacuuuccacugcagucuuauggguuccaaccuaccaacggagugggcuaccagcccuauaggguagucguguugucauuugaacuccugcacgccccagcaacuguuugcggucccaaaaagaguacgaauuuagugaaaaacaagugugucaauuucaacuuuaaugggcugacaggcaccggagugcuaacugagagcaacaaaaaguuccucccuuuccagcaguuuggccgggacauugcugauaccacagacgccguacgagauccacaaacccuggagauccuugacauaacuccgugcuccuucgggggagugucuguuauuacacccgguacgaauaccucgaaccaggucgcuguguuguaccagggcgugaauuguacugaagucccuguugccauccacgcagaccagcugacaccaaccuggcgcguguauagcacaggguccaacguguuucaaacuagagccggaugccucaucggcgcugagcauguaaacaauucauacgaaugugauauucccaucggugcggggauuugcgcaaguuaucacacccagacgaacucuccuaggcgggcccgcagcgucgcuucccagucaauaaucgccuacaccaugagccugggcgcagaaaauucuguggccuacuccaacaauaguauugcuaucccaacaaacuucacuaucagcguuaccacagaaauucuucccgugucuaugacuaagaccuccgucgacuguacgauguauauaugcggagauucaacagaguguaguaaucuguugcuccaguacggcagcuuuugcacccaacugaacagagccuuaacugggaucgcaguggagcaggacaaaaauacacaggaaguuuucgcacaggugaagcaaauuuauaaaaccccgccuaucaaggauuuuggagguuucaacuuuucgcagauucugccagaccccuccaaaccuucuaagaggagcuucaucgaggaucuacucuuuaauaagguaacucuggcugacgccggcuucauaaaacaguacggggauugucuuggagacaucgcagcccgugauuugauuugcgcucaaaaguucaacggccugaccguccugcccccacucuuaacagacgaaaugaucgcccaguauacgucagcacugcuugcugguaccauuacgaguggguggacauuuggcgccggagcggccuugcagaucccuuucgcuaugcagauggcauaccgguuuaauggcauaggggugacccaaaacgugcucuaugagaaucagaaacugauugccaaccaguucaacuccgcuaucggaaagauucaggauucucuaagcuccacagccucagcacugggcaaacuccaagacgucguuaaucagaacgcgcaggcccugaauacucuugugaagcaguugagcaguaacuuuggugcuaucucuuccguacugaaugacauauuaagccgacucgauaagguggaagccgagguccaaaucgacagacugauuaccgggaggcuucagucgcugcagacguacgugacacaacaguugauccgcgcagcugagauucgggccucagcaaaccucgccgcuaccaaaaugucugaaugcguucugggacagaguaagagaguggauuucuguggcaaagguuaccaucuaauguccuuuccccagagcgcgccacacggcgucguguuccugcacguuacuuaugugccggcccaagagaagaauuuuaccacagcgccugcuaucugccaugacgggaaagcccacuuccccagggaaggagucuuuguaucuaacggcacucauugguucgugacccagcgcaauuuuuacgagccacagauaauuacaacggauaacaccuucguuagcgggaauugugacguggucaucggaaucgugaacaauacuguauaugauccccuccagccugagcuggacuccuucaaggaagaacuugauaaauacuuuaagaaccacacaucaccagacguggauuugggcgacauuagugguaucaaugccagcgucguuaacauucaaaaggaaauagaucgacugaaugagguggcuaaaaacuuaaacgaaucucucaucgaccugcaggagcuugggaaguaugagcaguacauuaaauggcccugguauaucuggcugggauucauugcaggccuaaucgccauagugauggucaccaucaugcucugcuguaugacuuccugcuguucaugccugaaggguuguugcaguuguggcagcugcugcaaauuugacgaagaugacuccgagccuguguugaaggggguuaagcugcauuacacauga

SEQ ID NO: 12020 - RNA, 3822 nt, Artificial Sequence
  SARS-CoV-2/Iceland/247/2020__EPI_ISL_417575 spike protein CDS human (1-1273)
auguucguguuucugguccuccuuccccugguuagcucccagugcgugaacuugaccacaagaacucaauuaccuccagccuacacuaauucuuucaccaggggcguauauuacccggacaagguguuucggucaaguguccugcacagcacacaggaucuauuccuccccuuuuucuccaacgugacuugguuucaugcuauccacguuucugggaccaauggaacaaaacgcuucgacaacccugugcugccauuuaaugauggugucuauuucgcaucgaccgagaagucaaacauuauacgaggcuggaucuuugggacuacacuugacagcaaaacccagagucuguugauugugaauaacgccacgaauguaguuaucaaggugugugaguuccaguuuugcaacgaucccuuccucggagucuacuaucauaaaaauaacaaguccuggauggagucugaguuccguguguacagcuccgcgaauaacuguacuuuugaguaugugucacaaccuuuccugauggaccuggaaggcaagcaggguaauuuuaaaaaccucagagaguucgucuuuaagaacauugauggguacuucaaaaucuacaguaagcacaccccaauaaauuuaguuagggaccugccccagggauuuagcgcucuugagccuuugguggaucugccaaucggcauuaacaucacacgguuccagacucuacucgcccugcaucgcucuuaucuuaccccgggcgacuccucaagcggguggacagcaggagccgcugcauacuauguagguuaccugcaacccagaaccuuuuugcucaaauauaaugaaaacggcacgauuacugaugccguggacugcgcucuggauccuuuaagugagacaaaguguacccugaagucuuucacugucgaaaaagggaucuaccagacauccaauuuuagggugcagccaaccgagagcauaguucgguuccccaacauuacgaaucucugcccuuuuggagagguguucaacgccacccgcuucgcgucggucuaugcauggaaucgaaagagaaucucuaacuguguggccgacuacuccguacuuuacaauucagcuaguuuuagcacauucaaaugcuauggcguuuccccaacuaagcugaacgacuuguguuuuaccaauguguacgccgauucuuucgucauuaggggugacgaagugcggcagaucgcacccgggcaaacaggaaaaaucgcugauuauaacuacaagcuaccggacgauuuuacuggcugcgucauugccuggaauagcaacaaccuggacucaaaagugggcgggaauuauaacuaccucuaucgucuguuccgcaagaguaaucuuaagccuuuugagagagauauauccaccgaaaucuaccaggcgggaagcacacccuguaacgguguugagggcuucaauugcuacuuuccacugcagucuuauggguuccaaccuaccaacggagugggcuaccagcccuauaggguagucguguugucauuugaacuccugcacgccccagcaacuguuugcggucccaaaaagaguacgaauuuagugaaaaacaagugugucaauuucaacuuuaaugggcugacaggcaccggagugcuaacugagagcaacaaaaaguuccucccuuuccagcaguuuggccgggacauugcugauaccacagacgccguacgagauccacaaacccuggagauccuugacauaacuccgugcuccuucgggggagugucuguuauuacacccgguacgaauaccucgaaccaggucgcuguguuguaccagggcgugaauuguacugaagucccuguugccauccacgcagaccagcugacaccaaccuggcgcguguauagcacaggguccaacguguuucaaacuagagccggaugccucaucggcgcugagcauguaaacaauucauacgaaugugauauucccaucggugcggggauuugcgcaaguuaucagacccagacgaacucuccuaggcgggcccgcagcgucgcuucccagucaauaaucgccuacaccaugagccugggcgcagaaaauucuguggccuacuccaacaauaguauugcuaucccaacaaacuucacuaucagcguuaccacagaaauucuucccgugucuaugacuaagaccuccgucgacuguacgauguauauaugcggagauucaacagaguguaguaaucuguugcuccaauacggcagcuuuugcacccagcugaacagagccuuaacugggaucgcaguggagcaggacaaaaauacacaggaaguuuucgcgcaagugaagcagauuuauaaaaccccgccuaucaaggauuuuggagguuucaacuuuucgcagauucugccagaccccuccaaaccuucuaagaggagcuucaucgaggaucuacucuuuaauaagguaacucuggcugacgccggcuucauaaaacaauacggggauugucuuggagacaucgcagcccgugauuugauuugcgcucagaaguucaacggccugaccguccugcccccacucuuaacagacgaaaugaucgcccaguauacgucagcacugcuugcugguaccauuacgaguggguggacauuuggcgccggagcggccuugcagaucccuuucgcuaugcaaauggcauaccgguuuaauggcauaggggugacccagaacgugcucuaugagaaucagaaacugauugccaaccaguucaacuccgcuaucggaaagauucaagauucucuaagcuccacagccucagcacugggcaaacuccaggacgucguuaaucagaacgcgcaggcccugaauacucuugugaagcaauugagcaguaacuuuggugcuaucucuuccguacugaaugacauauuaagccgacucgauaagguggaagccgagguccagaucgacagacugauuaccgggaggcuucagucgcugcaaacguacgugacacagcaguugauccgcgcagcugagauucgggccucagcaaaccucgccgcuaccaaaaugucugaaugcguucugggacagaguaagagaguggauuucuguggcaaagguuaccaccuaauguccuuuccccaaagcgcgccacauggcgucguguuccugcacguuacuuaugugccggcccaggagaagaauuuuaccacagcuccugcaaucugccacgacgggaaagcccauuuccccagggaaggagucuuuguaucuaacggcacucacugguucgugacccagcgcaauuuuuacgagccacagauaauuacaacggauaacaccuucguuagcgggaauugugacguggucaucggaaucgugaacaauacuguauaugauccccuccaaccugagcuggacuccuucaaggaagaacuugauaaauacuuuaagaaccauacaucaccagacguggauuugggcgacauuagugguaucaaugccagcgucguuaacauucagaaggaaauagaucgacugaaugagguggcuaaaaacuuaaacgaaucucucaucgaccugcaggagcuugggaaguaugagcaguacauuaaauggcccugguauaucuggcugggauucauugcaggccuaaucgccauagugaucgucaccauuaugcucugcuguaugacuuccugcuguucaugccugaaggguuguugcaguuguggcagcugcugcaaauuugacgaagaugacuccgagccuguguugaaggggguuaagcugcacuacacauga

SEQ ID NO: 12021 - RNA, 3822 nt, Artificial Sequence
  SARS-CoV-2/Iceland/238/2020__EPI_ISL_417566 spike protein CDS human (1-1273)
auguucguguuucugguccuccuuccccugguuagcucccagugcgugaacuugaccacaagaacucaauuaccuccagccuacacuaauucuuucaccaggggcguauauuacccggacaagguguuucggucaaguguccugcacagcacacaggaucuauuccuccccuuuuucuccaacgugacuugguuucaugcuauccacguuucugggaccaauggaacaaaacgcuucgacaacccugugcugccauuuaaugauggugucuauuucgcaucgaccgagaagucaaacauuauacgaggcuggaucuuugggacuacacuugacagcaaaacccagagucuguugauugugaauaacgccacgaauguaguuaucaaggugugugaguuccaguuuugcaacgaucccuuccucggagucuacuaucauaaaaauaacaaguccuggauggagucugaguuccguguguacagcuccgcgaauaacuguacuuuugaguaugugucacaaccuuuccugauggaccuggaaggcaagcaggguaauuuuaaaaaccucagagaguucgucuuuaagaacauugauggguacuucaaaaucuacaguaagcacaccccaauaaauuuaguuagggaccugccccagggauuuagcgcucuugagccuuugguggaucugccaaucggcauuaacaucacacgguuccagacucuacucgcccugcaucgcucuuaucuuaccccgggcgacuccucaagcggguggacagcaggagccgcugcauacuauguagguuaccugcaacccagaaccuuuuugcucaaauauaaugaaaacggcacgauuacugaugccguggacugcgcucuggauccuuuaagugagacaaaguguacccugaagucuuucacugucgaaaaagggaucuaccagacauccaauuuuagggugcagccaaccgagagcauaguucgguuccccaacauuacgaaucucugcccuuuuggagagguguucaacgccacccgcuucgcgucggucuaugcauggaaucgaaagagaaucucuaacuguguggccgacuacuccguacuuuacaauucagcuaguuuuagcacauucaaaugcuauggcguuuccccaacuaagcugaacgacuuguguuuuaccaauguguacgccgauucuuucgucauuaggggugacgaagugcggcagaucgcacccgggcaaacaggaaaaaucgcugauuauaacuacaagcuaccggacgauuuuacuggcugcgucauugccuggaauagcaacaaccuggacucaaaagugggcgggaauuauaacuaccucuaucgucuguuccgcaagaguaaucuuaagccuuuugagagagauauauccaccgaaaucuaccaggcgggaagcacacccuguaacgguguugagggcuucaauugcuacuuuccacugcagucuuauggguuccaaccuaccaacggagugggcuaccagcccuauaggguagucguguugucauuugaacuccugcacgccccagcaacuguuugcggucccaaaaagaguacgaauuuagugaaaaacaagugugucaauuucaacuuuaaugggcugacaggcaccggagugcuaacugagagcaacaaaaaguuccucccuuuccagcaguuuggccgggacauugcugauaccacagacgccguacgagauccacaaacccuggagauccuugacauaacuccgugcuccuucgggggagugucuguuauuacacccgguacgaauaccucgaaccaggucgcuguguuguaccagggcgugaauuguacugaagucccuguugccauccacgcagaccagcugacaccaaccuggcgcguguauagcacaggguccaacguguuucaaacuagagccggaugccucaucggcgcugagcauguaaacaauucauacgaaugugauauucccaucggugcggggauuugcgcaaguuaucagacccagacgaacucuccuaggcgggcccgcagcgucgcuucccagucaauaaucgccuacaccaugagccugggcgcagaaaauucuguggccuacuccaacaauaguauugcuaucccaacaaacuucacuaucagcguuaccacagaaauucuucccgugucuaugacuaagaccuccgucgacuguacgauguauauaugcggagauucaacagaguguaguaaucuguugcuccaauacggcagcuuuugcacccagcugaacagagccuuaacugggaucgcaguggagcaggacaaaaauacacaggaaguuuucgcgcaagugaagcagauuuauaaaaccccgccuaucaaggauuuuggagguuucaacuuuucgcagauucugccagaccccuccaaaccuucuaagaggagcuucaucgaggaucuacucuuuaauaagguaacucuggcugacgucggcuucauaaaacaauacggggauugucuuggagacaucgccgcacgugauuugauuugcgcccagaaguucaacggccugaccgugcugcccccacucuuaacagacgaaaugaucgcucaguauacgucagcccugcuugcagguaccauuacgaguggguggacauuuggcgcuggagccgcguugcagaucccuuucgccaugcaaauggcuuaccgguuuaauggcauaggggugacccagaacguccucuaugagaaucagaaacugauugcaaaccaguucaacuccgccaucggaaagauucaagauucucuaagcuccacagcuucagcccugggcaaacuccaggacguugugaaucagaacgcacaggcgcugaauacucuuguaaagcaauugagcaguaacuuuggugccaucucuuccgugcugaaugacauauuaagccgacucgauaaggucgaagcugaggugcagaucgacagacugauuaccgggaggcuucagucgcugcaaacguacguuacacagcaguugauccgcgccgcagagauucgggcuucagccaaccucgcagccaccaaaaugucugaaugcgugcugggacagaguaagagagucgauuucuguggcaaagguuaccaccuaauguccuuuccccaaagcgcuccacauggcgugguuuuccugcacgugacuuaugucccggcgcaggagaagaauuuuaccacagccccugcaaucugccacgacgggaaagcucauuuccccagggaaggaguauuugugucuaacggcacucacugguucguuacccagcgcaauuuuuacgagccacagauaauuacaacggauaacaccuucgugagcgggaauugugacgucgugaucggaaucguaaacaauacuguguaugauccccuccaaccugagcuggacuccuucaaggaagaacuugauaaauacuuuaagaaccauacaucaccagacgucgauuugggcgacauuagugguaucaaugccagcguugugaacauucagaaggaaauagaucgacugaaugagguggccaaaaacuuaaacgaaucucucaucgaccugcaggagcuugggaaguaugagcaguacauuaaauggcccugguauaucuggcugggauucauugcuggccuaaucgcaauagucauggugaccaucaugcucugcuguaugacuuccugcuguucaugccugaaggguuguugcaguuguggcagcugcugcaaauuugacgaagaugacuccgagccuguuuugaaggggguaaagcugcacuacacauga

SEQ ID NO: 12022 - RNA, 3822 nt, Artificial Sequence
  SARS-CoV-2/Greece/16/2020__EPI_ISL_418265 spike protein CDS human (1-1273)
auguucguguuucugguccuccuuccccugguuagcucccagugcgugaacuugaccacaagaacucaauuaccuccagccuacacuaauucuuucaccaggggcguauauuacccggacaagguguuucggucaaguguccugcacagcacacaggaucuauuccuccccuuuuucuccaacgugacuugguuucaugcuauccacguuucugggaccaauggaacaaaacgcuucgacaacccugugcugccauuuaaugauggugucuauuucgcaucgaccgagaagucaaacauuauacgaggcuggaucuuugggacuacacuugacagcaaaacccagagucuguugauugugaauaacgccacgaauguaguuaucaaggugugugaguuccaguuuugcaacgaucccuuccucggagucuacuaucauaaaaauaacaaguccuggauggagucugaguuccguguguacagcuccgcgaauaacuguacuuuugaauaugugucacaaccuuuccugauggaccuggaaggcaagcaggguaauuuuaaaaaccucagagaguucgucuuuaagaacguugauggguacuucaaaauuuacaguaagcacaccccaaucaauuuagugagggaccugccccagggauuuagcgcucuugagccuuugguagaucugccaauaggcaucaacauuacacgguuccagacucuacucgcccugcaucgcucuuaucuuaccccgggcgacuccucaagcggguggacagcaggagccgcugcauacuauguggguuaccugcaacccagaaccuuuuugcucaaauauaaugaaaacggcacgaucacugaugccgucgacugcgcucuggauccuuuaagugagacaaaguguacccugaagucuuucacuguggaaaaagggauuuaccagacauccaauuuuaggguucagccaaccgagagcaucgugcgguuccccaacauaacgaaucucugcccuuuuggagaggucuucaacgccacccgcuucgcgucgguguaugcauggaaucgaaagagaauuucuaacuguguagccgacuacuccguucuuuacaauucagcuaguuuuagcacauucaaaugcuauggcguguccccaacuaagcugaacgacuuguguuuuaccaaugucuacgccgauucuuucgugaucaggggugacgaaguccggcagauugcacccgggcaaacaggaaaaaucgcugauuauaacuacaagcuaccggacgauuuuacuggcugcgugaucgccuggaauagcaacaaccuggacucaaaaguuggcgggaauuauaacuaccucuaucgucuguuccgcaagaguaaucuuaagccuuuugagagagauauuuccaccgaaauauaccaggcgggaagcacacccuguaacgguguggagggcuucaauugcuacuuuccacugcagucuuauggguuccaaccuaccaacggaguaggcuaccagcccuauagggucgugguuuugucauuugaacuccugcacgccccagcaacugugugcggucccaaaaagaguacgaauuuagucaaaaacaagugugugaauuucaacuuuaaugggcugacaggcaccggaguacuaacugagagcaacaaaaaguuccucccuuuccagcaguuuggccgggacaucgcugauaccacagacgccgugcgagauccacaaacccuggagauucuugacaucacuccgugcuccuucgggggaguuucugucauaacacccgguacgaauaccucgaaccagguggcuguguuguaccaggacgucaauuguacugaaguuccuguggccauucacgcagaucagcugacaccaaccuggcgcguguauagcacaggcuccaacguauuucaaacuagagccgggugccucaucggagcugagcaugucaacaauucauacgaaugugacauccccauuggcgcggguaucugcgcaaguuaucagacccagacgaacucuccuaggcgggcccgcagcguggcuucccagucaauuauagccuacaccaugagccugggggcagaaaauucuguugccuacuccaacaauaguaucgcuauuccaacaaacuucacuaucagcgugaccacagaaauccuucccgucucuaugacuaagaccuccguggauuguacgauguauauuugcggcgacucaacagaguguaguaaucuguugcuccaauacggcagcuuuugcacccagcugaacagagccuuaacuggaauagcaguugagcaggauaaaaauacacaggaaguguucgcgcaaguaaagcagaucuauaaaaccccgccuauuaaggacuuugggggauucaacuuuucgcagauccugccagaucccuccaaaccuucuaagaggagcuucauugaggaccuacucuuuaauaaggucacucuggcugaugccgguuucaucaaacaauacggcgacugucuuggggauauagcagcccgugacuugaucugcgcucagaaguucaacggacugaccgugcugcccccacucuuaacagaugaaaugauugcccaguauacgucagcacugcuugcuggcaccaucacgagugguuggacauuuggggccggcgcggccuugcagauuccuuucgcuaugcaaauggcauaccgguuuaauggaaucggcgugacccagaacguccucuaugagaaucagaaacugauagccaaccaguucaacuccgcuauugggaagauccaagacucucuaagcuccacagccucagcacugggaaaacuccaggacguugugaaucagaacgcgcaggcccugaauacucuuguaaagcaauugagcaguaacuuuggcgcuauuucuuccgugcugaaugauaucuuaagccgacucgacaaggucgaagccgaggugcagauagauagacugaucaccgguaggcuucagucgcugcaaacguacguuacacagcaguugauucgcgcagcugagauccgggccucagcaaaccucgccgcuaccaaaaugucugaaugcgugcuggggcagaguaagagagucgacuucuguggaaaaggcuaccaccuaauguccuuuccccaaagcgcgccacauggugugguuuuccugcacgugacuuaugucccggcccaggagaagaauuuuaccacagcuccugcaauuugccacgauggcaaagcccauuuccccagggaagggguauuugugucuaacggaacucacugguucguuacccagcgcaauuuuuacgagccacagaucauaacaacggacaacaccuucgugagcggcaauugugaugucgugauugggaucguaaacaauacuguguaugacccccuccaaccugagcuggauuccuucaaggaggaacuugacaaauacuuuaagaaccauacaucaccagaugucgacuugggagauaucaguggcauuaaugccagcguugugaacauccagaaggaaauugaccgacugaaugagguggcuaaaaacuuaaacgaaucucucauagaccugcaggagcuugguaaguaugagcaguacaucaaauggcccugguauauuuggcugggguucaucgcaggacuaauugccaucgucauggugaccauaaugcucugcuguaugacuuccugcuguucaugccugaagggcuguugcaguugugguagcugcugcaaauuugaugaagacgauuccgagccuguuuugaagggcguaaagcugcacuacacauga

SEQ ID NO: 12023 - RNA, 3822 nt, Artificial Sequence
  SARS-CoV-2/Iceland/319/2020__EPI_ISL_417648 spike protein CDS human (1-1273)
auguucguguuucugguccuccuuccccugguuagcucccagugcgugaacuugaccacaagaacucaauuaccuccagccuacacuaauucuuucaccaggggcguauauuacccggacaagguguuucggucaaguguccugcacagcacacaggaucuauuccuccccuuuuucuccaacgugacuugguuucaugcuauccacguuucugggaccaauggaacaaaacgcuucgacaacccugugcugccauuuaaugauggugucuauuucgcaucgaccgagaagucaaacauuauacgaggcuggaucuuugggacuacacuugacagcaaaacccagagucuguugauugugaauaacgccacgaauguaguuaucaaggugugugaguuccaguuuugcaacgaucccuuccucggagucuacuaucauaaaaauaacaaguccuggauggagucugaguuccguguguacagcuccgcgaauaacuguacuuuugaguaugugucacaaccuuuccugauugaccuggaaggcaagcaggguaauuuuaaaaaccucagagaguucgucuuuaagaacaucgauggguacuucaaaauauacaguaagcacaccccaaucaauuuaguuagggaccugccccagggauuuagcgcucuugagccuuugguggaucugccaauuggcaucaacauuacacgguuccagacucuacucgcccugcaucgcucuuaucuuaccccgggcgacuccucaagcggguggacagcaggagccgcugcauacuauguagguuaccugcaacccagaaccuuuuugcucaaauauaaugaaaacggcacgaucacugaugccguggacugcgcucuggauccuuuaagugagacaaaguguacccugaagucuuucacugucgaaaaagggauauaccagacauccaauuuuagggugcagccaaccgagagcauuguucgguuccccaacaucacgaaucucugcccuuuuggagagguguucaacgccacccgcuucgcgucggucuaugcauggaaucgaaagagaauuucuaacuguguggccgacuacuccguacuuuacaauucagcuaguuuuagcacauucaaaugcuauggcguuuccccaacuaagcugaacgacuuguguuuuaccaauguguacgccgauucuuucgucaucaggggugacgaagugcggcagaucgcacccgggcaaacaggaaaaauugcugauuauaacuacaagcuaccggacgauuuuacuggcugcgucauagccuggaauagcaacaaccuggacucaaaagugggcgggaauuauaacuaccucuaucgucuguuccgcaagaguaaucuuaagccuuuugagagagauaucuccaccgaaauuuaccaggcgggaagcacacccuguaacgguguugagggcuucaauugcuacuuuccacugcagucuuauggguuccaaccuaccaacggagugggcuaccagcccuauaggguagucguguugucauuugaacuccugcacgccccagcaacuguuugcggucccaaaaagaguacgaauuuagugaaaaacaagugugucaauuucaacuuuaaugggcugacaggcaccggagugcuaacugagagcaacaaaaaguuccucccuuuccagcaguuuggccgggacaucgcugauaccacagacgccguacgagauccacaaacccuggagauacuugacauuacuccgugcuccuucgggggagugucuguuaucacacccgguacgaauaccucgaaccaggucgcuguguuguaccagggcgugaauuguacugaagucccuguugccauccacgcagaccagcugacaccaaccuggcgcguguauagcacaggguccaacguguuucaaacuagagccggaugccucauuggcgcugagcauguaaacaauucauacgaaugugauauccccauuggugcggggauaugcgcaaguuaucagacccagacgaacucuccuaggcgggcccgcagcgucgcuucccagucaaucauugccuacaccaugagccugggcgcagaaaauucuguggccuacuccaacaauaguaucgcuaucccaacaaacuucacuauuagcguuaccacagaaauacuucccgugucuaugacuaagaccuccgucgacuguacgauguauaucugcggagauucaacagaguguaguaaucuguugcuccaauacggcagcuuuugcacccagcugaacagagccuuaacugggauugcaguggagcaggacaaaaauacacaggaaguuuucgcgcaagugaagcagaucuauaaaaccccgccuauuaaggauuuuggagguuucaacuuuucgcagauccugccagaccccuccaaaccuucuaagaggagcuucauagaggaucuacucuuuaauaagguaacucuggcugacgccggcuucaucaaacaauacggggauugucuuggagacauugcagcccgugauuugaucugcgcucagaaguucaacggccugaccguccugcccccacucuuaacagacgaaaugauugcccaguauacgucagcacugcuugcugguaccaucacgaguggguggacauuuggcgccggagcggccuugcagauaccuuucgcuaugcaaauggcauaccgguuuaauggcauuggggugacccagaacgugcucuaugagaaucagaaacugaucgccaaccaguucaacuccgcuauuggaaagauccaagauucucuaagcuccacagccucagcacugggcaaacuccaggacgucguuaaucagaacgcgcaggcccugaauacucuugugaagcaauugagcaguaacuuuggugcuauaucuuccguacugaaugacaucuuaagccgacucgauaagguggaagccgagguccagauugacagacugaucaccgggaggcuucagucgcugcaaacguacgugacacagcaguugauucgcgcagcugagauccgggccucagcaaaccucgccgcuaccaaaaugucugaaugcguucugggacagaguaagagaguggauuucuguggcaaagguuaccaccuaauguccuuuccccaaagcgcgccacauggcgucguguuccugcacguuacuuaugugccggcccaggagaagaauuuuaccacagcuccugcaauaugccacgacgggaaagcccauuuccccagggaaggagucuuuguaucuaacggcacucacugguucgugacccagcgcaauuuuuacgagccacagauuaucacaacggauaacaccuucguuagcgggaauugugacguggucaucggaauugugaacaauacuguauaugauccccuccaaccugagcuggacuccuucaaggaagaacuugauaaauacuuuaagaaccauacaucaccagacguggauuugggcgacaucagugguauuaaugccagcgucguuaacauacagaaggaaaucgaucgacugaaugagguggcuaaaaacuuaaacgaaucucucauugaccugcaggagcuugggaaguaugagcaguacaucaaauggcccugguauauuuggcugggauucaucgcaggccuaauagccaucgugauggucaccauuaugcucugcuguaugacuuccugcuguucaugccugaaggguuguugcaguuguggcagcugcugcaaauuugacgaagaugacuccgagccuguguugaaggggguuaagcugcacuacacauga

SEQ ID NO: 12024 - RNA, 3822 nt, Artificial Sequence
  SARS-CoV-2/Congo/94/2020__EPI_ISL_417947 spike protein CDS human (1-1273)
auguucguguuucugguccuccuuccccugguuagcucccagugcgugaacuugaccacaagaacucaauuaccuccagccuacacuaauucuuucaccaggggcguauauuacccggacaagguguuucggucaaguguccugcacagcacacaggaucuauuccuccccuuuuucuccaacgugacuugguuucaugcuauccacguuucugggaccaauggaacaaaacgcuucgacaacccugugcugccauuuaaugauggugucuauuucgcaucgaccgagaagucaaacauuauacgaggcuggaucuuugggacuacacuugacagcaaaacccagagucuguugauugugaauaacgccacgaauguaguuaucaaggugugugaguuccaguuuugcaacgaucccuuccucggagucuacuaucauaaaaauaacaaguccuggauggagucugaguuccguguguacagcuccgcgaauaacuguacuuuugaguaugugucacaaccuuuccugauggaccuggaaggcaagcaggguaauuuuaaaaaccucagagaguucgucuuuaagaacauugauggguacuucaaaaucuacaguaagcacaccccaauaaauuuaguuagggaccugccccagggauuuagcgcucuugagccuuugguggaucugccaaucggcauuaacaucacacgguuccagacucuacucgcccugcaucgcucuuaucuuaccccgggcgacuccucaagcggguggacagcaggagccgcugcauacuauguagguuaccugcaacccagaaccuuuuugcucaaauauaaugaaaacggcacgauuacugaugccguggacugcgcucuggauccuuuaagugagacaaaguguacccugaagucuuucacugucgaaaaagggaucuaccagacauccaauuuuagggugcagccaaccgagagcauaguucgguuccccaacauuacgaaucucugcccuuuuggagagguguucaacgccacccgcuucgcgucggucuaugcauggaaucgaaagagaaucucuaacuguguggccgacuacuccguacuuuacaauucagcuaguuuuagcacauucaaaugcuauggcguuuccccaacuaagcugaacgacuuguguuuuaccaauguguacgccgauucuuucgucauuaggggugacgaagugcggcagaucgcacccgggcaaacaggaaaaaucgcugauuauaacuacaagcuaccggacgauuuuacuggcugcgucauugccuggaauagcaacaaccuggacucaaaagugggcgggaauuauaacuaccucuaucgucuguuccgcaagaguaaucuuaagccuuuugagagagauauauccaccgaaaucuaccaggcgggaagcacacccuguaacgguguugagggcuucaauugcuacuuuccacugcagucuuauggguuccaaccuaccaacggagugggcuaccagcccuauaggguagucguguugucauuugaacuccugcacgccccagcaacuguuugcggucccaaaaagaguacgaauuuagugaaaaacaagugugucaauuucaacuuuaaugggcugacaggcaccggagugcuaacugagagcaacaaaaaguuccucccuuuccagcaguuuggccgggacauugcugauaccacagacgccguacgagauccacaaacccuggagauccuugacauaacuccgugcuccuucgggggagugucuguuauuacacccgguacgaauaccucgaaccaggucgcuguguuguaccagggcgugaauuguacugaagucccuguugccauccacgcagaccagcugacaccaaccuggcgcguguauagcacaggguccaacguguuucaaacuagagccggaugccucaucggcgcugagcauguaaacaauucauacgaaugugauauucccaucggugcggggauuugcgcaaguuaucagacccagacgaacucuccuaggcgggcccgcagcgucgcuucccagucaauaaucgccuacaccaugagccugggcgcagaaaauucuguggccuacuccaacaauaguauugcuaucccaacaaacuucacuaucagcguuaccacagaaauucuucccgugucuaugacuaagaccuccgucgacuguacgauguauauaugcggagauucaacagaguguaguaaucuguugcuccaauacggcagcuuuugcacccagcugaacagagccuuaacugggaucgcaguggagcaggacaaaaauacacaggaaguuuucgcgcaagugaagcagauuuauaaaaccccgccuaucaaggauuuuggagguuucaacuuuucgcagauucugccagaccccuccaaaccuucuaagaggagcuucaucgaggauauacuauuuaauaagguaacucucgcugacgccggcuucaucaaacaauacggggauugucugggagacauugcagcccgugaucuuaucugcgcucagaaguucaacggcuugaccguccugcccccacuccugacagacgaaaugauugcccaguauacgucagcauuacuggcugguaccaucacgaguggguggacauuuggcgccggagcggcccuucagauaccuuucgcuaugcaaauggcauaccgguuuaauggcauuggggugacccagaacguguuguaugagaaucagaaacucaucgccaaccaguucaacuccgcuauuggaaagauccaagauucucugagcuccacagccucagcacuaggcaaacugcaggacgucguuaaucagaacgcgcaggcccucaauacucuggugaagcaacuuagcaguaacuuuggugcuauaucuuccguauugaaugacauccugagccgauuagauaagguggaagccgagguccagauugacagacucaucaccgggaggcugcagucgcuucaaacguacgugacacagcagcugauucgcgcagcugagauccgggccucagcaaacuuggccgcuaccaaaaugucugaaugcguucucggacagaguaagagaguggauuucuguggcaaagguuaccaccugauguccuuuccccaaagcgcgccacauggcgucguguuccuacacguuacuuaugugccggcccaggagaagaauuuuaccacagcuccugcaauaugccacgacgggaaagcccauuuccccagggaaggagucuuuguaucuaacggcacucacugguucgugacccagcgcaauuuuuacgagccacagauuaucacaacggauaacaccuucguuagcgggaauugugacguggucaucggaauugugaacaauacuguauaugauccccugcaaccugagcucgacuccuucaaggaagaacuggauaaauacuuuaagaaccauacaucaccagacguggaucuuggcgacaucagugguauuaaugccagcgucguuaacauacagaaggaaaucgaucgauugaaugagguggcuaaaaaccugaacgaaucuuuaauugaccuccaggagcuggggaaguaugagcaguacaucaaauggcccugguauauuuggcuuggauucaucgcaggccugauagccaucgugauggucaccauuaugcuaugcuguaugacuuccugcuguucaugccucaaggguuguugcaguuguggcagcugcugcaaauuugacgaagaugacuccgagccugugcugaaggggguuaaguugcacuacacauga

SEQ ID NO: 12025 - RNA, 3822 nt, Artificial Sequence
  SARS-CoV-2/Congo/158/2020__EPI_ISL_417950 spike protein CDS human (1-1273)
auguucguguuucugguccuccuuccccugguuagcucccagugcgugaacuugaccacaagaacucaauuaccuccagccuacacuaauucuuucaccaggggcguauauuacccggacaagguguuucggucaaguguccugcacagcacacaggaucuauuccuccccuuuuucuccaacgugacuugguuucaugcuauccacguuucugggaccaauggaacaaaacgcuucgacaacccugugcugccauuuaaugauggugucuauuucgcaucgaccgagaagucaaacauuauacgaggcuggaucuuugggacuacacuugacagcaaaacccagagucuguugauugugaauaacgccacgaauguaguuaucaaggugugugaguuccaguuuugcaacgaucccuuccucggagucuacuaucauaaaaauaacaaguccuggauggagucugaguuccguguguacagcuccgcgaauaacuguacuuuugaauaugugucacaaccuuuccugauggaccuggaaggcaagcaggguaauuuuaaaaaccucagagaguucgucuuuaagaacauugauggguacuucaaaaucuacaguaagcacaccccaauaaauuuaguuagggaccugccccagggauuuagcgcucuugagccuuugguggaucugccaaucggcauuaacaucacacgguuccagacucuacucgcccugcaucgcucuuaucuuaccccgggcgacuccucaagcggguggacagcaggagccgcugcauacuauguagguuaccugcaacccagaaccuuuuugcucaaauauaaugaaaacggcacgauuacugaugccguggacugcgcucuggauccuuuaagugagacaaaguguacccugaagucuuucacugucgaaaaagggaucuaccagacauccaauuuuagggugcagccaaccgagagcauaguucgguuccccaacauuacgaaucucugcccuuuuggagagguguucaacgccacccgcuucgcgucggucuaugcauggaaucgaaagagaaucucuaacuguguggccgacuacuccguacuuuacaauucagcuaguuuuagcacauucaaaugcuauggcguuuccccaacuaagcugaacgacuuguguuuuaccaauguguacgccgauucuuucgucauuaggggugacgaagugcggcagaucgcacccgggcaaacaggaaaaaucgcugauuauaacuacaagcuaccggacgauuuuacuggcugcgucauugccuggaauagcaacaaccuggacucaaaagugggcgggaauuauaacuaccucuaucgucuguuccgcaagaguaaucuuaagccuuuugagagagauauauccaccgaaaucuaccaggcgggaagcacacccuguaacgguguugagggcuucaauugcuacuuuccacugcagucuuauggguuccaaccuaccaacggagugggcuaccagcccuauaggguagucguguugucauuugaacuccugcacgccccagcaacuguuugcggucccaaaaagaguacgaauuuagugaaaaacaagugugucaauuucaacuuuaaugggcugacaggcaccggagugcuaacugagagcaacaaaaaguuccucccuuuccagcaguuuggccgggacauugcugauaccacagacgccguacgagauccacaaacccuggagauccuugacauaacuccgugcuccuucgggggagugucuguuauuacacccgguacgaauaccucgaaccaggucgcuguguuguaccaggacgugaauuguacugaagucccuguugccauccacgcagaucagcugacaccaaccuggcgcguguauagcacaggcuccaacguguuucaaacuagagccgggugccucaucggagcugagcauguaaacaauucauacgaaugugacauucccaucggcgcggguauuugcgcaaguuaucagacccagacgaacucuccuaggcgggcccgcagcgucgcuucccagucaauaaucgccuacaccaugagccugggggcagaaaauucuguggccuacuccaacaauaguauugcuaucccaacaaacuucacuaucagcguuaccacagaaauucuucccgugucuaugacuaagaccuccgucgauuguacgauguauauaugcggcgacucaacagaguguaguaaucuguugcuccaauacggcagcuuuugcacccagcugaacagagccuuaacuggaaucgcaguggagcaggauaaaaauacacaggaaguuuucgcgcaagugaagcagauuuauaaaaccccgccuaucaaggacuuugggggauucaacuuuucgcagauucugccagaucccuccaaaccuucuaagaggagcuucaucgaggaccuacucuuuaauaagguaacucuggcugaugccgguuucauaaaacaauacggcgacugucuuggggauaucgcagcccgugacuugauuugcgcucagaaguucaacggacugaccguccugcccccacucuuaacagaugaaaugaucgcccaguauacgucagcacugcuugcuggcaccauuacgagugguuggacauuuggggccggcgcggccuugcagaucccuuucgcuaugcaaauggcauaccgguuuaauggaauaggcgugacccagaacgugcucuaugagaaucagaaacugauugccaaccaguucaacuccgcuaucgggaagauucaagacucucuaagcuccacagccucagcacugggaaaacuccaggacgucguuaaucagaacgcgcaggcccugaauacucuugugaagcaauugagcaguaacuuuggcgcuaucucuuccguacugaaugauauauuaagccgacucgacaagguggaagccgagguccagaucgauagacugauuaccgguaggcuucagucgcugcaaacguacgugacacagcaguugauccgcgcagcugagauucgggccucagcaaaccucgccgcuaccaaaaugucugaaugcguucuggggcagaguaagagaguggacuucuguggaaaaggcuaccaccuaauguccuuuccccaaagcgcgccacauggugucguguuccugcacguuacuuaugugccggcccaggagaagaauuuuaccacagcuccugcaaucugccacgauggcaaagcccauuuccccagggaaggggucuuuguaucuaacggaacucacugguucgugacccagcgcaauuuuuacgagccacagauaauuacaacggacaacaccuuccucagcggcaauugugauguugugaucgggaucgucaacaauacuguguaugacccccugcaaccugagcuugauuccuucaaggaagaguuggacaaauacuuuaagaaccauacaucaccagauguagaccugggagauauuaguggcaucaaugccagcguggucaacauucagaaggaaauagaccgauuaaaugagguugcuaaaaaccucaacgaaucucugaucgaccuucaggagcuggguaaguaugagcaguacauuaaauggcccugguauaucuggcuaggguucauugcaggacucaucgccauagugauggugaccaucaugcugugcuguaugacuuccugcuguucaugcuugaagggcuguugcaguugugguagcugcugcaaauuugaugaagacgauuccgagccuguccugaagggcgugaaguuacacuacacauga

SEQ ID NO: 12026 - RNA, 3822 nt, Artificial Sequence
  SARS-CoV-2/USA/UT-00034/2020__EPI_ISL_417977 spike protein CDS human (1-1273)
auguucguguuucugguccuccuuccccugguuagcucccagugcgugaacuugaccacaagaacucaauuaccuccagccuacacuaauucuuucaccaggggcguauauuacccggacaagguguuucggucaaguguccugcacagcacacaggaucuauuccuccccuuuuucuccaacgugacuugguuucaugcuauccacguuucugggaccaauggaacaaaacgcuucgacaacccugugcugccauuuaaugauggugucuauuucgcaucgaccgagaagucaaacauuauacgaggcuggaucuuugggacuacacuugacagcaaaacccagagucuguugauugugaauaacgccacgaauguaguuaucaaggugugugaguuccaguuuugcaacgaucccuuccucggagucuacuauuacaaaaauaacaaguccuggauggagucugaguuccguguguauagcuccgcgaauaacuguacuuuugaguacgugucacaaccuuuccugauggaccuggaaggcaagcaggguaauuuuaaaaaccucagagaguucgucuuuaagaacauugauggguacuucaaaaucuauaguaagcauaccccaauaaauuuaguuagggaccugccccagggauuuagcgcucuugagccuuugguggaucugccaaucggcauuaacaucacacgguuccagacucuacucgcccugcaccgcucuuaccuuaccccgggcgacuccucaagcggguggacagcaggagccgcugcauauuacguagguuaucugcaacccagaaccuuuuugcucaaauacaaugaaaacggcacgauuacugaugccguggacugcgcucuggauccuuuaagugagacaaaguguacccugaagucuuucacugucgaaaaagggaucuaucagacauccaauuuuagggugcagccaaccgagagcauaguucgguuccccaacauuacgaaucucugcccuuuuggagagguguucaacgccacccgcuucgcgucggucuacgcauggaaucgaaagagaaucucuaacuguguggccgacuacuccguacuuuauaauucagcuaguuuuagcacauucaaaugcuacggcguuuccccaacuaagcugaacgacuuguguuuuaccaauguguaugccgauucuuucgucauuaggggugacgaagugcggcagaucgcacccgggcaaacaggaaaaaucgcugauuacaacuauaagcuaccggacgauuuuacuggcugcgucauugccuggaauagcaacaaccuggacucaaaagugggcgggaauuacaacuaucucuaccgucuguuccgcaagaguaaucuuaagccuuuugagagagauauauccaccgaaaucuaccaggcgggaagcacacccuguaacgguguugagggcuucaauugcuauuuuccacugcagucuuacggguuccaaccuaccaacggagugggcuaucagcccuacaggguagucguguugucauuugaacuccugcaugccccagcaacuguuugcggucccaaaaagaguacgaauuuagugaaaaacaagugugucaauuucaacuuuaaugggcugacaggcaccggagugcuaacugagagcaacaaaaaguuccucccuuuccagcaguuuggccgggacauugcugauaccacagacgccguacgagauccacaaacccuggagauccuugacauaacuccgugcuccuucgggggagugucuguuauuacacccgguacgaauaccucgaaccaggucgcuguguuguaucagggcgugaauuguacugaagucccuguugccauccacgcagaccagcugacaccaaccuggcgcguguacagcacaggguccaacguguuucaaacuagagccggaugccucaucggcgcugagcacguaaacaauucauaugaaugugauauucccaucggugcggggauuugcgcaaguuaccagacccagacgaacucuccuaggcgggcccgcagcgucgcuucccagucaauaaucgccuacaccaugagccugggcgcagaaaauucuguggccuauuccaacaauaguauugcuaucccaacaaacuucacuaucagcguuaccacagaaauucuucccgugucuaugacuaagaccuccgucgacuguacgauguacauaugcggagauucaacagaguguaguaaucuguugcuccaauauggcagcuuuugcacccagcugaacagagccuuaacugggaucgcaguggagcaggacaaaaauacacaggaaguuuucgcgcaagugaagcagauuuacaaaaccccgccuaucaaggauuuuggagguuucaacuuuucgcagauucugccagaccccuccaaaccuucuaagaggagcuucaucgaggaucuacucuuuaauaagguaacucuggcugacgccggcuucauaaaacaauauggggauugucuuggagacaucgcagcccgugauuugauuugcgcucagaaguucaacggccugaccguccugcccccacucuuaacagacgaaaugaucgcccaguacacgucagcacugcuugcugguaccauuacgaguggguggacauuuggcgccggagcggccuugcagaucccuuucgcuaugcaaauggcauaucgguuuaauggcauaggggugacccagaacgugcucuacgagaaucagaaacugauugccaaccaguucaacuccgcuaucggaaagauucaagauucucuaagcuccacagccucagcacugggcaaacuccaggacgucguuaaucagaacgcgcaggcccugaauacucuugugaagcaauugagcaguaacuuuggugcuaucucuuccguacugaaugacauauuaagccgacucgauaagguggaagccgagguccagaucgacagacugauuaccgggaggcuucagucgcugcaaacguacgugacacagcaguugauccgcgcagcugagauucgggccucagcaaaccucgccgcuaccaaaaugucugaaugcguucugggacagaguaagagaguggauuucuguggcaaagguuaucaucuaauguccuuuccccaaagcgcgccacacggcgucguguuccugcauguuacuuacgugccggcccaggagaagaauuuuaccacagcuccugcaaucugccacgacgggaaagcccacuuccccagggaaggagucuuuguaucuaacggcacucauugguucgugacccagcgcaauuuuuaugagccacagauaauuacaacggauaacaccuucguuagcgggaauugugacguggucaucggaaucgugaacaauacuguauacgauccccuccaaccugagcuggacuccuucaaggaagaacuugauaaauauuuuaagaaccacacaucaccagacguggauuugggcgacauuagugguaucaaugccagcgucguuaacauucagaaggaaauagaucgacugaaugagguggcuaaaaacuuaaacgaaucucucaucgaccugcaggagcuugggaaguacgagcaguauauuaaauggcccugguacaucuggcugggauucauugcaggccuaaucgccauagugauggucaccaucaugcucugcuguaugacuuccugcuguucaugccugaaggguuguugcaguuguggcagcugcugcaaauuugacgaagaugacuccgagccuguguugaaggggguuaagcugcauuacacauga

SEQ ID NO: 12027 - RNA, 3822 nt, Artificial Sequence
  SARS-CoV-2/USA/UT-00033/2020__EPI_ISL_417976 spike protein CDS human (1-1273)
auguucguguuucugguccuccuuccccugguuagcucccagugcgugaacuugaccacaagaacucaauuaccuccagccuacacuaauucuuucaccaggggcguauauuacccggacaagguguuucggucaaguguccugcacagcacacaggaucuauuccuccccuuuuucuccaacgugacuugguuucaugcuauccacguuucugggaccaauggaacaaaacgcuucgacaacccugugcugccauuuaaugauggugucuauuucgcaucgaccgagaagucaaacauuauacgaggcuggaucuuugggacuacacuugacagcaaaacccagagucuguugauugugaauaacgccacgaauguaguuaucaaggugugugaguuccaguuuugcaacgaucccuuccucggagucuacuaucauaaaaauaacaaguccuggauggagucugaguuccguguguacagcuccgcgaauaacuguacuuuugaauaugugucacaaccuuuccugauggaccuggaaggcaagcaggguaauuuuaaaaaccucagagaguucgucuuuaagaacauugauggguacuucaaaaucuacaguaagcacaccccaauaaauuuaguuagggaccugccccagggauuuagcgcucuugagccuuugguggaucugccaaucggcauuaacaucacacgguuccagacucuacucgcccugcaucgcucuuaucuuaccccgggcgacuccucaagcgggcugacagcaggagccgcugcauacuauguagguuacuugcaacccagaaccuuucuccugaaauauaaugaaaacggcacgauuacugaugccguggacugcgcuuuagauccucugagugagacaaaguguacccucaagucuuucacugucgaaaaagggaucuaccagacauccaauuuuagggugcagccaaccgagagcauaguucgguuccccaacauuacgaaucuuugcccuuuuggagagguguucaacgccacccgcuucgcgucggucuaugcauggaaucgaaagagaaucucuaacuguguggccgacuacuccguacuguacaauucagcuaguuuuagcacauucaaaugcuauggcguuuccccaacuaaguugaacgaccuauguuuuaccaauguguacgccgauucuuucgucauuaggggugacgaagugcggcagaucgcacccgggcaaacaggaaaaaucgcugauuauaacuacaagcugccggacgauuuuacuggcugcgucauugccuggaauagcaacaaccucgacucaaaagugggcgggaauuauaacuaccuguaucgucuuuuccgcaagaguaaucugaagccuuuugagagagauauauccaccgaaaucuaccaggcgggaagcacacccuguaacgguguugagggcuucaauugcuacuuuccauugcagucuuauggguuccaaccuaccaacggagugggcuaccagcccuauaggguagucgugcucucauuugaacuguuacacgccccagcaacuguuugcggucccaaaaagaguacgaaucuggugaaaaacaagugugucaauuucaacuuuaaugggcuaacaggcaccggagugcucacugagagcaacaaaaaguuccugccuuuccagcaguuuggccgggacauugcugauaccacagacgccguacgagauccacaaacccuugagaucuuggacauaacuccgugcuccuucgggggagugucuguuauuacacccgguacgaauaccucgaaccaggucgcugugcuguaccagggcgugaauuguacugaagucccuguugccauccacgcagaccagcucacaccaaccuggcgcguguauagcacaggguccaacguguuucaaacuagagccggaugccugaucggcgcugagcauguaaacaauucauacgaaugugauauucccaucggugcggggauuugcgcaaguuaucagacccagacgaacucuccuaggcgggcccgcagcgucgcuucccagucaauaaucgccuacaccaugagccuuggcgcagaaaauucuguggccuacuccaacaauaguauugcuaucccaacaaacuucacuaucagcguuaccacagaaauucugcccgugucuaugacuaagaccuccgucgacuguacgauguauauaugcggagauucaacagaguguaguaauuugcuccugcaauacggcagcuuuugcacccaguuaaacagagcccugacugggaucgcaguggagcaggacaaaaauacacaggaaguuuucgcgcaagugaagcagauuuauaaaaccccgccuaucaaggauuuuggagguuucaacuuuucgcagauucuaccagaccccuccaaaccuucuaagaggagcuucaucgaggaucuccuguuuaauaagguaacucuugcugacgccggcuucauaaaacaauacggggauuguuugggagacaucgcagcccgugaucugauuugcgcucagaaguucaacggccucaccguccugcccccauuacugacagacgaaaugaucgcccaguauacgucagcacuuuuggcugguaccauuacgaguggguggacauuuggcgccggagcggcccuccagaucccuuucgcuaugcaaauggcauaccgguuuaauggcauaggggugacccagaacgugcuguaugagaaucagaaacuaauugccaaccaguucaacuccgcuaucggaaagauucaagauucucugagcuccacagccucagcacucggcaaacugcaggacgucguuaaucagaacgcgcaggcccuuaauacuuuggugaagcaacugagcaguaacuuuggugcuaucucuuccguauuaaaugacauacucagccgacuggauaagguggaagccgagguccagaucgacagacuuauuaccgggaggcugcagucguugcaaacguacgugacacagcagcucauccgcgcagcugagauucgggccucagcaaaccuggccgcuaccaaaaugucugaaugcguucuaggacagaguaagagaguggauuucuguggcaaagguuaccaccugauguccuuuccccaaagcgcgccacauggcgucguguuccuccacguuacuuaugugccggcccaggagaagaauuuuaccacagcuccugcaaucugccacgacgggaaagcccauuuccccagggaaggagucuuuguaucuaacggcacucacugguucgugacccagcgcaauuuuuacgagccacagauaauuacaacggauaacaccuucguuagcgggaauugugacguggucaucggaaucgugaacaauacuguauaugauccccugcaaccugagcuugacuccuucaaggaagaguuggauaaauacuuuaagaaccauacaucaccagacguggaucugggcgacauuagugguaucaaugccagcgucguuaacauucagaaggaaauagaucgauuaaaugagguggcuaaaaaccucaacgaaucucugaucgaccuucaggagcuggggaaguaugagcaguacauuaaauggcccugguauaucuggcuaggauucauugcaggccucaucgccauagugauggucaccaucaugcugugcuguaugacuuccugcuguucaugcuugaaggguuguugcaguuguggcagcugcugcaaauuugacgaagaugacuccgagccugugcugaaggggguuaaguuacacuacacauga

SEQ ID NO: 12028 - RNA, 3822 nt, Artificial Sequence
  SARS-CoV-2/USA/WI-13/2020__EPI_ISL_417516 spike protein CDS human (1-1273)
auguucguguuucugguccuccuuccccugguuagcucccagugcgugaacuugaccacaagaacucaauuaccuccagccuacacuaauucuuucaccaggggcguauauuacccggacaagguguuucggucaaguguccugcacagcacacaggaucuauuccuccccuuuuucuccaacgugacuugguuucaugcuauccacguuucugggaccaauggaacaaaacgcuucgacaacccugugcugccauuuaaugauggugucuauuucgcaucgaccgagaagucaaacauuauacgaggcuggaucuuugggacuacacuugacagcaaaacccagagucuguugauugugaauaacgccacgaauguaguuaucaaggugugugaguuccaguuuugcaacgaucccuuccucggagucuacuaucauaaaaauaacaaguccuggauggagucugaguuccguguguacagcuccgcgaauaacuguacuuuugaauaugugucacaaccuuuccugauggaccuggaaggcaagcaggguaauuuuaaaaaccucagagaguucgucuuuaagaacauugauggguacuucaaaaucuacaguaagcacaccccaauaaauuuaguuagggaccugccccagggauuuagcgcucuugagccuuugguggaucugccaaucggcauuaacaucacacgguuccagacucuacucgcccugcaucgcucuuaucuuaccccgggcgacuccucaagcggguggacagcaggagccgcugcauacuauguagguuaccugcaacccagaaccuuuuugcucaaauauaaugaaaacggcacgauuacugaugccguggacugcgcucuggauccuuuaagugagacaaaguguacccugaagucuuucacugucgaaaaagggaucuaccagacauccaauuuuagggugcucccaaccgagagcauaguucgguuccccaacauuacgaaucuuugcccuuuuggagagguguucaacgccacccgcuucgcgucggucuaugcauggaaucgaaagagaaucucuaacuguguggccgacuacuccguacuguacaauucagcuaguuuuagcacauucaaaugcuauggcguuuccccaacuaaguugaacgaccuauguuuuaccaauguguacgccgauucuuucgucauuaggggugacgaagugcggcagaucgcacccgggcagacaggaaaaaucgcugauuauaacuacaagcugccggacgauuuuacuggcugcgucauugccuggaauagcaacaaccucgacucaaaagugggcgggaauuauaacuaccuguaucgucuuuuccgcaagaguaaucugaagccuuuugagagagauauauccaccgaaaucuaccaagcgggaagcacacccuguaacgguguugagggcuucaauugcuacuuuccauugcagucuuauggguuccagccuaccaacggagugggcuaccaacccuauaggguagucgugcucucauuugaacuguuacacgccccagcaacuguuugcggucccaaaaagaguacgaaucuggugaaaaacaagugugucaauuucaacuuuaaugggcuaacaggcaccggagugcucacugagagcaacaaaaaguuccugccuuuccagcaguuuggccgggacauugcugauaccacagacgccguacgagauccacagacccuugagaucuuggacauaacuccgugcuccuucgggggagugucuguuauuacacccgguacgaauaccucgaaccaagucgcugugcuguaccagggcgugaauuguacugaagucccuguugccauccacgcagaccagcucacaccaaccuggcgcguguauagcacaggguccaacguguuucagacuagagccggaugccugaucggcgcugagcauguaaacaauucauacgaaugugauauucccaucggugcggggauuugcgcaaguuaucaaacccagacgaacucuccuaggcgggcccgcagcgucgcuucccagucaauaaucgccuacaccaugagccuuggcgcagaaaauucuguggccuacuccaacaauaguauugcuaucccaacaaacuucacuaucagcguuaccacagaaauucugcccgugucuaugacuaagaccuccgucgacuguacgauguauauaugcggagauucaacagaguguaguaauuugcuccugcaguacggcagcuuuugcacccaauuaaacagagcccugacugggaucgcaguggagcaggacaaaaauacacaggaaguuuucgcacaggugaagcaaauuuauaaaaccccgccuaucaaggauuuuggagguuucaacuuuucgcagauucuaccagaccccuccaaaccuucuaagaggagcuucaucgaggaucuccuguuuaauaagguaacucuugcugacgccggcuucauaaaacaguacggggauuguuugggagacaucgcagcccgugaucugauuugcgcucaaaaguucaacggccucaccguccugcccccauuacugacagacgaaaugaucgcccaguauacgucagcacuuuuggcugguaccauuacgaguggguggacauuuggcgccggagcggcccuccagaucccuuucgcuaugcagauggcauaccgguuuaauggcauaggggugacccaaaacgugcuguaugagaaucagaaacuaauugccaaccaguucaacuccgcuaucggaaagauucaggauucucugagcuccacagccucagcacucggcaaacugcaagacgucguuaaucagaacgcgcaggcccuuaauacuuuggugaagcagcugagcaguaacuuuggugcuaucucuuccguauuaaaugacauacucagccgacuggauaagguggaagccgagguccaaaucgacagacuuauuaccgggaggcugcagucguugcagacguacgugacacaacagcucauccgcgcagcugagauucgggccucagcaaaccuggccgcuaccaaaaugucugaaugcguucuaggacagaguaagagaguggauuucuguggcaaagguuaccaccugauguccuuuccccagagcgcgccacauggcgucguguuccuccacguuacuuaugugccggcccaagagaagaauuuuaccacagcgccugcuaucugccacgacgggaaagcccauuuccccagggaaggagucuuuguaucuaacggcacucacugguucgugacccagcgcaauuuuuacgagccacagauaauuacaacggauaacaccuucguuagcgggaauugugacguggucaucggaaucgugaacaauacuguauaugauccccugcagccugagcuugacuccuucaaggaagaguuggauaaauacuuuaagaaccauacaucaccagacguggaucugggcgacauuagugguaucaaugccagcgucguuaacauucaaaaggaaauagaucgauuaaaugagguggcuaaaaaccucaacgaaucucugaucgaccuucaggagcuggggaaguaugagcaguacauuaaauggcccugguauaucuggcuaggauucauugcaggccucaucgccauagugauggucaccaucaugcugugcuguaugacuuccugcuguucaugcuugaaggguuguugcaguuguggcagcugcugcaaauuugacgaagaugacuccgagccugugcugaaggggguuaaguuacacuacacauga

SEQ ID NO: 12029 - RNA, 3819 nt, Artificial Sequence
  SARS-CoV-2/India/1-27/2020__EPI_ISL_413522 spike protein CDS human (1-1272)
auguucguguuucugguccuccuuccccugguuagcucccagugcgugaacuugaccacaagaacucaauuaccuccagccuacacgaauagcuucaccaggggcguauauuacccggacaagguguuucggucaaguguccugcacagcacacaggaucuauuccuccccuuuuucuccaacgugacuugguuucaugcuauccacguuucugggaccaauggaacaaaacgcuucgacaacccugugcugccauuuaaugauggugucuauuucgcaucgaccgagaagucaaacauuauacgaggcuggaucuuugggacuacacuugacagcaaaacccagagucuguugauugugaauaacgccacgaauguaguuaucaaggugugugaguuccaguuuugcaacgaucccuuccucggagucuaccauaaaaauaacaaguccuggauggagucugaguuccguguguauagcuccgcgaauaacuguacuuuugaauacgugucacaaccuuuccugauggaccuggaaggcaagcaggguaauuuuaaaaaccucagagaguucgucuuuaagaacauugauggguauuucaaaaucuacaguaagcacaccccaauaaauuuaguuagggaccugccccagggauuuagcgcucuugagccuuugguggaucugccaaucggcauuaacaucacacgguuccagacucuacucgcccugcaucgcucuuaccuuaccccgggcgacuccucaagcggguggacagcaggagccgcugcauauuacguagguuaucugcaacccagaaccuuuuugcucaaauacaaugaaaacggcacgauuacugaugccguggacugcgcucuggauccuuuaagugagacaaaguguacccugaagucuuucacugucgaaaaagggaucuaucagacauccaauuuuagggugcagccaaccgagagcauaguucgguuccccaacauuacgaaucucugcccuuuuggagagguguucaacgccacccgcuucgcgucggucuacgcauggaaucgaaagagaaucucuaacuguguggccgacuauuccguacuuuacaauucagcuaguuuuagcacauucaaaugcuacggcguuuccccaacuaagcugaacgacuuguguuuuaccaauguguaugccgauucuuucgucauuaggggugacgaagugauccagaucgcacccgggcaaacaggaaaaauugcugauuacaacuauaagcuaccggacgauuuuacuggcugcgucauagccuggaauagcaacaaccuggacucaaaagugggcgggaauuacaacuaucucuaccggcuguuccguaagaguaaucuuaagccuuuugagcgcgauaucuccaccgaaauuuaucaggcgggaagcacacccuguaacgguguugagggcuucaauugcuacuuuccacugcagucuuacggguuccaaccuaccaacggagugggcuaucagcccuacagaguagucguguugucauuugaacuccugcacgccccagcaacuguuugcggucccaaaaagaguacgaauuuagugaaaaacaagugugucaauuucaacuuuaaugggcugacaggcaccggagugcuaacugagagcaacaaaaaguuccucccuuuccagcaguuuggcagggacaucgcugauaccacagacgccguacgggauccacaaacccuggagauacuugacauuacuccgugcuccuucgggggagugucuguuaucacacccgguacgaauaccucgaaccaggucgcuguguuguaucaggacgugaauuguacugaagucccuguugccauccacgcagaucagcugacaccaaccuggcgaguguacagcacaggcuccaacguguuucaaacucgcgccgggugccucauuggagcugagcauguaaacaauucauaugaaugugacauccccauuggcgcggguauaugcgcaaguuaccagacccagacgaacucuccuagaagggcccggagcgucgcuucccagucaaucauugccuauaccaugagccugggggcagaaaauucuguggccuacuccaacaauaguaucgcuaucccaacaaacuucacuauuagcguuaccacagaaauacuucccgugucuaugacuaagaccuccgucgauuguacgauguacaucugcggcgacucaacagaguguaguaaucuguugcuccaauauggaucuuuuugcacccagcugaaccgcgccuuaacuggcauugcaguggagcaggauaaaaauacacaggaaguuuucgcgcaagugaagcagaucuacaaaaccccgccuauuaaggacuuugggggauucaacuuuucgcagauccugccagaucccuccaaaccuucuaagagaaguuucauagaggaccuacucuuuaauaagguaacucuggcugaugccgguuucaucaaacaauauggcgacugucuuggggauauugcagccagggacuugaucugcgcucagaaguucaacggacugaccguccugcccccacucuuaacagaugaaaugauugcccaguacacgucagcacugcuugcuggcaccaucacuagcgguuggacauuuggggccggcgcggccuugcagauaccuuucgcuaugcaaauggcauaucguuuuaauggaauuggcgugacccagaacgugcucuacgagaaucagaaacugaucgccaaccaguucaacuccgcuauugggaagauccaagacucucuaagcuccacagccucagcacugggaaaacuccaggacgucguuaaucagaacgcgcaggcccugaauacucuugugaagcaauugagcaguaacuuuggcgcuauaucuuccguacugaaugauaucuuaagccggcucgacaagguggaagccgagguccagauugaucgacugaucaccgguagacuucagucgcugcaaacguaugugacacagcaguugauuagggcagcugagauccgcgccucagcaaaccucgccgcuaccaaaaugucugaaugcguucuggggcagaguaagcggguggacuucuguggaaaaggcuaccaccuaauguccuuuccccaaagcgcgccacauggugucguguuccugcacguuacuuacgugccggcccaggagaagaauuuuaccacagcuccugcaauaugccacgauggcaaagcccauuuccccagagaaggggucuuuguaucuaacggaacucacugguucgugacccagaggaauuuuuaugagccacagauuaucacaacggacaacaccuucguuagcggcaauugugauguggucaucgggauugugaacaauacuguauacgacccccuccaaccugagcuggauuccuucaaggaggaacuugacaaauauuuuaagaaccauacaucaccagauguggacuugggagauaucaguggcauuaaugccagcgucguuaacauacagaaggaaaucgaccgccugaaugagguggcuaaaaacuuaaacgaaucucucauugaccugcaggagcuugguaaguacgagcaguauaucaaauggcccugguacauuuggcugggguucaucgcaggacuaauagccaucgugauggucaccauuaugcucugcuguaugacuuccugcuguucaugccugaagggcuguugcaguugugguagcugcugcaaauuugaugaagacgauuccgagccuguguugaagggcguuaagcugcacuauacauga

SEQ ID NO: 12030 - RNA, 3804 nt, Artificial Sequence
  SARS-CoV-2/pangolin/Guangxi/P4L/2017__EPI_ISL_410538 spike protein CDS human (1-1267)
auguucguguuucuguucguccucccccuuguuagcucccagugcgugaaccugaccacaagaacuggcaucccuccaggguacacgaauagcucaaccaggggaguauauuacccggacaagguguuucggaguagcauuuugcacuuaacacaagaucuguuccuacccuuuuucuccaacgucacuugguuuaauaccauaaacuaucaggguggcuucaaaaaguuugacaauccugugcucccauucaacgaugggguuuacuuugccucuacagagaaaucgaauaucauucgcggauggaucuucggcaccacucuggacgcucgaacacagucacuucugauugugaacaaugcaaccaacgucgugaucaagguaugugaauuucaguucugcacggaucccuucuuggguguuuauuaccauaauaacaauaaaacuuggguggagaacgaauuucgugucuauagcagugccaauaacuguaccuucgaguacauaucccaaccuuuucucauggaccuggaagggaagcagggaaacuucaagaaucugagagaguuuguguucaaaaacguggauggcuacuuuaagaucuauucuaaacacacaccaauugaccucgucagggauuuaccccggggcuucgcggcucuggagccucuuguugacuugccaaucgggauuaauaucacucgcuuucagacccugcuagcccuccauagaagcuaccugacaccgggaaaccuugaauccgguuggaccacgggcgcagccgcuuauuacgugggguaucugcagcaaaggacuuucuugcucucauacaaucagaacggaacaauaaccgaugcaguagacugcagucuggaucccuuaagcgagacuaaguguacacugaaaucucucaccguggaaaagggcauuuaucagacguccaauuuucggguccagccuaccaucucaauugugcgcuucccaaacaucacaaaucuuugccccuuuggugagguuuucaacgccagcaaguucgcuaguguguacgccuggaaucgaaaaagaaucucuaacugugucgcggacuacuccgugcuguauaauagcacuucguuuucuaccuucaagugcuacgggguauccccuacaaaauugaacgaccuauguuuuacuaauguuuaugcagauucauucguggucaagggagacgaggugaggcaaauugccccaggccagaccggcgucauagcugauuacaacuauaaacugcccgacgauuuuacagggugcgugaucgccuggaacaguguuaagcaggacgcacucaccggagguaauuacggcuaucuguaccggcuuuuccguaaaagcaagcugaagccguuugaacgcgauauuuccacugagaucuaccaagcugggucuacgccuuguaacggacaggugggcuugaauugcuauuacccccucgaaagauaugguuuccacccaacaaccgggguaaacuaccagccuuuuagggucgugguucugagcuucgaguuacugaauggccccgccacugugugcggaccaaaacuaucaaccacacucgucaaggacaaaugugugaacuuuaauuucaacggccugaccgggacuggaguacuuacaacgaguaagaaacaguuuuugcccuuccaacaguucggucgggauauauccgacaccacugaugcggugcgagacccucagacacuggaaauucucgacaucaccccaugcagcuuuggcgggguuucugucaucacaccgggaacuaauaccucaaaccagguggccgugcuguaucaagaugucaauuguacggagguucccauggcaauucaugcugagcagcuuaccccugccuggcgcguguacagugcuggcgccaacguguuccagacaagagcagguugccugguaggggccgaacacgucaauaacagcuaugagugugacaucccagugggcgcuggaauuugcgcguccuaccacucuaugucgagcuugagguccguuaaucagcggucaauaaucgcauacacuaugagucucggcgccgaaaacucuguggcuuauagcaacaauuccauugccauccccaccaacuuuacaaucucagucacuaccgagauucugccugugagcaugacgaagacaucuguugauuguaccauguacauaugcggggacuccaucgaauguaguaauuuacugcuacaauauggaucuuucugcacucagcucaaccgcgcacugacagguauugccguggagcaggauaagaauacccaggagguauuugcucaagucaaacagaucuacaagacuccacccauuaaagacuucggcggguuuaacuucucucagauccuuccggauccuuccaagccaucaaaaagaaguuuuauagaagacuugcuguucaauaaggugacccucgccgaugcaggauuuaucaagcaauauggcgacugucugggugauauugcggcuagggacuuaaucugcgcccagaaauucaacgggcugacagugcuucccccuuugcucacggaugagaugauugcacaguacaccagcgcccugcuagcuggcacuaucacaucgggauggaccuucggcgccggggcagcucugcagauacccuuugccaugcaaauggcguaucguuucaauggaauuggcgucacacagaacguucucuacgaaaaucagaagcugaucgccaaccaguuuaauuccgcuauugguaaaauccaagacucucuuagcucaacugcaagugccuuggggaagcugcaggacgugguaaaccagaaugcucaggccuuaaacacccucgugaaacaacuguccucuaacuucggagcaauaagcuccguccuuaaugauauccugucacgguuggacaagguggaggcggaaguucagauugaucgacucaucacgggcagacugcagagccuacaaacauacgugacccagcagcugauuagggccgcugagauccgcgccagugcaaaccucgcugccacuaagaugucugagugcguccugggucaguccaaacggguggacuuuuguggcaagggguaucaucuuaugagcuucccacaaucggcaccucacggaguuguguuuuugcaugucaccuacguacccgcccaggagaaaaauuucacaacugcuccagcgauaugccacgagggcaaggcccacuuuccgagagaagggguguucguuucaaacggaacccauugguuuauuacacagaggaauuucuaugagccucagaucaucacgaccgauaacacuuuugugucuggcaguugugacgucgugauugguaucguaaauaacacaguguacgauccccugcaaccagaguuagacuccuucaaagaagaacucgauaaguauuucaaaaaucacaccagccccgacgucgaucugggggacauuucuggaauaaacgcaagcguugugaauauccagaaggaaauugaucgccuuaacgagguggcuaagaaucugaacgaauccccuaucgaccuacaggagcucggcaaauacgagcaguauauuaaguggccaugguacaucuggcuggguuuuauagccggcuugaucgccauuaucauggucacuauuaugcugugcuguaugacaucaugcuguaguugcuuaaaaggguguugcagcuguggaucuugcugcaaguucgacgaagaugacuccgagcccgugcucaaaggcguuaagcugcauuacaccuga

SEQ ID NO: 12031 - RNA, 3804 nt, Artificial Sequence
  SARS-CoV-2/pangolin/Guangxi/P5L/2017__EPI_ISL_410540 spike protein CDS human (1-1267)
auguucguguuucuguucguccucccccuuguuagcucccagugcgugaaccugaccacaagaacuggcaucccuccaggguacacgaauagcucaaccaggggaguauauuacccggacaagguguuucggaguagcauuuugcacuuaacacaagaucuguuccuacccuuuuucuccaacgucacuugguuuaauaccauaaacuaucaggguggcuucaaaaaguuugacaauccugugcucccauucaacgaugggguuuacuuugccucuacagagaaaucgaauaucauucgcggauggaucuucggcaccacucuggacgcucgaacacagucacuucugauugugaacaaugcaaccaacgucgugaucaagguaugugaauuucaguucugcacggaucccuucuuggguguuuauuaccauaauaacaauaaaacuuggguggagaacgaauuucgugucuauagcagugccaauaacuguaccuucgaguacauaucccaaccuuuucucauggaccuggaagggaagcagggaaacuucaagaaucugagagaguuuguguucaaaaacguggauggcuacuuuaagaucuauucuaaacacacaccaauugaccucgucagggauuuaccccggggcuucgcggcucuggagccucuuguugacuugccaaucgggauuaauaucacucgcuuucagacccugcuagcccuccauagaagcuaccugacaccgggaaaacuugaauccgguuggaccacgggcgcagccgcuuauuacgugggguaucugcagcaaaggacuuucuugcucucauacaaccagaauggaacaauaaccgaugcaguagacugcagucuggaucccuuaagcgagacuaaguguacacugaagucucucaccguggaaaagggcauuuaucagacguccaacuuucggguccagccuaccaucucaauugugcgcuucccaaauaucacaaaccuuugccccuuuggugagguuuucaaugccagcaaauucgcuaguguguacgccuggaaccgaaagagaaucucuaauugugucgcggacuacuccgugcuguauaacagcacuucguuuucuaccuucaaaugcuacgggguauccccuacaaaguugaaugaccuauguuuuacuaacguuuaugcagauucauucguggucaaaggagacgaggugaggcaaauugccccaggccagaccggcgucauagcugauuacaauuauaagcugcccgacgauuuuacagggugcgugaucgccuggaacaguguuaaacaggacgcacucaccggagguaacuacggcuaucuguaccggcuuuuccguaagagcaagcugaaaccguuugaacgcgauauuuccacugagaucuaccaagcugggucuacgccuuguaauggacaggugggcuugaacugcuauuacccccucgaaagauaugguuuccacccaacaaccgggguaaauuaccagccuuuuagggucgugguucugagcuucgaguuacugaacggccccgccacugugugcggaccaaagcuaucaaccacacucgucaaagacaagugugugaauuuuaacuucaauggccugaccgggacuggaguacuuacaacgaguaaaaagcaguuuuugcccuuccaacaguucggucgggauauauccgacaccacugaugcggugcgagacccucagacacuggaaauucucgacaucaccccaugcagcuuuggcgggguuucugucaucacaccgggaacuaacaccucaaaucagguggccgugcuguaucaagaugucaacuguacggagguucccauggcaauucaugcugagcagcuuaccccugccuggcgcguguacagugcuggcgccaauguguuccagacaagagcagguugccugguaggggccgaacacgucaacaauagcuaugagugugacaucccagugggcgcuggaauuugcgcguccuaccacucuaugucgagcuuuagguccguuaaccagcggucaauaaucgcauacacuaugaguuugggcgccgaaaauucuguggcuuauagcaacaacuccauugccauccccaccaauuucacaaucucagucacuaccgagauucucccugugagcaugacgaagacaucuguugauuguaccauguacauaugcggggacuccaucgaauguaguaaccuguuacugcaauauggaucuuuuugcacucagcuaaaucgcgcacucacagguauugccguggagcaggauaaaaacacccaggagguauucgcucaagucaagcagaucuacaaaacuccacccauuaaggacuuuggcggguucaauuuuucucagauccugccggauccuuccaaaccaucaaagagaaguuucauagaagaccuuuuguuuaacaaggugacccuggccgaugcaggauucaucaaacaauauggcgacugucucggugauauugcggcuagggaccugaucugcgcccagaaguucaauggguuaacagugcugcccccucuuuugacggaugagaugauugcacaguacaccagcgcccuccuggcuggcacuaucacaucgggauggaccuuuggcgccggggcagcucuacagauacccuucgccaugcaaauggcguaucguuuuaacggaauuggcgucacacagaauguucuguacgaaaaccagaaacucaucgccaaucaguucaacuccgcuauugguaagauccaagacucucugagcucaacugcaagugcccuugggaaauugcaggacgugguaaaucagaacgcucaggcccugaauaccuuagugaagcaacucuccucuaacuuuggagcaauaagcuccguccugaacgauauccuuucacggcuggacaagguggaggcggaaguucagauugaucgauugaucacgggcagacuccagagccugcaaacauacgugacccagcagcuaauuagggccgcugagauccgcgccagugcaaaucuggcugccacuaaaaugucugagugcguccucggucaguccaagcggguggacuucuguggcaaaggguaucaucugaugagcuuuccacaaucggcaccucacggaguuguguuccuucaugucaccuacguacccgcccaggaaaagaacuuuacaacugcuccagcgauaugccacgagggcaaagcccacuucccgagagaagggguguuuguuucaaauggaacccauugguucauuacacagaggaacuuuuaugagccucagaucaucacgaccgauaauacuuucgugucuggcaguugugacgucgugauugguaucguaaacaauacaguguacgaucccuugcaaccagagcuggacuccuucaaggaagaguuagauaaauauuuuaagaaccacaccagccccgacgucgaucucggggacauuucuggaauaaaugcaagcguugugaacauccagaaggaaauugaucgccugaaugagguggcuaaaaaccuuaaugaaucccugaucgaccuacaggagcucggcaaguacgagcaguauauuaaauggccuugguacaucuggcuggguuucauagccggcuugaucgccauuaucauggucacuauuaugcugugcuguaugacaucaugcuguaguugcuuaaagggguguugcagcuguggaucuugcugcaaauuugacgaagaugacuccgagccagugcucaagggcguuaagcugcauuacaccuga

SEQ ID NO: 12032 - RNA, 3804 nt, Artificial Sequence
  SARS-CoV-2/pangolin/Guangxi/P5E/2017__EPI_ISL_410541 spike protein CDS human (1-1267)
auguucguguuucuguucguccucccccuuguuagcucccagugcgugaaccugaccacaagaacuggcaucccuccaggguacacaaauucuucaaccaggggaguauauuacccggacaagguguuucggaguagcauuuugcacuuaacacaagaucuguuccuacccuuuuucuccaacgucacuugguuuaauaccauaacauaucaggguggcucuaaaaaguucgacaacccugugcucccauuuaaugaugggguuuacuucgccucgaccgagaaaucaaacaucauucgcggauggaucuuuggcacuacacuggacgcucgaacccagagccuucugauugugaauaacgcaacgaaugucgugaucaagguaugugaguuccaguuuugcacugaucccuucuuggguguuuauuaccauaacaauaacaaaaccuggguggaaaaugaguuccgugucuauaguuccgccaacaauuguacauuugaauacauaucucaaccuuuccucauggaccuggaagggaagcagggaaacuuuaagaaccugagagaguucguguuuaaaaauguggauggcuacuucaagaucuauagcaaacacacuccaauugaccucgucagggauuuaccccggggcuuugcggcucuggagccucuuguugacuugccaaucgggauuaacaucacccgcuuccagacacugcuagcccuccauagauccuaccugaccccgggaaaacuugaaucagguuggacgacuggcgcagccgcuuauuacgugggguaucugcagcaaaggacauuuuugcucaguuacaaucagaacggaaccauaacugaugcaguagacugcagccuggaucccuuaucugagacaaaguguacccugaagucccucacgguggaaaagggcauuuaucagaccucaaauuuccggguccagccuacaaucagcauugugcgcuuuccaaacaucacuaaucuuugccccuucggugagguuuuuaacgccaguaaauucgcuucuguguacgccuggaaucgaaagagaaucuccaacugugucgcggacuacagcgugcuguauaauucgaccucuuucuccacauuuaaaugcuacgggguaucaccuacuaaguugaacgaccuauguuucaccaauguuuaugcagauaguuuuguggucaaaggagacgaggugaggcaaauugccccaggccagacaggcgucauagcugauuacaacuauaagcugcccgacgauuucaccgggugcgugaucgccuggaauagcguuaaacaggacgcacucacuggagauaacuacgguuaucuguaccggcuuuuucguaaguccaagcugaaaccguucgaacgcgacauuucuacggagaucuaccaagcuggcagcacaccuuguaacggacaggugggguugaauugcuauuacccccucgaaagauauggcuuucacccaaccacugguguaaacuaccagccuuucagggucgugguucugucauuugaguuacugaaugggcccgccaccgugugcggcccaaagcuaaguacaacccucgucaaagauaagugugugaacuucaauuuuaacggacugacuggcacagggguacuuacgaccuccaaaaagcaguucuugcccuuucaacaguucggacgggacauaagcgauacuacagacgcggugcgagacccucagacccuggaaauucucgauaucacaccaugcucuuucgguggcguuucagucaucacuccggggaccaauacgaguaaccagguggccgugcuguaucaagacgucaauuguaccgagguucccauggcaauucaugcugagcagcuuacgccugccuggcgcguguacagcgcuggagccaacguguuucagacuagagcaggcugccugguaggugccgaacacgucaauaacuccuaugagugugauaucccagugggggcuggcauuugcgcgucuuaccacucgaugagcuccuucaggucaguuaaucagcggaguauaaucgcauacaccaugucuuugggagccgaaaacagcguggcuuauuccaauaacucaauugccauccccacaaacuuuacuaucagcgucaccacggagauucucccugugucuaugacaaagaccuccguugacuguacuauguacauaugcggcgauaguaucgaauguagcaaucuguuacugcaauaugggucuuucugcacacagcuaaaccgcgcacucaccggaauugccguggagcaggacaaaaauacucaggagguauuugcucaagucaagcagaucuacaaaaccccacccauuaaggauuucgguggcuuuaacuucucccagauccugccggacccuucaaaaccaaguaagaggagcuuuauagaagaucuuuuguucaauaaggugacacuggccgacgcaggguuuaucaaacaauauggagauugucucggcgacauugcggcuagagaucugaucugcgcccagaaguucaacgguuuaacggugcugcccccucuuuugaccgacgagaugauugcacaguacacuucggcccuccuggcugggacaaucaccuccggcuggacauucggagccggcgcagcucuacagauacccuuugccaugcaaauggcguaucguuucaaugggauuggagucacucagaacguucuguacgaaaaucagaaacucaucgccaaccaguuuaauucugcuauuggcaagauccaagacagccugucaaguaccgcauccgcccuugguaaauugcaggaugugguaaaccagaaugcucaggcccugaacacguuagugaagcaacucucuagcaauuucggggcaauauccucaguccugaacgacauccuuagccggcuggauaagguggaggcggaaguucagauugaccgauugaucacaggaagacuccagagucugcaaaccuacgugacucagcagcuaauuagggccgcugagauccgcgccucugcaaaccuggcugccaccaaaauguccgagugcguccucggccagagcaagcggguggauuuuugugguaaaggcuaucaucugaugucguucccacaaucagcaccucacgggguuguguuucuucaugucacauacguacccgcccaggaaaagaauuucacuaccgcuccagcgauaugccacgagggaaaagcccacuuuccgagagaaggcguguucguuucuaacgggacacauugguuuauuacgcagaggaauuucuaugagccucagaucaucaccacugacaacacauuugugaguggauccugugaugucgugauuggcaucguaaauaacaccguguacgaccccuugcaaccagagcuggauagcuucaaggaagaguuagacaaauauuucaagaaucacacuucucccgaugucgaccucggugauauuagcgggauaaacgcauccguugugaauauccagaaggaaauugaccgccugaacgagguggcuaaaaaucuuaacgaaucacugaucgaccuacaggagcucggaaaguacgagcaguauauuaaauggccuugguacaucuggcugggcuuuauagccgguuugaucgccauuaucauggucacaauuaugcugugcuguaugaccaguugcuguagcugcuuaaagggcuguugcucuuguggguccugcugcaaauucgaugaagacgauucagagccagugcucaagggaguuaagcugcauuacacguga

SEQ ID NO: 12033 - RNA, 3798 nt, Artificial Sequence
  SARS-CoV-2/pangolin/Guangxi/P1E/2017__EPI_ISL_410539 spike protein CDS human (1-1265)
auguucguguuucuguucguccucccccuuguuagcucccagugcgugaaccugaccacaagaacuggcauccaaccuggguacaccaauucuucaacgaggggaguauauuacccagacaagguguuucggaguagcauuuugcacuuaacacaggaucuguuccuaccguuuuucuccaacgucacuugguuuaauaccauaaacuaucaggguggcuucaagaaguuugacaaucccgugcucccuuucaacgaugggguuuacuuugccucuacagagaaaucgaauaucauucgcggauggaucuucggcaccacucuggacgcucgaacacagucacuucugauugugaacaaugcaaccaacgucgugaucaagguaugugaauuucaauucugcacggauccauucuuggguguuuauuaccauaauaacaauaaaacuuggguggagaacgaauuucgugucuauagcagugccaauaacuguaccuucgaguacauaucccagcccuuucucauggaccuggaagggaagcagggaaacuucaagaaucugagagaguuuguguucaaaaacguggauggcuacuuuaagaucuauucuaaacacacaccuauugaccucgucagggauuuaccacggggcuucgcggcucuggagccccuuguugacuugccuaucgggauuaauaucacucgcuuucagacccugcuagcccuccauagaagcuaccugacaccaggaaaacuugaauccgguuggaccacgggcgcagccgcuuauuacgugggguaucugcaacagaggacuuucuugcucucauacaaccagaauggaacaauaaccgaugcaguagacugcagucuggauccguuaagcgagacuaaguguacacugaagucucucaccguggaaaagggcauuuaucagacguccaacuuucggguccaacccaccaucucaauugugcgcuucccuaauaucacaaaccuuugcccauuuggugagguuuucaaugccagcaaauucgcuaguguguacgccuggaaccgaaagagaaucucuaauugugucgcggacuacuccgugcuguauaacagcacuucguuuucuaccuucaaaugcuacgggguaucccccacaaaguugaaugaccuauguuuuacuaacguuuaugcagauucauucguggucaaaggagacgaggugaggcagauugccccuggccagaccggcgucauagcugauuacaauuauaagcugccagacgauuuuacagggugcgugaucgccuggaacaguguuaaacaagacgcacucaccggagguaacuaccuguaucggcuuuuccguaagagcaagcugaaacccuuugaacgcgauauuuccacugagaucuaccaggcuggcucuacgccguguaauggacaggugggguugaacugcuacuauccucucgaaagauacggcuuccaccccacaaccgguguaaauuaucagccauuuagggucgugguucugagcuucgaguuacugaacgggccugccacugugugcggccccaagcuaucaaccacacucgucaaagacaagugugugaauuuuaacuucaauggacugaccggcacugggguacuuacaacgaguaaaaagcaauuuuugccauuccagcaguucggacgggauauauccgacaccacugaugcggugcgagacccccagacacuggaaauucucgacaucaccccuugcagcuuugguggcguuucugucaucacaccagggacuaacaccucaaaucaaguggccgugcuguaccaggaugucaacuguacggagguuccgauggcaauucaugcugagcagcuuacccccgccuggcgcguguauagugcuggagccaauguguuccagacaagagcaggcugccugguaggugccgaacacgucaacaauagcuacgagugugacaucccugugggggcuggcauuugcgcguccuaucacucuaugucgagcuugagguccguuaaccaacggucaauaaucgcauacacuaugagucucggagccgaaaauucuguggcuuacagcaacaacuccauugccaucccaaccaauuuuacaaucucagucacuaccgagauucugcccgugagcaugacgaagacaucuguugauuguaccauguauauaugcggcgacuccaucgaauguaguaacuuacugcuacaguacgggagcuucugcacucagcucaaucgcgcacugacaggaauugccguggagcaggauaaaaacacccaagagguauuugcucaggucaagcagaucuauaaaacuccuccaauuaaggacuucgguggcuuuaauuucucucaaauccuucccgauccguccaaaccuucaaagagaaguuuuauagaagacuugcuguucaacaaggugacccucgccgaugcaggguuuaucaaacaguacggagacugucugggcgauauugcggcuagggacuuaaucugcgcccagaaguucaauggucugacagugcuuccacccuugcucacggaugagaugauugcacaguauaccagcgcccugcuagcugggacuaucacaucgggcuggaccuucggagccggcgcagcucugcaaauaccuuuugccaugcagauggcguaccguuucaacgggauuggagucacacagaauguucucuaugaaaaccagaaacugaucgccaaucaauuuaacuccgcuauuggcaagauccaggacucucuuagcucaacugcaagugccuuggguaaacugcaggacgugguaaaucagaacgcucaagccuuaaauacccucgugaagcagcuguccucuaacuucggggcaauaagcuccguccuuaacgauauccugucacgguuggacaagguggaggcggaaguucagauugaucgacucaucacgggaagacugcaaagccuacagacauacgugacccagcagcugauuagggccgcugagauccgcgccagugcaaaucucgcugccacuaaaaugucugagugcguccugggccaauccaagcggguggacuuuugugguaaaggcuaccaucuuaugagcuucccccagucggcaccacacgggguuguguuuuugcaugucaccuauguaccugcccaggaaaagaacuucacaacugcucccgcgauaugccacgagggaaaagcccacuuuccaagagaaggcguguucguuucaaaugggacccauugguuuauuacacagaggaacuucuacgagccgcaaaucaucacgaccgauaauacuuuugugucuggaaguugugacgucgugauuggcaucguaaacaauacaguguaugauccucugcagcccgaguuagacuccuucaaggaggaacucgauaaauacuucaagaaccacaccagcccagacgucgaucugggugacauuucugggauaaaugcaagcguugugaacauccagaaggaaauugaucgccuuaaugagguggcuaaaaaccugaaugaaucccuaaucgaccuccaggagcugggaaaguaugagcaauacauuaaauggcccugguauaucugguugggcuuuauagccggucugaucgccauuaucauggucacuauuauguuaugcuguaugacaucaugcuguaguugccucaagggcuguugcagcugugggucuugcugcaaauucgacgaagaugacuccgagccugugcugaagggaguuaaacuucauuacaccuga

SEQ ID NO: 12034 - RNA, 3822 nt, Artificial Sequence
  SARS-CoV-2/Wuhan/WIV05/2019__EPI_ISL_402128 spike protein CDS gc mod (1-1273)
auguucguguuucuggugcugcugccccugguguccagccagugugugaaccugaccaccagaacacagcugccuccagccuacaccaacagcuucaccagaggcguguacuaccccgacaagguguucagauccagcgugcugcacucuacccaggaccuguuccugccuuucuucagcaacgugaccugguuccacgccauccacguguccggcaccaauggcaccaagagauucgacaaccccgugcugcccuucaacgacgggguguacuuugccagcaccgagaaguccaacaucaucagaggcuggaucuucggcaccacacuggacagcaagacccagagccugcugaucgugaacaacgccaccaacguggucaucaaagugugcgaguuccaguucugcaacgaccccuuccugggcgucuacuaccacaagaacaacaagagcuggauggaaagcgaguuccggguguacagcagcgccaacaacugcaccuucgaguacgugucccagccuuuccugauggaccuggaaggcaagcagggcaacuucaagaaccugcgcgaguucguguucaagaacaucgacggcuacuucaaaaucuacagcaagcacaccccuaucaaccucgugcgggaucugccucagggcuucucugcucuggaaccccugguggaucugcccaucggcaucaacaucacccgguuucagacacugcuggcccugcacagaagcuaccugacaccuggcgauagcagcagcggauggacagcuggugccgccgcuuacuaugugggcuaccugcagccuagaaccuuccugcugaaguacaacgagaacggcaccaucaccgacgccguggauugugcucuggauccucugagcgagacaaagugcacccugaaguccuucaccguggaaaagggcaucuaccagaccagcaacuuccgggugcagcccaccgaauccaucgugcgguuccccaauaucaccaaucugugccccuucggcgagguguucaaugccaccagauucgccucuguguacgccuggaaccggaagcggaucagcaauugcguggccgacuacuccgugcuguacaacuccgccagcuucagcaccuucaagugcuacggcguguccccuaccaagcugaacgaccugugcuucacaaacguguacgccgacagcuucgugauccggggagaugaagugcggcagauugccccuggacagacaggcaagaucgccgacuacaacuacaagcugcccgacgacuucaccggcugugugauugccuggaacagcaacaaccuggacuccaaagucggcggcaacuacaauuaccuguaccggcuguuccggaaguccaaucugaagcccuucgagcgggacaucagcaccgaaaucuaucaggccggcagcaccccuugcaacggcguggaaggcuucaacugcuacuucccacugcaguccuacggcuuucagcccacaaauggcgugggcuaucagcccuacagagugguggugcugagcuucgaacugcugcaugcuccugccacagugugcggcccuaagaaaagcaccaaucucgugaagaacaaaugcgugaacuucaacuucaacggccugaccggcaccggcgugcugacagagagcaacaagaaguuccugccauuccagcaguuuggccgggauaucgccgauaccacagacgccguuagagauccccagacacuggaaauccuggacaucaccccaugcagcuucggcggagugucugugaucaccccuggcaccaacaccagcaaucagguggcagugcuguaccaggacgugaacuguaccgaagugcccguggccauucacgccgaucagcugacaccuacauggcggguguacuccaccggcagcaauguguuucagaccagagccggcugucugaucggagccgagcacgugaacaauagcuacgagugcgacauccccaucggcgcuggcaucugugccagcuaccagacacagacaaacagccccagacgggcuagaagcguggccagccagagcaucauugccuacacaaugucucugggcgccgagaacagcguggccuacuccaacaacucuaucgcuauccccaccaacuucaccaucagcgugaccaccgagauccugccuguguccaugaccaagaccagcguggacugcaccauguacaucugcggcgauuccaccgagugcuccaaccugcugcugcaguacggcagcuucugcacccagcugaauagagcccugacagggaucgccguggaacaggacaagaacacccaagagguguucgcccaagugaagcaaaucuacaagaccccuccuaucaaggacuucggcggcuucaauuucagccagauucugcccgauccuagcaagcccagcaagcggagcuucaucgaggaccugcuguucaacaaagugacacuggccgacgccggcuucaucaagcaguauggcgauugucugggcgacauugccgccagggaucugauuugcgcccagaaguuuaacggacugacagugcugccuccucugcugaccgaugagaugaucgcccaguacacaucugcccugcuggccggcacaaucacaagcggcuggacauuuggagcuggcgccgcucugcagauccccuuugcuaugcagauggccuaccgguucaacggcaucggagugacccagaaugugcuguacgagaaccagaagcugaucgccaaccaguucaacagcgccaucggcaagauccaggacagccugagcagcacagcaagcgcccugggaaagcugcaggacguggucaaccagaaugcccaggcacugaacacccuggucaagcagcuguccuccaacuucggcgccaucagcucugugcugaacgauauccugagcagacuggacaaggucgaggccgaggugcagaucgacagacugaucacaggcagacugcagagccuccagacauacgugacccagcagcugaucagagccgccgagauuagagccucugccaaucuggccgccaccaagaugucugagugugugcugggccagagcaagagaguggacuuuugcggcaagggcuaccaccugaugagcuucccucagucugccccucacggcgugguguuucugcacgugacauaugugcccgcucaagagaagaauuucaccaccgcuccagccaucugccacgacggcaaagcccacuuuccuagagaaggcguguucguguccaacggcacccauugguucgugacacagcggaacuucuacgagccccagaucaucaccaccgacaacaccuucgugucuggcaacugcgacguugugaucggcauugugaacaauaccguguacgacccucugcagcccgagcuggacagcuucaaagaggaacuggacaaguacuuuaagaaccacacaagccccgacguggaccugggcgauaucagcggaaucaaugccagcgucgugaacauccagaaagagaucgaccggcugaacgagguggccaagaaucugaacgagagccugaucgaccugcaagaacuggggaaguacgagcaguacaucaaguggcccugguacaucuggcugggcuuuaucgccggacugauugccaucgugauggucacaaucaugcuguguugcaugaccagcugcuguagcugccugaagggcuguuguagcuguggcagcugcugcaaguucgacgaggacgauucugagcccgugcugaagggcgugaaacugcacuacaccuga

SEQ ID NO: 12035 - RNA, 3822 nt, Artificial Sequence; identical to SEQ ID NO: 146
  SARS-CoV-2/Wuhan/WIV05/2019__EPI_ISL_402128 spike protein CDS gc mod (1-1273)(K986P_V987P)

SEQ ID NO: 12036 - RNA, 3822 nt, Artificial Sequence
  SARS-CoV-2/Wuhan/WIV05/2019__EPI_ISL_402128 spike protein CDS gc mod (1-1273)(K986P_V987P_T887WN_A1020W)
auguucguguuucuggugcugcugccccugguguccagccagugugugaaccugaccaccagaacacagcugccuccagccuacaccaacagcuucaccagaggcguguacuaccccgacaagguguucagauccagcgugcugcacucuacccaggaccuguuccugccuuucuucagcaacgugaccugguuccacgccauccacguguccggcaccaauggcaccaagagauucgacaaccccgugcugcccuucaacgacgggguguacuuugccagcaccgagaaguccaacaucaucagaggcuggaucuucggcaccacacuggacagcaagacccagagccugcugaucgugaacaacgccaccaacguggucaucaaagugugcgaguuccaguucugcaacgaccccuuccugggcgucuacuaccacaagaacaacaagagcuggauggaaagcgaguuccggguguacagcagcgccaacaacugcaccuucgaguacgugucccagccuuuccugauggaccuggaaggcaagcagggcaacuucaagaaccugcgcgaguucguguucaagaacaucgacggcuacuucaaaaucuacagcaagcacaccccuaucaaccucgugcgggaucugccucagggcuucucugcucuggaaccccugguggaucugcccaucggcaucaacaucacccgguuucagacacugcuggcccugcacagaagcuaccugacaccuggcgauagcagcagcggauggacagcuggugccgccgcuuacuaugugggcuaccugcagccuagaaccuuccugcugaaguacaacgagaacggcaccaucaccgacgccguggauugugcucuggauccucugagcgagacaaagugcacccugaaguccuucaccguggaaaagggcaucuaccagaccagcaacuuccgggugcagcccaccgaauccaucgugcgguuccccaauaucaccaaucugugccccuucggcgagguguucaaugccaccagauucgccucuguguacgccuggaaccggaagcggaucagcaauugcguggccgacuacuccgugcuguacaacuccgccagcuucagcaccuucaagugcuacggcguguccccuaccaagcugaacgaccugugcuucacaaacguguacgccgacagcuucgugauccggggagaugaagugcggcagauugccccuggacagacaggcaagaucgccgacuacaacuacaagcugcccgacgacuucaccggcugugugauugccuggaacagcaacaaccuggacuccaaagucggcggcaacuacaauuaccuguaccggcuguuccggaaguccaaucugaagcccuucgagcgggacaucagcaccgaaaucuaucaggccggcagcaccccuugcaacggcguggaaggcuucaacugcuacuucccacugcaguccuacggcuuucagcccacaaauggcgugggcuaucagcccuacagagugguggugcugagcuucgaacugcugcaugcuccugccacagugugcggcccuaagaaaagcaccaaucucgugaagaacaaaugcgugaacuucaacuucaacggccugaccggcaccggcgugcugacagagagcaacaagaaguuccugccauuccagcaguuuggccgggauaucgccgauaccacagacgccguuagagauccccagacacuggaaauccuggacaucaccccaugcagcuucggcggagugucugugaucaccccuggcaccaacaccagcaaucagguggcagugcuguaccaggacgugaacuguaccgaagugcccguggccauucacgccgaucagcugacaccuacauggcggguguacuccaccggcagcaauguguuucagaccagagccggcugucugaucggagccgagcacgugaacaauagcuacgagugcgacauccccaucggcgcuggcaucugugccagcuaccagacacagacaaacagccccagacgggcuagaagcguggccagccagagcaucauugccuacacaaugucucugggcgccgagaacagcguggccuacuccaacaacucuaucgcuauccccaccaacuucaccaucagcgugaccaccgagauccugccuguguccaugaccaagaccagcguggacugcaccauguacaucugcggcgauuccaccgagugcuccaaccugcugcugcaguacggcagcuucugcacccagcugaauagagcccugacagggaucgccguggaacaggacaagaacacccaagagguguucgcccaagugaagcaaaucuacaagaccccuccuaucaaggacuucggcggcuucaauuucagccagauucugcccgauccuagcaagcccagcaagcggagcuucaucgaggaccugcuguucaacaaagugacacuggccgacgccggcuucaucaagcaguauggcgauugucugggcgacauugccgccagggaucugauuugcgcccagaaguuuaacggacugacagugcugccuccucugcugaccgaugagaugaucgcccaguacacaucugcccugcuggccggcacaaucacaagcggcuggugguuuggagcuggcgccgcucugcagauccccuuugcuaugcagauggccuaccgguucaacggcaucggagugacccagaaugugcuguacgagaaccagaagcugaucgccaaccaguucaacagcgccaucggcaagauccaggacagccugagcagcacagcaagcgcccugggaaagcugcaggacguggucaaccagaaugcccaggcacugaacacccuggucaagcagcuguccuccaacuucggcgccaucagcucugugcugaacgauauccugagcagacuggacccuccugaggccgaggugcagaucgacagacugaucacaggcagacugcagagccuccagacauacgugacccagcagcugaucagagccgccgagauuagauggucugccaaucuggccgccaccaagaugucugagugugugcugggccagagcaagagaguggacuuuugcggcaagggcuaccaccugaugagcuucccucagucugccccucacggcgugguguuucugcacgugacauaugugcccgcucaagagaagaauuucaccaccgcuccagccaucugccacgacggcaaagcccacuuuccuagagaaggcguguucguguccaacggcacccauugguucgugacacagcggaacuucuacgagccccagaucaucaccaccgacaacaccuucgugucuggcaacugcgacguugugaucggcauugugaacaauaccguguacgacccucugcagcccgagcuggacagcuucaaagaggaacuggacaaguacuuuaagaaccacacaagccccgacguggaccugggcgauaucagcggaaucaaugccagcgucgugaacauccagaaagagaucgaccggcugaacgagguggccaagaaucugaacgagagccugaucgaccugcaagaacuggggaaguacgagcaguacaucaaguggcccugguacaucuggcugggcuuuaucgccggacugauugccaucgugauggucacaaucaugcuguguugcaugaccagcugcuguagcugccugaagggcuguuguagcuguggcagcugcugcaaguucgacgaggacgauucugagcccgugcugaagggcgugaaacugcacuacaccuga

SEQ ID NO: 12037 - RNA, 3822 nt, Artificial Sequence
  SARS-CoV-2/Wuhan/WIV05/2019__EPI_ISL_402128 spike protein CDS gc mod (1-1273)(K986P_V987P_P1069F)
auguucguguuucuggugcugcugccccugguguccagccagugugugaaccugaccaccagaacacagcugccuccagccuacaccaacagcuucaccagaggcguguacuaccccgacaagguguucagauccagcgugcugcacucuacccaggaccuguuccugccuuucuucagcaacgugaccugguuccacgccauccacguguccggcaccaauggcaccaagagauucgacaaccccgugcugcccuucaacgacgggguguacuuugccagcaccgagaaguccaacaucaucagaggcuggaucuucggcaccacacuggacagcaagacccagagccugcugaucgugaacaacgccaccaacguggucaucaaagugugcgaguuccaguucugcaacgaccccuuccugggcgucuacuaccacaagaacaacaagagcuggauggaaagcgaguuccggguguacagcagcgccaacaacugcaccuucgaguacgugucccagccuuuccugauggaccuggaaggcaagcagggcaacuucaagaaccugcgcgaguucguguucaagaacaucgacggcuacuucaaaaucuacagcaagcacaccccuaucaaccucgugcgggaucugccucagggcuucucugcucuggaaccccugguggaucugcccaucggcaucaacaucacccgguuucagacacugcuggcccugcacagaagcuaccugacaccuggcgauagcagcagcggauggacagcuggugccgccgcuuacuaugugggcuaccugcagccuagaaccuuccugcugaaguacaacgagaacggcaccaucaccgacgccguggauugugcucuggauccucugagcgagacaaagugcacccugaaguccuucaccguggaaaagggcaucuaccagaccagcaacuuccgggugcagcccaccgaauccaucgugcgguuccccaauaucaccaaucugugccccuucggcgagguguucaaugccaccagauucgccucuguguacgccuggaaccggaagcggaucagcaauugcguggccgacuacuccgugcuguacaacuccgccagcuucagcaccuucaagugcuacggcguguccccuaccaagcugaacgaccugugcuucacaaacguguacgccgacagcuucgugauccggggagaugaagugcggcagauugccccuggacagacaggcaagaucgccgacuacaacuacaagcugcccgacgacuucaccggcugugugauugccuggaacagcaacaaccuggacuccaaagucggcggcaacuacaauuaccuguaccggcuguuccggaaguccaaucugaagcccuucgagcgggacaucagcaccgaaaucuaucaggccggcagcaccccuugcaacggcguggaaggcuucaacugcuacuucccacugcaguccuacggcuuucagcccacaaauggcgugggcuaucagcccuacagagugguggugcugagcuucgaacugcugcaugcuccugccacagugugcggcccuaagaaaagcaccaaucucgugaagaacaaaugcgugaacuucaacuucaacggccugaccggcaccggcgugcugacagagagcaacaagaaguuccugccauuccagcaguuuggccgggauaucgccgauaccacagacgccguuagagauccccagacacuggaaauccuggacaucaccccaugcagcuucggcggagugucugugaucaccccuggcaccaacaccagcaaucagguggcagugcuguaccaggacgugaacuguaccgaagugcccguggccauucacgccgaucagcugacaccuacauggcggguguacuccaccggcagcaauguguuucagaccagagccggcugucugaucggagccgagcacgugaacaauagcuacgagugcgacauccccaucggcgcuggcaucugugccagcuaccagacacagacaaacagccccagacgggcuagaagcguggccagccagagcaucauugccuacacaaugucucugggcgccgagaacagcguggccuacuccaacaacucuaucgcuauccccaccaacuucaccaucagcgugaccaccgagauccugccuguguccaugaccaagaccagcguggacugcaccauguacaucugcggcgauuccaccgagugcuccaaccugcugcugcaguacggcagcuucugcacccagcugaauagagcccugacagggaucgccguggaacaggacaagaacacccaagagguguucgcccaagugaagcaaaucuacaagaccccuccuaucaaggacuucggcggcuucaauuucagccagauucugcccgauccuagcaagcccagcaagcggagcuucaucgaggaccugcuguucaacaaagugacacuggccgacgccggcuucaucaagcaguauggcgauugucugggcgacauugccgccagggaucugauuugcgcccagaaguuuaacggacugacagugcugccuccucugcugaccgaugagaugaucgcccaguacacaucugcccugcuggccggcacaaucacaagcggcuggacauuuggagcuggcgccgcucugcagauccccuuugcuaugcagauggccuaccgguucaacggcaucggagugacccagaaugugcuguacgagaaccagaagcugaucgccaaccaguucaacagcgccaucggcaagauccaggacagccugagcagcacagcaagcgcccugggaaagcugcaggacguggucaaccagaaugcccaggcacugaacacccuggucaagcagcuguccuccaacuucggcgccaucagcucugugcugaacgauauccugagcagacuggacccuccugaggccgaggugcagaucgacagacugaucacaggcagacugcagagccuccagacauacgugacccagcagcugaucagagccgccgagauuagagccucugccaaucuggccgccaccaagaugucugagugugugcugggccagagcaagagaguggacuuuugcggcaagggcuaccaccugaugagcuucccucagucugccccucacggcgugguguuucugcacgugacauauguguucgcucaagagaagaauuucaccaccgcuccagccaucugccacgacggcaaagcccacuuuccuagagaaggcguguucguguccaacggcacccauugguucgugacacagcggaacuucuacgagccccagaucaucaccaccgacaacaccuucgugucuggcaacugcgacguugugaucggcauugugaacaauaccguguacgacccucugcagcccgagcuggacagcuucaaagaggaacuggacaaguacuuuaagaaccacacaagccccgacguggaccugggcgauaucagcggaaucaaugccagcgucgugaacauccagaaagagaucgaccggcugaacgagguggccaagaaucugaacgagagccugaucgaccugcaagaacuggggaaguacgagcaguacaucaaguggcccugguacaucuggcugggcuuuaucgccggacugauugccaucgugauggucacaaucaugcuguguugcaugaccagcugcuguagcugccugaagggcuguuguagcuguggcagcugcugcaaguucgacgaggacgauucugagcccgugcugaagggcgugaaacugcacuacaccuga

SEQ ID NO: 12038 - RNA, 3822 nt, Artificial Sequence
  SARS-CoV-2/Wuhan/WIV05/2019__EPI_ISL_402128 spike protein CDS gc mod (1-1273)(K986P_V987P_ H1048Q_H1064N_ H1083N_H1101N)
auguucguguuucuggugcugcugccccugguguccagccagugugugaaccugaccaccagaacacagcugccuccagccuacaccaacagcuucaccagaggcguguacuaccccgacaagguguucagauccagcgugcugcacucuacccaggaccuguuccugccuuucuucagcaacgugaccugguuccacgccauccacguguccggcaccaauggcaccaagagauucgacaaccccgugcugcccuucaacgacgggguguacuuugccagcaccgagaaguccaacaucaucagaggcuggaucuucggcaccacacuggacagcaagacccagagccugcugaucgugaacaacgccaccaacguggucaucaaagugugcgaguuccaguucugcaacgaccccuuccugggcgucuacuaccacaagaacaacaagagcuggauggaaagcgaguuccggguguacagcagcgccaacaacugcaccuucgaguacgugucccagccuuuccugauggaccuggaaggcaagcagggcaacuucaagaaccugcgcgaguucguguucaagaacaucgacggcuacuucaaaaucuacagcaagcacaccccuaucaaccucgugcgggaucugccucagggcuucucugcucuggaaccccugguggaucugcccaucggcaucaacaucacccgguuucagacacugcuggcccugcacagaagcuaccugacaccuggcgauagcagcagcggauggacagcuggugccgccgcuuacuaugugggcuaccugcagccuagaaccuuccugcugaaguacaacgagaacggcaccaucaccgacgccguggauugugcucuggauccucugagcgagacaaagugcacccugaaguccuucaccguggaaaagggcaucuaccagaccagcaacuuccgggugcagcccaccgaauccaucgugcgguuccccaauaucaccaaucugugccccuucggcgagguguucaaugccaccagauucgccucuguguacgccuggaaccggaagcggaucagcaauugcguggccgacuacuccgugcuguacaacuccgccagcuucagcaccuucaagugcuacggcguguccccuaccaagcugaacgaccugugcuucacaaacguguacgccgacagcuucgugauccggggagaugaagugcggcagauugccccuggacagacaggcaagaucgccgacuacaacuacaagcugcccgacgacuucaccggcugugugauugccuggaacagcaacaaccuggacuccaaagucggcggcaacuacaauuaccuguaccggcuguuccggaaguccaaucugaagcccuucgagcgggacaucagcaccgaaaucuaucaggccggcagcaccccuugcaacggcguggaaggcuucaacugcuacuucccacugcaguccuacggcuuucagcccacaaauggcgugggcuaucagcccuacagagugguggugcugagcuucgaacugcugcaugcuccugccacagugugcggcccuaagaaaagcaccaaucucgugaagaacaaaugcgugaacuucaacuucaacggccugaccggcaccggcgugcugacagagagcaacaagaaguuccugccauuccagcaguuuggccgggauaucgccgauaccacagacgccguuagagauccccagacacuggaaauccuggacaucaccccaugcagcuucggcggagugucugugaucaccccuggcaccaacaccagcaaucagguggcagugcuguaccaggacgugaacuguaccgaagugcccguggccauucacgccgaucagcugacaccuacauggcggguguacuccaccggcagcaauguguuucagaccagagccggcugucugaucggagccgagcacgugaacaauagcuacgagugcgacauccccaucggcgcuggcaucugugccagcuaccagacacagacaaacagccccagacgggcuagaagcguggccagccagagcaucauugccuacacaaugucucugggcgccgagaacagcguggccuacuccaacaacucuaucgcuauccccaccaacuucaccaucagcgugaccaccgagauccugccuguguccaugaccaagaccagcguggacugcaccauguacaucugcggcgauuccaccgagugcuccaaccugcugcugcaguacggcagcuucugcacccagcugaauagagcccugacagggaucgccguggaacaggacaagaacacccaagagguguucgcccaagugaagcaaaucuacaagaccccuccuaucaaggacuucggcggcuucaauuucagccagauucugcccgauccuagcaagcccagcaagcggagcuucaucgaggaccugcuguucaacaaagugacacuggccgacgccggcuucaucaagcaguauggcgauugucugggcgacauugccgccagggaucugauuugcgcccagaaguuuaacggacugacagugcugccuccucugcugaccgaugagaugaucgcccaguacacaucugcccugcuggccggcacaaucacaagcggcuggacauuuggagcuggcgccgcucugcagauccccuuugcuaugcagauggccuaccgguucaacggcaucggagugacccagaaugugcuguacgagaaccagaagcugaucgccaaccaguucaacagcgccaucggcaagauccaggacagccugagcagcacagcaagcgcccugggaaagcugcaggacguggucaaccagaaugcccaggcacugaacacccuggucaagcagcuguccuccaacuucggcgccaucagcucugugcugaacgauauccugagcagacuggacccuccugaggccgaggugcagaucgacagacugaucacaggcagacugcagagccuccagacauacgugacccagcagcugaucagagccgccgagauuagagccucugccaaucuggccgccaccaagaugucugagugugugcugggccagagcaagagaguggacuuuugcggcaagggcuaccagcugaugagcuucccucagucugccccucacggcgugguguuucugaacgugacauaugugcccgcucaagagaagaauuucaccaccgcuccagccaucugcaacgacggcaaagcccacuuuccuagagaaggcguguucguguccaacggcaccaacugguucgugacacagcggaacuucuacgagccccagaucaucaccaccgacaacaccuucgugucuggcaacugcgacguugugaucggcauugugaacaauaccguguacgacccucugcagcccgagcuggacagcuucaaagaggaacuggacaaguacuuuaagaaccacacaagccccgacguggaccugggcgauaucagcggaaucaaugccagcgucgugaacauccagaaagagaucgaccggcugaacgagguggccaagaaucugaacgagagccugaucgaccugcaagaacuggggaaguacgagcaguacaucaaguggcccugguacaucuggcugggcuuuaucgccggacugauugccaucgugauggucacaaucaugcuguguugcaugaccagcugcuguagcugccugaagggcuguuguagcuguggcagcugcugcaaguucgacgaggacgauucugagcccgugcugaagggcgugaaacugcacuacaccuga

SEQ ID NO: 12039 - RNA, 3822 nt, Artificial Sequence
  SARS-CoV-2/Wuhan/WIV05/2019__EPI_ISL_402128 spike protein CDS gc mod (1-1273)(I712C_T1077C)
auguucguguuucuggugcugcugccccugguguccagccagugugugaaccugaccaccagaacacagcugccuccagccuacaccaacagcuucaccagaggcguguacuaccccgacaagguguucagauccagcgugcugcacucuacccaggaccuguuccugccuuucuucagcaacgugaccugguuccacgccauccacguguccggcaccaauggcaccaagagauucgacaaccccgugcugcccuucaacgacgggguguacuuugccagcaccgagaaguccaacaucaucagaggcuggaucuucggcaccacacuggacagcaagacccagagccugcugaucgugaacaacgccaccaacguggucaucaaagugugcgaguuccaguucugcaacgaccccuuccugggcgucuacuaccacaagaacaacaagagcuggauggaaagcgaguuccggguguacagcagcgccaacaacugcaccuucgaguacgugucccagccuuuccugauggaccuggaaggcaagcagggcaacuucaagaaccugcgcgaguucguguucaagaacaucgacggcuacuucaaaaucuacagcaagcacaccccuaucaaccucgugcgggaucugccucagggcuucucugcucuggaaccccugguggaucugcccaucggcaucaacaucacccgguuucagacacugcuggcccugcacagaagcuaccugacaccuggcgauagcagcagcggauggacagcuggugccgccgcuuacuaugugggcuaccugcagccuagaaccuuccugcugaaguacaacgagaacggcaccaucaccgacgccguggauugugcucuggauccucugagcgagacaaagugcacccugaaguccuucaccguggaaaagggcaucuaccagaccagcaacuuccgggugcagcccaccgaauccaucgugcgguuccccaauaucaccaaucugugccccuucggcgagguguucaaugccaccagauucgccucuguguacgccuggaaccggaagcggaucagcaauugcguggccgacuacuccgugcuguacaacuccgccagcuucagcaccuucaagugcuacggcguguccccuaccaagcugaacgaccugugcuucacaaacguguacgccgacagcuucgugauccggggagaugaagugcggcagauugccccuggacagacaggcaagaucgccgacuacaacuacaagcugcccgacgacuucaccggcugugugauugccuggaacagcaacaaccuggacuccaaagucggcggcaacuacaauuaccuguaccggcuguuccggaaguccaaucugaagcccuucgagcgggacaucagcaccgaaaucuaucaggccggcagcaccccuugcaacggcguggaaggcuucaacugcuacuucccacugcaguccuacggcuuucagcccacaaauggcgugggcuaucagcccuacagagugguggugcugagcuucgaacugcugcaugcuccugccacagugugcggcccuaagaaaagcaccaaucucgugaagaacaaaugcgugaacuucaacuucaacggccugaccggcaccggcgugcugacagagagcaacaagaaguuccugccauuccagcaguuuggccgggauaucgccgauaccacagacgccguuagagauccccagacacuggaaauccuggacaucaccccaugcagcuucggcggagugucugugaucaccccuggcaccaacaccagcaaucagguggcagugcuguaccaggacgugaacuguaccgaagugcccguggccauucacgccgaucagcugacaccuacauggcggguguacuccaccggcagcaauguguuucagaccagagccggcugucugaucggagccgagcacgugaacaauagcuacgagugcgacauccccaucggcgcuggcaucugugccagcuaccagacacagacaaacagccccagacgggcuagaagcguggccagccagagcaucauugccuacacaaugucucugggcgccgagaacagcguggccuacuccaacaacucuugcgcuauccccaccaacuucaccaucagcgugaccaccgagauccugccuguguccaugaccaagaccagcguggacugcaccauguacaucugcggcgauuccaccgagugcuccaaccugcugcugcaguacggcagcuucugcacccagcugaauagagcccugacagggaucgccguggaacaggacaagaacacccaagagguguucgcccaagugaagcaaaucuacaagaccccuccuaucaaggacuucggcggcuucaauuucagccagauucugcccgauccuagcaagcccagcaagcggagcuucaucgaggaccugcuguucaacaaagugacacuggccgacgccggcuucaucaagcaguauggcgauugucugggcgacauugccgccagggaucugauuugcgcccagaaguuuaacggacugacagugcugccuccucugcugaccgaugagaugaucgcccaguacacaucugcccugcuggccggcacaaucacaagcggcuggacauuuggagcuggcgccgcucugcagauccccuuugcuaugcagauggccuaccgguucaacggcaucggagugacccagaaugugcuguacgagaaccagaagcugaucgccaaccaguucaacagcgccaucggcaagauccaggacagccugagcagcacagcaagcgcccugggaaagcugcaggacguggucaaccagaaugcccaggcacugaacacccuggucaagcagcuguccuccaacuucggcgccaucagcucugugcugaacgauauccugagcagacuggacaaggucgaggccgaggugcagaucgacagacugaucacaggcagacugcagagccuccagacauacgugacccagcagcugaucagagccgccgagauuagagccucugccaaucuggccgccaccaagaugucugagugugugcugggccagagcaagagaguggacuuuugcggcaagggcuaccaccugaugagcuucccucagucugccccucacggcgugguguuucugcacgugacauaugugcccgcucaagagaagaauuucaccugugcuccagccaucugccacgacggcaaagcccacuuuccuagagaaggcguguucguguccaacggcacccauugguucgugacacagcggaacuucuacgagccccagaucaucaccaccgacaacaccuucgugucuggcaacugcgacguugugaucggcauugugaacaauaccguguacgacccucugcagcccgagcuggacagcuucaaagaggaacuggacaaguacuuuaagaaccacacaagccccgacguggaccugggcgauaucagcggaaucaaugccagcgucgugaacauccagaaagagaucgaccggcugaacgagguggccaagaaucugaacgagagccugaucgaccugcaagaacuggggaaguacgagcaguacaucaaguggcccugguacaucuggcugggcuuuaucgccggacugauugccaucgugauggucacaaucaugcuguguugcaugaccagcugcuguagcugccugaagggcuguuguagcuguggcagcugcugcaaguucgacgaggacgauucugagcccgugcugaagggcgugaaacugcacuacaccuga

SEQ ID NO: 12040 - RNA, 3822 nt, Artificial Sequence
  SARS-CoV-2/Wuhan/WIV05/2019__EPI_ISL_402128 spike protein CDS gc mod (1-1273)(I714C_Y1110C)
auguucguguuucuggugcugcugccccugguguccagccagugugugaaccugaccaccagaacacagcugccuccagccuacaccaacagcuucaccagaggcguguacuaccccgacaagguguucagauccagcgugcugcacucuacccaggaccuguuccugccuuucuucagcaacgugaccugguuccacgccauccacguguccggcaccaauggcaccaagagauucgacaaccccgugcugcccuucaacgacgggguguacuuugccagcaccgagaaguccaacaucaucagaggcuggaucuucggcaccacacuggacagcaagacccagagccugcugaucgugaacaacgccaccaacguggucaucaaagugugcgaguuccaguucugcaacgaccccuuccugggcgucuacuaccacaagaacaacaagagcuggauggaaagcgaguuccggguguacagcagcgccaacaacugcaccuucgaguacgugucccagccuuuccugauggaccuggaaggcaagcagggcaacuucaagaaccugcgcgaguucguguucaagaacaucgacggcuacuucaaaaucuacagcaagcacaccccuaucaaccucgugcgggaucugccucagggcuucucugcucuggaaccccugguggaucugcccaucggcaucaacaucacccgguuucagacacugcuggcccugcacagaagcuaccugacaccuggcgauagcagcagcggauggacagcuggugccgccgcuuacuaugugggcuaccugcagccuagaaccuuccugcugaaguacaacgagaacggcaccaucaccgacgccguggauugugcucuggauccucugagcgagacaaagugcacccugaaguccuucaccguggaaaagggcaucuaccagaccagcaacuuccgggugcagcccaccgaauccaucgugcgguuccccaauaucaccaaucugugccccuucggcgagguguucaaugccaccagauucgccucuguguacgccuggaaccggaagcggaucagcaauugcguggccgacuacuccgugcuguacaacuccgccagcuucagcaccuucaagugcuacggcguguccccuaccaagcugaacgaccugugcuucacaaacguguacgccgacagcuucgugauccggggagaugaagugcggcagauugccccuggacagacaggcaagaucgccgacuacaacuacaagcugcccgacgacuucaccggcugugugauugccuggaacagcaacaaccuggacuccaaagucggcggcaacuacaauuaccuguaccggcuguuccggaaguccaaucugaagcccuucgagcgggacaucagcaccgaaaucuaucaggccggcagcaccccuugcaacggcguggaaggcuucaacugcuacuucccacugcaguccuacggcuuucagcccacaaauggcgugggcuaucagcccuacagagugguggugcugagcuucgaacugcugcaugcuccugccacagugugcggcccuaagaaaagcaccaaucucgugaagaacaaaugcgugaacuucaacuucaacggccugaccggcaccggcgugcugacagagagcaacaagaaguuccugccauuccagcaguuuggccgggauaucgccgauaccacagacgccguuagagauccccagacacuggaaauccuggacaucaccccaugcagcuucggcggagugucugugaucaccccuggcaccaacaccagcaaucagguggcagugcuguaccaggacgugaacuguaccgaagugcccguggccauucacgccgaucagcugacaccuacauggcggguguacuccaccggcagcaauguguuucagaccagagccggcugucugaucggagccgagcacgugaacaauagcuacgagugcgacauccccaucggcgcuggcaucugugccagcuaccagacacagacaaacagccccagacgggcuagaagcguggccagccagagcaucauugccuacacaaugucucugggcgccgagaacagcguggccuacuccaacaacucuaucgcuugccccaccaacuucaccaucagcgugaccaccgagauccugccuguguccaugaccaagaccagcguggacugcaccauguacaucugcggcgauuccaccgagugcuccaaccugcugcugcaguacggcagcuucugcacccagcugaauagagcccugacagggaucgccguggaacaggacaagaacacccaagagguguucgcccaagugaagcaaaucuacaagaccccuccuaucaaggacuucggcggcuucaauuucagccagauucugcccgauccuagcaagcccagcaagcggagcuucaucgaggaccugcuguucaacaaagugacacuggccgacgccggcuucaucaagcaguauggcgauugucugggcgacauugccgccagggaucugauuugcgcccagaaguuuaacggacugacagugcugccuccucugcugaccgaugagaugaucgcccaguacacaucugcccugcuggccggcacaaucacaagcggcuggacauuuggagcuggcgccgcucugcagauccccuuugcuaugcagauggccuaccgguucaacggcaucggagugacccagaaugugcuguacgagaaccagaagcugaucgccaaccaguucaacagcgccaucggcaagauccaggacagccugagcagcacagcaagcgcccugggaaagcugcaggacguggucaaccagaaugcccaggcacugaacacccuggucaagcagcuguccuccaacuucggcgccaucagcucugugcugaacgauauccugagcagacuggacaaggucgaggccgaggugcagaucgacagacugaucacaggcagacugcagagccuccagacauacgugacccagcagcugaucagagccgccgagauuagagccucugccaaucuggccgccaccaagaugucugagugugugcugggccagagcaagagaguggacuuuugcggcaagggcuaccaccugaugagcuucccucagucugccccucacggcgugguguuucugcacgugacauaugugcccgcucaagagaagaauuucaccaccgcuccagccaucugccacgacggcaaagcccacuuuccuagagaaggcguguucguguccaacggcacccauugguucgugacacagcggaacuucugugagccccagaucaucaccaccgacaacaccuucgugucuggcaacugcgacguugugaucggcauugugaacaauaccguguacgacccucugcagcccgagcuggacagcuucaaagaggaacuggacaaguacuuuaagaaccacacaagccccgacguggaccugggcgauaucagcggaaucaaugccagcgucgugaacauccagaaagagaucgaccggcugaacgagguggccaagaaucugaacgagagccugaucgaccugcaagaacuggggaaguacgagcaguacaucaaguggcccugguacaucuggcugggcuuuaucgccggacugauugccaucgugauggucacaaucaugcuguguugcaugaccagcugcuguagcugccugaagggcuguuguagcuguggcagcugcugcaaguucgacgaggacgauucugagcccgugcugaagggcgugaaacugcacuacaccuga

SEQ ID NO: 12041 - RNA, 3822 nt, Artificial Sequence
  SARS-CoV-2/Wuhan/WIV05/2019__EPI_ISL_402128 spike protein CDS gc mod (1-1273)(P715C_P1069C)
auguucguguuucuggugcugcugccccugguguccagccagugugugaaccugaccaccagaacacagcugccuccagccuacaccaacagcuucaccagaggcguguacuaccccgacaagguguucagauccagcgugcugcacucuacccaggaccuguuccugccuuucuucagcaacgugaccugguuccacgccauccacguguccggcaccaauggcaccaagagauucgacaaccccgugcugcccuucaacgacgggguguacuuugccagcaccgagaaguccaacaucaucagaggcuggaucuucggcaccacacuggacagcaagacccagagccugcugaucgugaacaacgccaccaacguggucaucaaagugugcgaguuccaguucugcaacgaccccuuccugggcgucuacuaccacaagaacaacaagagcuggauggaaagcgaguuccggguguacagcagcgccaacaacugcaccuucgaguacgugucccagccuuuccugauggaccuggaaggcaagcagggcaacuucaagaaccugcgcgaguucguguucaagaacaucgacggcuacuucaaaaucuacagcaagcacaccccuaucaaccucgugcgggaucugccucagggcuucucugcucuggaaccccugguggaucugcccaucggcaucaacaucacccgguuucagacacugcuggcccugcacagaagcuaccugacaccuggcgauagcagcagcggauggacagcuggugccgccgcuuacuaugugggcuaccugcagccuagaaccuuccugcugaaguacaacgagaacggcaccaucaccgacgccguggauugugcucuggauccucugagcgagacaaagugcacccugaaguccuucaccguggaaaagggcaucuaccagaccagcaacuuccgggugcagcccaccgaauccaucgugcgguuccccaauaucaccaaucugugccccuucggcgagguguucaaugccaccagauucgccucuguguacgccuggaaccggaagcggaucagcaauugcguggccgacuacuccgugcuguacaacuccgccagcuucagcaccuucaagugcuacggcguguccccuaccaagcugaacgaccugugcuucacaaacguguacgccgacagcuucgugauccggggagaugaagugcggcagauugccccuggacagacaggcaagaucgccgacuacaacuacaagcugcccgacgacuucaccggcugugugauugccuggaacagcaacaaccuggacuccaaagucggcggcaacuacaauuaccuguaccggcuguuccggaaguccaaucugaagcccuucgagcgggacaucagcaccgaaaucuaucaggccggcagcaccccuugcaacggcguggaaggcuucaacugcuacuucccacugcaguccuacggcuuucagcccacaaauggcgugggcuaucagcccuacagagugguggugcugagcuucgaacugcugcaugcuccugccacagugugcggcccuaagaaaagcaccaaucucgugaagaacaaaugcgugaacuucaacuucaacggccugaccggcaccggcgugcugacagagagcaacaagaaguuccugccauuccagcaguuuggccgggauaucgccgauaccacagacgccguuagagauccccagacacuggaaauccuggacaucaccccaugcagcuucggcggagugucugugaucaccccuggcaccaacaccagcaaucagguggcagugcuguaccaggacgugaacuguaccgaagugcccguggccauucacgccgaucagcugacaccuacauggcggguguacuccaccggcagcaauguguuucagaccagagccggcugucugaucggagccgagcacgugaacaauagcuacgagugcgacauccccaucggcgcuggcaucugugccagcuaccagacacagacaaacagccccagacgggcuagaagcguggccagccagagcaucauugccuacacaaugucucugggcgccgagaacagcguggccuacuccaacaacucuaucgcuaucugcaccaacuucaccaucagcgugaccaccgagauccugccuguguccaugaccaagaccagcguggacugcaccauguacaucugcggcgauuccaccgagugcuccaaccugcugcugcaguacggcagcuucugcacccagcugaauagagcccugacagggaucgccguggaacaggacaagaacacccaagagguguucgcccaagugaagcaaaucuacaagaccccuccuaucaaggacuucggcggcuucaauuucagccagauucugcccgauccuagcaagcccagcaagcggagcuucaucgaggaccugcuguucaacaaagugacacuggccgacgccggcuucaucaagcaguauggcgauugucugggcgacauugccgccagggaucugauuugcgcccagaaguuuaacggacugacagugcugccuccucugcugaccgaugagaugaucgcccaguacacaucugcccugcuggccggcacaaucacaagcggcuggacauuuggagcuggcgccgcucugcagauccccuuugcuaugcagauggccuaccgguucaacggcaucggagugacccagaaugugcuguacgagaaccagaagcugaucgccaaccaguucaacagcgccaucggcaagauccaggacagccugagcagcacagcaagcgcccugggaaagcugcaggacguggucaaccagaaugcccaggcacugaacacccuggucaagcagcuguccuccaacuucggcgccaucagcucugugcugaacgauauccugagcagacuggacaaggucgaggccgaggugcagaucgacagacugaucacaggcagacugcagagccuccagacauacgugacccagcagcugaucagagccgccgagauuagagccucugccaaucuggccgccaccaagaugucugagugugugcugggccagagcaagagaguggacuuuugcggcaagggcuaccaccugaugagcuucccucagucugccccucacggcgugguguuucugcacgugacauaugugugugcucaagagaagaauuucaccaccgcuccagccaucugccacgacggcaaagcccacuuuccuagagaaggcguguucguguccaacggcacccauugguucgugacacagcggaacuucuacgagccccagaucaucaccaccgacaacaccuucgugucuggcaacugcgacguugugaucggcauugugaacaauaccguguacgacccucugcagcccgagcuggacagcuucaaagaggaacuggacaaguacuuuaagaaccacacaagccccgacguggaccugggcgauaucagcggaaucaaugccagcgucgugaacauccagaaagagaucgaccggcugaacgagguggccaagaaucugaacgagagccugaucgaccugcaagaacuggggaaguacgagcaguacaucaaguggcccugguacaucuggcugggcuuuaucgccggacugauugccaucgugauggucacaaucaugcuguguugcaugaccagcugcuguagcugccugaagggcuguuguagcuguggcagcugcugcaaguucgacgaggacgauucugagcccgugcugaagggcgugaaacugcacuacaccuga

SEQ ID NO: 12042 - RNA, 3822 nt, Artificial Sequence
  SARS-CoV-2/Wuhan/WIV05/2019__EPI_ISL_402128 spike protein CDS gc mod (1-1273)(G889C_L1034C)
auguucguguuucuggugcugcugccccugguguccagccagugugugaaccugaccaccagaacacagcugccuccagccuacaccaacagcuucaccagaggcguguacuaccccgacaagguguucagauccagcgugcugcacucuacccaggaccuguuccugccuuucuucagcaacgugaccugguuccacgccauccacguguccggcaccaauggcaccaagagauucgacaaccccgugcugcccuucaacgacgggguguacuuugccagcaccgagaaguccaacaucaucagaggcuggaucuucggcaccacacuggacagcaagacccagagccugcugaucgugaacaacgccaccaacguggucaucaaagugugcgaguuccaguucugcaacgaccccuuccugggcgucuacuaccacaagaacaacaagagcuggauggaaagcgaguuccggguguacagcagcgccaacaacugcaccuucgaguacgugucccagccuuuccugauggaccuggaaggcaagcagggcaacuucaagaaccugcgcgaguucguguucaagaacaucgacggcuacuucaaaaucuacagcaagcacaccccuaucaaccucgugcgggaucugccucagggcuucucugcucuggaaccccugguggaucugcccaucggcaucaacaucacccgguuucagacacugcuggcccugcacagaagcuaccugacaccuggcgauagcagcagcggauggacagcuggugccgccgcuuacuaugugggcuaccugcagccuagaaccuuccugcugaaguacaacgagaacggcaccaucaccgacgccguggauugugcucuggauccucugagcgagacaaagugcacccugaaguccuucaccguggaaaagggcaucuaccagaccagcaacuuccgggugcagcccaccgaauccaucgugcgguuccccaauaucaccaaucugugccccuucggcgagguguucaaugccaccagauucgccucuguguacgccuggaaccggaagcggaucagcaauugcguggccgacuacuccgugcuguacaacuccgccagcuucagcaccuucaagugcuacggcguguccccuaccaagcugaacgaccugugcuucacaaacguguacgccgacagcuucgugauccggggagaugaagugcggcagauugccccuggacagacaggcaagaucgccgacuacaacuacaagcugcccgacgacuucaccggcugugugauugccuggaacagcaacaaccuggacuccaaagucggcggcaacuacaauuaccuguaccggcuguuccggaaguccaaucugaagcccuucgagcgggacaucagcaccgaaaucuaucaggccggcagcaccccuugcaacggcguggaaggcuucaacugcuacuucccacugcaguccuacggcuuucagcccacaaauggcgugggcuaucagcccuacagagugguggugcugagcuucgaacugcugcaugcuccugccacagugugcggcccuaagaaaagcaccaaucucgugaagaacaaaugcgugaacuucaacuucaacggccugaccggcaccggcgugcugacagagagcaacaagaaguuccugccauuccagcaguuuggccgggauaucgccgauaccacagacgccguuagagauccccagacacuggaaauccuggacaucaccccaugcagcuucggcggagugucugugaucaccccuggcaccaacaccagcaaucagguggcagugcuguaccaggacgugaacuguaccgaagugcccguggccauucacgccgaucagcugacaccuacauggcggguguacuccaccggcagcaauguguuucagaccagagccggcugucugaucggagccgagcacgugaacaauagcuacgagugcgacauccccaucggcgcuggcaucugugccagcuaccagacacagacaaacagccccagacgggcuagaagcguggccagccagagcaucauugccuacacaaugucucugggcgccgagaacagcguggccuacuccaacaacucuaucgcuauccccaccaacuucaccaucagcgugaccaccgagauccugccuguguccaugaccaagaccagcguggacugcaccauguacaucugcggcgauuccaccgagugcuccaaccugcugcugcaguacggcagcuucugcacccagcugaauagagcccugacagggaucgccguggaacaggacaagaacacccaagagguguucgcccaagugaagcaaaucuacaagaccccuccuaucaaggacuucggcggcuucaauuucagccagauucugcccgauccuagcaagcccagcaagcggagcuucaucgaggaccugcuguucaacaaagugacacuggccgacgccggcuucaucaagcaguauggcgauugucugggcgacauugccgccagggaucugauuugcgcccagaaguuuaacggacugacagugcugccuccucugcugaccgaugagaugaucgcccaguacacaucugcccugcuggccggcacaaucacaagcggcuggacauuuugcgcuggcgccgcucugcagauccccuuugcuaugcagauggccuaccgguucaacggcaucggagugacccagaaugugcuguacgagaaccagaagcugaucgccaaccaguucaacagcgccaucggcaagauccaggacagccugagcagcacagcaagcgcccugggaaagcugcaggacguggucaaccagaaugcccaggcacugaacacccuggucaagcagcuguccuccaacuucggcgccaucagcucugugcugaacgauauccugagcagacuggacaaggucgaggccgaggugcagaucgacagacugaucacaggcagacugcagagccuccagacauacgugacccagcagcugaucagagccgccgagauuagagccucugccaaucuggccgccaccaagaugucugaguguguguguggccagagcaagagaguggacuuuugcggcaagggcuaccaccugaugagcuucccucagucugccccucacggcgugguguuucugcacgugacauaugugcccgcucaagagaagaauuucaccaccgcuccagccaucugccacgacggcaaagcccacuuuccuagagaaggcguguucguguccaacggcacccauugguucgugacacagcggaacuucuacgagccccagaucaucaccaccgacaacaccuucgugucuggcaacugcgacguugugaucggcauugugaacaauaccguguacgacccucugcagcccgagcuggacagcuucaaagaggaacuggacaaguacuuuaagaaccacacaagccccgacguggaccugggcgauaucagcggaaucaaugccagcgucgugaacauccagaaagagaucgaccggcugaacgagguggccaagaaucugaacgagagccugaucgaccugcaagaacuggggaaguacgagcaguacaucaaguggcccugguacaucuggcugggcuuuaucgccggacugauugccaucgugauggucacaaucaugcuguguugcaugaccagcugcuguagcugccugaagggcuguuguagcuguggcagcugcugcaaguucgacgaggacgauucugagcccgugcugaagggcgugaaacugcacuacaccuga

SEQ ID NO: 12043 - RNA, 3822 nt, Artificial Sequence
  SARS-CoV-2/Wuhan/WIV05/2019__EPI_ISL_402128 spike protein CDS gc mod (1-1273)(I909C_Y1047C)
auguucguguuucuggugcugcugccccugguguccagccagugugugaaccugaccaccagaacacagcugccuccagccuacaccaacagcuucaccagaggcguguacuaccccgacaagguguucagauccagcgugcugcacucuacccaggaccuguuccugccuuucuucagcaacgugaccugguuccacgccauccacguguccggcaccaauggcaccaagagauucgacaaccccgugcugcccuucaacgacgggguguacuuugccagcaccgagaaguccaacaucaucagaggcuggaucuucggcaccacacuggacagcaagacccagagccugcugaucgugaacaacgccaccaacguggucaucaaagugugcgaguuccaguucugcaacgaccccuuccugggcgucuacuaccacaagaacaacaagagcuggauggaaagcgaguuccggguguacagcagcgccaacaacugcaccuucgaguacgugucccagccuuuccugauggaccuggaaggcaagcagggcaacuucaagaaccugcgcgaguucguguucaagaacaucgacggcuacuucaaaaucuacagcaagcacaccccuaucaaccucgugcgggaucugccucagggcuucucugcucuggaaccccugguggaucugcccaucggcaucaacaucacccgguuucagacacugcuggcccugcacagaagcuaccugacaccuggcgauagcagcagcggauggacagcuggugccgccgcuuacuaugugggcuaccugcagccuagaaccuuccugcugaaguacaacgagaacggcaccaucaccgacgccguggauugugcucuggauccucugagcgagacaaagugcacccugaaguccuucaccguggaaaagggcaucuaccagaccagcaacuuccgggugcagcccaccgaauccaucgugcgguuccccaauaucaccaaucugugccccuucggcgagguguucaaugccaccagauucgccucuguguacgccuggaaccggaagcggaucagcaauugcguggccgacuacuccgugcuguacaacuccgccagcuucagcaccuucaagugcuacggcguguccccuaccaagcugaacgaccugugcuucacaaacguguacgccgacagcuucgugauccggggagaugaagugcggcagauugccccuggacagacaggcaagaucgccgacuacaacuacaagcugcccgacgacuucaccggcugugugauugccuggaacagcaacaaccuggacuccaaagucggcggcaacuacaauuaccuguaccggcuguuccggaaguccaaucugaagcccuucgagcgggacaucagcaccgaaaucuaucaggccggcagcaccccuugcaacggcguggaaggcuucaacugcuacuucccacugcaguccuacggcuuucagcccacaaauggcgugggcuaucagcccuacagagugguggugcugagcuucgaacugcugcaugcuccugccacagugugcggcccuaagaaaagcaccaaucucgugaagaacaaaugcgugaacuucaacuucaacggccugaccggcaccggcgugcugacagagagcaacaagaaguuccugccauuccagcaguuuggccgggauaucgccgauaccacagacgccguuagagauccccagacacuggaaauccuggacaucaccccaugcagcuucggcggagugucugugaucaccccuggcaccaacaccagcaaucagguggcagugcuguaccaggacgugaacuguaccgaagugcccguggccauucacgccgaucagcugacaccuacauggcggguguacuccaccggcagcaauguguuucagaccagagccggcugucugaucggagccgagcacgugaacaauagcuacgagugcgacauccccaucggcgcuggcaucugugccagcuaccagacacagacaaacagccccagacgggcuagaagcguggccagccagagcaucauugccuacacaaugucucugggcgccgagaacagcguggccuacuccaacaacucuaucgcuauccccaccaacuucaccaucagcgugaccaccgagauccugccuguguccaugaccaagaccagcguggacugcaccauguacaucugcggcgauuccaccgagugcuccaaccugcugcugcaguacggcagcuucugcacccagcugaauagagcccugacagggaucgccguggaacaggacaagaacacccaagagguguucgcccaagugaagcaaaucuacaagaccccuccuaucaaggacuucggcggcuucaauuucagccagauucugcccgauccuagcaagcccagcaagcggagcuucaucgaggaccugcuguucaacaaagugacacuggccgacgccggcuucaucaagcaguauggcgauugucugggcgacauugccgccagggaucugauuugcgcccagaaguuuaacggacugacagugcugccuccucugcugaccgaugagaugaucgcccaguacacaucugcccugcuggccggcacaaucacaagcggcuggacauuuggagcuggcgccgcucugcagauccccuuugcuaugcagauggccuaccgguucaacggcugcggagugacccagaaugugcuguacgagaaccagaagcugaucgccaaccaguucaacagcgccaucggcaagauccaggacagccugagcagcacagcaagcgcccugggaaagcugcaggacguggucaaccagaaugcccaggcacugaacacccuggucaagcagcuguccuccaacuucggcgccaucagcucugugcugaacgauauccugagcagacuggacaaggucgaggccgaggugcagaucgacagacugaucacaggcagacugcagagccuccagacauacgugacccagcagcugaucagagccgccgagauuagagccucugccaaucuggccgccaccaagaugucugagugugugcugggccagagcaagagaguggacuuuugcggcaagggcugucaccugaugagcuucccucagucugccccucacggcgugguguuucugcacgugacauaugugcccgcucaagagaagaauuucaccaccgcuccagccaucugccacgacggcaaagcccacuuuccuagagaaggcguguucguguccaacggcacccauugguucgugacacagcggaacuucuacgagccccagaucaucaccaccgacaacaccuucgugucuggcaacugcgacguugugaucggcauugugaacaauaccguguacgacccucugcagcccgagcuggacagcuucaaagaggaacuggacaaguacuuuaagaaccacacaagccccgacguggaccugggcgauaucagcggaaucaaugccagcgucgugaacauccagaaagagaucgaccggcugaacgagguggccaagaaucugaacgagagccugaucgaccugcaagaacuggggaaguacgagcaguacaucaaguggcccugguacaucuggcugggcuuuaucgccggacugauugccaucgugauggucacaaucaugcuguguugcaugaccagcugcuguagcugccugaagggcuguuguagcuguggcagcugcugcaaguucgacgaggacgauucugagcccgugcugaagggcgugaaacugcacuacaccuga

SEQ ID NO: 12044 - RNA, 3822 nt, Artificial Sequence
  SARS-CoV-2/Wuhan/WIV05/2019__EPI_ISL_402128 spike protein CDS gc mod (1-1273)(Q965C_S1003C)
auguucguguuucuggugcugcugccccugguguccagccagugugugaaccugaccaccagaacacagcugccuccagccuacaccaacagcuucaccagaggcguguacuaccccgacaagguguucagauccagcgugcugcacucuacccaggaccuguuccugccuuucuucagcaacgugaccugguuccacgccauccacguguccggcaccaauggcaccaagagauucgacaaccccgugcugcccuucaacgacgggguguacuuugccagcaccgagaaguccaacaucaucagaggcuggaucuucggcaccacacuggacagcaagacccagagccugcugaucgugaacaacgccaccaacguggucaucaaagugugcgaguuccaguucugcaacgaccccuuccugggcgucuacuaccacaagaacaacaagagcuggauggaaagcgaguuccggguguacagcagcgccaacaacugcaccuucgaguacgugucccagccuuuccugauggaccuggaaggcaagcagggcaacuucaagaaccugcgcgaguucguguucaagaacaucgacggcuacuucaaaaucuacagcaagcacaccccuaucaaccucgugcgggaucugccucagggcuucucugcucuggaaccccugguggaucugcccaucggcaucaacaucacccgguuucagacacugcuggcccugcacagaagcuaccugacaccuggcgauagcagcagcggauggacagcuggugccgccgcuuacuaugugggcuaccugcagccuagaaccuuccugcugaaguacaacgagaacggcaccaucaccgacgccguggauugugcucuggauccucugagcgagacaaagugcacccugaaguccuucaccguggaaaagggcaucuaccagaccagcaacuuccgggugcagcccaccgaauccaucgugcgguuccccaauaucaccaaucugugccccuucggcgagguguucaaugccaccagauucgccucuguguacgccuggaaccggaagcggaucagcaauugcguggccgacuacuccgugcuguacaacuccgccagcuucagcaccuucaagugcuacggcguguccccuaccaagcugaacgaccugugcuucacaaacguguacgccgacagcuucgugauccggggagaugaagugcggcagauugccccuggacagacaggcaagaucgccgacuacaacuacaagcugcccgacgacuucaccggcugugugauugccuggaacagcaacaaccuggacuccaaagucggcggcaacuacaauuaccuguaccggcuguuccggaaguccaaucugaagcccuucgagcgggacaucagcaccgaaaucuaucaggccggcagcaccccuugcaacggcguggaaggcuucaacugcuacuucccacugcaguccuacggcuuucagcccacaaauggcgugggcuaucagcccuacagagugguggugcugagcuucgaacugcugcaugcuccugccacagugugcggcccuaagaaaagcaccaaucucgugaagaacaaaugcgugaacuucaacuucaacggccugaccggcaccggcgugcugacagagagcaacaagaaguuccugccauuccagcaguuuggccgggauaucgccgauaccacagacgccguuagagauccccagacacuggaaauccuggacaucaccccaugcagcuucggcggagugucugugaucaccccuggcaccaacaccagcaaucagguggcagugcuguaccaggacgugaacuguaccgaagugcccguggccauucacgccgaucagcugacaccuacauggcggguguacuccaccggcagcaauguguuucagaccagagccggcugucugaucggagccgagcacgugaacaauagcuacgagugcgacauccccaucggcgcuggcaucugugccagcuaccagacacagacaaacagccccagacgggcuagaagcguggccagccagagcaucauugccuacacaaugucucugggcgccgagaacagcguggccuacuccaacaacucuaucgcuauccccaccaacuucaccaucagcgugaccaccgagauccugccuguguccaugaccaagaccagcguggacugcaccauguacaucugcggcgauuccaccgagugcuccaaccugcugcugcaguacggcagcuucugcacccagcugaauagagcccugacagggaucgccguggaacaggacaagaacacccaagagguguucgcccaagugaagcaaaucuacaagaccccuccuaucaaggacuucggcggcuucaauuucagccagauucugcccgauccuagcaagcccagcaagcggagcuucaucgaggaccugcuguucaacaaagugacacuggccgacgccggcuucaucaagcaguauggcgauugucugggcgacauugccgccagggaucugauuugcgcccagaaguuuaacggacugacagugcugccuccucugcugaccgaugagaugaucgcccaguacacaucugcccugcuggccggcacaaucacaagcggcuggacauuuggagcuggcgccgcucugcagauccccuuugcuaugcagauggccuaccgguucaacggcaucggagugacccagaaugugcuguacgagaaccagaagcugaucgccaaccaguucaacagcgccaucggcaagauccaggacagccugagcagcacagcaagcgcccugggaaagcugcaggacguggucaaccagaaugcccaggcacugaacacccuggucaagugccuguccuccaacuucggcgccaucagcucugugcugaacgauauccugagcagacuggacaaggucgaggccgaggugcagaucgacagacugaucacaggcagacugcagugucuccagacauacgugacccagcagcugaucagagccgccgagauuagagccucugccaaucuggccgccaccaagaugucugagugugugcugggccagagcaagagaguggacuuuugcggcaagggcuaccaccugaugagcuucccucagucugccccucacggcgugguguuucugcacgugacauaugugcccgcucaagagaagaauuucaccaccgcuccagccaucugccacgacggcaaagcccacuuuccuagagaaggcguguucguguccaacggcacccauugguucgugacacagcggaacuucuacgagccccagaucaucaccaccgacaacaccuucgugucuggcaacugcgacguugugaucggcauugugaacaauaccguguacgacccucugcagcccgagcuggacagcuucaaagaggaacuggacaaguacuuuaagaaccacacaagccccgacguggaccugggcgauaucagcggaaucaaugccagcgucgugaacauccagaaagagaucgaccggcugaacgagguggccaagaaucugaacgagagccugaucgaccugcaagaacuggggaaguacgagcaguacaucaaguggcccugguacaucuggcugggcuuuaucgccggacugauugccaucgugauggucacaaucaugcuguguugcaugaccagcugcuguagcugccugaagggcuguuguagcuguggcagcugcugcaaguucgacgaggacgauucugagcccgugcugaagggcgugaaacugcacuacaccuga

SEQ ID NO: 12045 - RNA, 3822 nt, Artificial Sequence
  SARS-CoV-2/Wuhan/WIV05/2019__EPI_ISL_402128 spike protein CDS gc mod (1-1273)(F970C_G999C)
auguucguguuucuggugcugcugccccugguguccagccagugugugaaccugaccaccagaacacagcugccuccagccuacaccaacagcuucaccagaggcguguacuaccccgacaagguguucagauccagcgugcugcacucuacccaggaccuguuccugccuuucuucagcaacgugaccugguuccacgccauccacguguccggcaccaauggcaccaagagauucgacaaccccgugcugcccuucaacgacgggguguacuuugccagcaccgagaaguccaacaucaucagaggcuggaucuucggcaccacacuggacagcaagacccagagccugcugaucgugaacaacgccaccaacguggucaucaaagugugcgaguuccaguucugcaacgaccccuuccugggcgucuacuaccacaagaacaacaagagcuggauggaaagcgaguuccggguguacagcagcgccaacaacugcaccuucgaguacgugucccagccuuuccugauggaccuggaaggcaagcagggcaacuucaagaaccugcgcgaguucguguucaagaacaucgacggcuacuucaaaaucuacagcaagcacaccccuaucaaccucgugcgggaucugccucagggcuucucugcucuggaaccccugguggaucugcccaucggcaucaacaucacccgguuucagacacugcuggcccugcacagaagcuaccugacaccuggcgauagcagcagcggauggacagcuggugccgccgcuuacuaugugggcuaccugcagccuagaaccuuccugcugaaguacaacgagaacggcaccaucaccgacgccguggauugugcucuggauccucugagcgagacaaagugcacccugaaguccuucaccguggaaaagggcaucuaccagaccagcaacuuccgggugcagcccaccgaauccaucgugcgguuccccaauaucaccaaucugugccccuucggcgagguguucaaugccaccagauucgccucuguguacgccuggaaccggaagcggaucagcaauugcguggccgacuacuccgugcuguacaacuccgccagcuucagcaccuucaagugcuacggcguguccccuaccaagcugaacgaccugugcuucacaaacguguacgccgacagcuucgugauccggggagaugaagugcggcagauugccccuggacagacaggcaagaucgccgacuacaacuacaagcugcccgacgacuucaccggcugugugauugccuggaacagcaacaaccuggacuccaaagucggcggcaacuacaauuaccuguaccggcuguuccggaaguccaaucugaagcccuucgagcgggacaucagcaccgaaaucuaucaggccggcagcaccccuugcaacggcguggaaggcuucaacugcuacuucccacugcaguccuacggcuuucagcccacaaauggcgugggcuaucagcccuacagagugguggugcugagcuucgaacugcugcaugcuccugccacagugugcggcccuaagaaaagcaccaaucucgugaagaacaaaugcgugaacuucaacuucaacggccugaccggcaccggcgugcugacagagagcaacaagaaguuccugccauuccagcaguuuggccgggauaucgccgauaccacagacgccguuagagauccccagacacuggaaauccuggacaucaccccaugcagcuucggcggagugucugugaucaccccuggcaccaacaccagcaaucagguggcagugcuguaccaggacgugaacuguaccgaagugcccguggccauucacgccgaucagcugacaccuacauggcggguguacuccaccggcagcaauguguuucagaccagagccggcugucugaucggagccgagcacgugaacaauagcuacgagugcgacauccccaucggcgcuggcaucugugccagcuaccagacacagacaaacagccccagacgggcuagaagcguggccagccagagcaucauugccuacacaaugucucugggcgccgagaacagcguggccuacuccaacaacucuaucgcuauccccaccaacuucaccaucagcgugaccaccgagauccugccuguguccaugaccaagaccagcguggacugcaccauguacaucugcggcgauuccaccgagugcuccaaccugcugcugcaguacggcagcuucugcacccagcugaauagagcccugacagggaucgccguggaacaggacaagaacacccaagagguguucgcccaagugaagcaaaucuacaagaccccuccuaucaaggacuucggcggcuucaauuucagccagauucugcccgauccuagcaagcccagcaagcggagcuucaucgaggaccugcuguucaacaaagugacacuggccgacgccggcuucaucaagcaguauggcgauugucugggcgacauugccgccagggaucugauuugcgcccagaaguuuaacggacugacagugcugccuccucugcugaccgaugagaugaucgcccaguacacaucugcccugcuggccggcacaaucacaagcggcuggacauuuggagcuggcgccgcucugcagauccccuuugcuaugcagauggccuaccgguucaacggcaucggagugacccagaaugugcuguacgagaaccagaagcugaucgccaaccaguucaacagcgccaucggcaagauccaggacagccugagcagcacagcaagcgcccugggaaagcugcaggacguggucaaccagaaugcccaggcacugaacacccuggucaagcagcuguccuccaacugcggcgccaucagcucugugcugaacgauauccugagcagacuggacaaggucgaggccgaggugcagaucgacagacugaucacauguagacugcagagccuccagacauacgugacccagcagcugaucagagccgccgagauuagagccucugccaaucuggccgccaccaagaugucugagugugugcugggccagagcaagagaguggacuuuugcggcaagggcuaccaccugaugagcuucccucagucugccccucacggcgugguguuucugcacgugacauaugugcccgcucaagagaagaauuucaccaccgcuccagccaucugccacgacggcaaagcccacuuuccuagagaaggcguguucguguccaacggcacccauugguucgugacacagcggaacuucuacgagccccagaucaucaccaccgacaacaccuucgugucuggcaacugcgacguugugaucggcauugugaacaauaccguguacgacccucugcagcccgagcuggacagcuucaaagaggaacuggacaaguacuuuaagaaccacacaagccccgacguggaccugggcgauaucagcggaaucaaugccagcgucgugaacauccagaaagagaucgaccggcugaacgagguggccaagaaucugaacgagagccugaucgaccugcaagaacuggggaaguacgagcaguacaucaaguggcccugguacaucuggcugggcuuuaucgccggacugauugccaucgugauggucacaaucaugcuguguugcaugaccagcugcuguagcugccugaagggcuguuguagcuguggcagcugcugcaaguucgacgaggacgauucugagcccgugcugaagggcgugaaacugcacuacaccuga

SEQ ID NO: 12046 - RNA, 3822 nt, Artificial Sequence
  SARS-CoV-2/Wuhan/WIV05/2019__EPI_ISL_402128 spike protein CDS gc mod (1-1273)(A972C_R995C)
auguucguguuucuggugcugcugccccugguguccagccagugugugaaccugaccaccagaacacagcugccuccagccuacaccaacagcuucaccagaggcguguacuaccccgacaagguguucagauccagcgugcugcacucuacccaggaccuguuccugccuuucuucagcaacgugaccugguuccacgccauccacguguccggcaccaauggcaccaagagauucgacaaccccgugcugcccuucaacgacgggguguacuuugccagcaccgagaaguccaacaucaucagaggcuggaucuucggcaccacacuggacagcaagacccagagccugcugaucgugaacaacgccaccaacguggucaucaaagugugcgaguuccaguucugcaacgaccccuuccugggcgucuacuaccacaagaacaacaagagcuggauggaaagcgaguuccggguguacagcagcgccaacaacugcaccuucgaguacgugucccagccuuuccugauggaccuggaaggcaagcagggcaacuucaagaaccugcgcgaguucguguucaagaacaucgacggcuacuucaaaaucuacagcaagcacaccccuaucaaccucgugcgggaucugccucagggcuucucugcucuggaaccccugguggaucugcccaucggcaucaacaucacccgguuucagacacugcuggcccugcacagaagcuaccugacaccuggcgauagcagcagcggauggacagcuggugccgccgcuuacuaugugggcuaccugcagccuagaaccuuccugcugaaguacaacgagaacggcaccaucaccgacgccguggauugugcucuggauccucugagcgagacaaagugcacccugaaguccuucaccguggaaaagggcaucuaccagaccagcaacuuccgggugcagcccaccgaauccaucgugcgguuccccaauaucaccaaucugugccccuucggcgagguguucaaugccaccagauucgccucuguguacgccuggaaccggaagcggaucagcaauugcguggccgacuacuccgugcuguacaacuccgccagcuucagcaccuucaagugcuacggcguguccccuaccaagcugaacgaccugugcuucacaaacguguacgccgacagcuucgugauccggggagaugaagugcggcagauugccccuggacagacaggcaagaucgccgacuacaacuacaagcugcccgacgacuucaccggcugugugauugccuggaacagcaacaaccuggacuccaaagucggcggcaacuacaauuaccuguaccggcuguuccggaaguccaaucugaagcccuucgagcgggacaucagcaccgaaaucuaucaggccggcagcaccccuugcaacggcguggaaggcuucaacugcuacuucccacugcaguccuacggcuuucagcccacaaauggcgugggcuaucagcccuacagagugguggugcugagcuucgaacugcugcaugcuccugccacagugugcggcccuaagaaaagcaccaaucucgugaagaacaaaugcgugaacuucaacuucaacggccugaccggcaccggcgugcugacagagagcaacaagaaguuccugccauuccagcaguuuggccgggauaucgccgauaccacagacgccguuagagauccccagacacuggaaauccuggacaucaccccaugcagcuucggcggagugucugugaucaccccuggcaccaacaccagcaaucagguggcagugcuguaccaggacgugaacuguaccgaagugcccguggccauucacgccgaucagcugacaccuacauggcggguguacuccaccggcagcaauguguuucagaccagagccggcugucugaucggagccgagcacgugaacaauagcuacgagugcgacauccccaucggcgcuggcaucugugccagcuaccagacacagacaaacagccccagacgggcuagaagcguggccagccagagcaucauugccuacacaaugucucugggcgccgagaacagcguggccuacuccaacaacucuaucgcuauccccaccaacuucaccaucagcgugaccaccgagauccugccuguguccaugaccaagaccagcguggacugcaccauguacaucugcggcgauuccaccgagugcuccaaccugcugcugcaguacggcagcuucugcacccagcugaauagagcccugacagggaucgccguggaacaggacaagaacacccaagagguguucgcccaagugaagcaaaucuacaagaccccuccuaucaaggacuucggcggcuucaauuucagccagauucugcccgauccuagcaagcccagcaagcggagcuucaucgaggaccugcuguucaacaaagugacacuggccgacgccggcuucaucaagcaguauggcgauugucugggcgacauugccgccagggaucugauuugcgcccagaaguuuaacggacugacagugcugccuccucugcugaccgaugagaugaucgcccaguacacaucugcccugcuggccggcacaaucacaagcggcuggacauuuggagcuggcgccgcucugcagauccccuuugcuaugcagauggccuaccgguucaacggcaucggagugacccagaaugugcuguacgagaaccagaagcugaucgccaaccaguucaacagcgccaucggcaagauccaggacagccugagcagcacagcaagcgcccugggaaagcugcaggacguggucaaccagaaugcccaggcacugaacacccuggucaagcagcuguccuccaacuucggcugcaucagcucugugcugaacgauauccugagcagacuggacaaggucgaggccgaggugcagaucgacugucugaucacaggcagacugcagagccuccagacauacgugacccagcagcugaucagagccgccgagauuagagccucugccaaucuggccgccaccaagaugucugagugugugcugggccagagcaagagaguggacuuuugcggcaagggcuaccaccugaugagcuucccucagucugccccucacggcgugguguuucugcacgugacauaugugcccgcucaagagaagaauuucaccaccgcuccagccaucugccacgacggcaaagcccacuuuccuagagaaggcguguucguguccaacggcacccauugguucgugacacagcggaacuucuacgagccccagaucaucaccaccgacaacaccuucgugucuggcaacugcgacguugugaucggcauugugaacaauaccguguacgacccucugcagcccgagcuggacagcuucaaagaggaacuggacaaguacuuuaagaaccacacaagccccgacguggaccugggcgauaucagcggaaucaaugccagcgucgugaacauccagaaagagaucgaccggcugaacgagguggccaagaaucugaacgagagccugaucgaccugcaagaacuggggaaguacgagcaguacaucaaguggcccugguacaucuggcugggcuuuaucgccggacugauugccaucgugauggucacaaucaugcuguguugcaugaccagcugcuguagcugccugaagggcuguuguagcuguggcagcugcugcaaguucgacgaggacgauucugagcccgugcugaagggcgugaaacugcacuacaccuga

SEQ ID NO: 12047 - RNA, 3822 nt, Artificial Sequence
  SARS-CoV-2/Wuhan/WIV05/2019__EPI_ISL_402128 spike protein CDS gc mod (1-1273)(A890C_V1040C)
auguucguguuucuggugcugcugccccugguguccagccagugugugaaccugaccaccagaacacagcugccuccagccuacaccaacagcuucaccagaggcguguacuaccccgacaagguguucagauccagcgugcugcacucuacccaggaccuguuccugccuuucuucagcaacgugaccugguuccacgccauccacguguccggcaccaauggcaccaagagauucgacaaccccgugcugcccuucaacgacgggguguacuuugccagcaccgagaaguccaacaucaucagaggcuggaucuucggcaccacacuggacagcaagacccagagccugcugaucgugaacaacgccaccaacguggucaucaaagugugcgaguuccaguucugcaacgaccccuuccugggcgucuacuaccacaagaacaacaagagcuggauggaaagcgaguuccggguguacagcagcgccaacaacugcaccuucgaguacgugucccagccuuuccugauggaccuggaaggcaagcagggcaacuucaagaaccugcgcgaguucguguucaagaacaucgacggcuacuucaaaaucuacagcaagcacaccccuaucaaccucgugcgggaucugccucagggcuucucugcucuggaaccccugguggaucugcccaucggcaucaacaucacccgguuucagacacugcuggcccugcacagaagcuaccugacaccuggcgauagcagcagcggauggacagcuggugccgccgcuuacuaugugggcuaccugcagccuagaaccuuccugcugaaguacaacgagaacggcaccaucaccgacgccguggauugugcucuggauccucugagcgagacaaagugcacccugaaguccuucaccguggaaaagggcaucuaccagaccagcaacuuccgggugcagcccaccgaauccaucgugcgguuccccaauaucaccaaucugugccccuucggcgagguguucaaugccaccagauucgccucuguguacgccuggaaccggaagcggaucagcaauugcguggccgacuacuccgugcuguacaacuccgccagcuucagcaccuucaagugcuacggcguguccccuaccaagcugaacgaccugugcuucacaaacguguacgccgacagcuucgugauccggggagaugaagugcggcagauugccccuggacagacaggcaagaucgccgacuacaacuacaagcugcccgacgacuucaccggcugugugauugccuggaacagcaacaaccuggacuccaaagucggcggcaacuacaauuaccuguaccggcuguuccggaaguccaaucugaagcccuucgagcgggacaucagcaccgaaaucuaucaggccggcagcaccccuugcaacggcguggaaggcuucaacugcuacuucccacugcaguccuacggcuuucagcccacaaauggcgugggcuaucagcccuacagagugguggugcugagcuucgaacugcugcaugcuccugccacagugugcggcccuaagaaaagcaccaaucucgugaagaacaaaugcgugaacuucaacuucaacggccugaccggcaccggcgugcugacagagagcaacaagaaguuccugccauuccagcaguuuggccgggauaucgccgauaccacagacgccguuagagauccccagacacuggaaauccuggacaucaccccaugcagcuucggcggagugucugugaucaccccuggcaccaacaccagcaaucagguggcagugcuguaccaggacgugaacuguaccgaagugcccguggccauucacgccgaucagcugacaccuacauggcggguguacuccaccggcagcaauguguuucagaccagagccggcugucugaucggagccgagcacgugaacaauagcuacgagugcgacauccccaucggcgcuggcaucugugccagcuaccagacacagacaaacagccccagacgggcuagaagcguggccagccagagcaucauugccuacacaaugucucugggcgccgagaacagcguggccuacuccaacaacucuaucgcuauccccaccaacuucaccaucagcgugaccaccgagauccugccuguguccaugaccaagaccagcguggacugcaccauguacaucugcggcgauuccaccgagugcuccaaccugcugcugcaguacggcagcuucugcacccagcugaauagagcccugacagggaucgccguggaacaggacaagaacacccaagagguguucgcccaagugaagcaaaucuacaagaccccuccuaucaaggacuucggcggcuucaauuucagccagauucugcccgauccuagcaagcccagcaagcggagcuucaucgaggaccugcuguucaacaaagugacacuggccgacgccggcuucaucaagcaguauggcgauugucugggcgacauugccgccagggaucugauuugcgcccagaaguuuaacggacugacagugcugccuccucugcugaccgaugagaugaucgcccaguacacaucugcccugcuggccggcacaaucacaagcggcuggacauuuggaugcggcgccgcucugcagauccccuuugcuaugcagauggccuaccgguucaacggcaucggagugacccagaaugugcuguacgagaaccagaagcugaucgccaaccaguucaacagcgccaucggcaagauccaggacagccugagcagcacagcaagcgcccugggaaagcugcaggacguggucaaccagaaugcccaggcacugaacacccuggucaagcagcuguccuccaacuucggcgccaucagcucugugcugaacgauauccugagcagacuggacaaggucgaggccgaggugcagaucgacagacugaucacaggcagacugcagagccuccagacauacgugacccagcagcugaucagagccgccgagauuagagccucugccaaucuggccgccaccaagaugucugagugugugcugggccagagcaagagaugugacuuuugcggcaagggcuaccaccugaugagcuucccucagucugccccucacggcgugguguuucugcacgugacauaugugcccgcucaagagaagaauuucaccaccgcuccagccaucugccacgacggcaaagcccacuuuccuagagaaggcguguucguguccaacggcacccauugguucgugacacagcggaacuucuacgagccccagaucaucaccaccgacaacaccuucgugucuggcaacugcgacguugugaucggcauugugaacaauaccguguacgacccucugcagcccgagcuggacagcuucaaagaggaacuggacaaguacuuuaagaaccacacaagccccgacguggaccugggcgauaucagcggaaucaaugccagcgucgugaacauccagaaagagaucgaccggcugaacgagguggccaagaaucugaacgagagccugaucgaccugcaagaacuggggaaguacgagcaguacaucaaguggcccugguacaucuggcugggcuuuaucgccggacugauugccaucgugauggucacaaucaugcuguguugcaugaccagcugcuguagcugccugaagggcuguuguagcuguggcagcugcugcaaguucgacgaggacgauucugagcccgugcugaagggcgugaaacugcacuacaccuga

SEQ ID NO: 12048 - RNA, 3822 nt, Artificial Sequence
  SARS-CoV-2/Wuhan/WIV05/2019__EPI_ISL_402128 spike protein CDS gc mod (1-1273)(T874C_S1055C)
auguucguguuucuggugcugcugccccugguguccagccagugugugaaccugaccaccagaacacagcugccuccagccuacaccaacagcuucaccagaggcguguacuaccccgacaagguguucagauccagcgugcugcacucuacccaggaccuguuccugccuuucuucagcaacgugaccugguuccacgccauccacguguccggcaccaauggcaccaagagauucgacaaccccgugcugcccuucaacgacgggguguacuuugccagcaccgagaaguccaacaucaucagaggcuggaucuucggcaccacacuggacagcaagacccagagccugcugaucgugaacaacgccaccaacguggucaucaaagugugcgaguuccaguucugcaacgaccccuuccugggcgucuacuaccacaagaacaacaagagcuggauggaaagcgaguuccggguguacagcagcgccaacaacugcaccuucgaguacgugucccagccuuuccugauggaccuggaaggcaagcagggcaacuucaagaaccugcgcgaguucguguucaagaacaucgacggcuacuucaaaaucuacagcaagcacaccccuaucaaccucgugcgggaucugccucagggcuucucugcucuggaaccccugguggaucugcccaucggcaucaacaucacccgguuucagacacugcuggcccugcacagaagcuaccugacaccuggcgauagcagcagcggauggacagcuggugccgccgcuuacuaugugggcuaccugcagccuagaaccuuccugcugaaguacaacgagaacggcaccaucaccgacgccguggauugugcucuggauccucugagcgagacaaagugcacccugaaguccuucaccguggaaaagggcaucuaccagaccagcaacuuccgggugcagcccaccgaauccaucgugcgguuccccaauaucaccaaucugugccccuucggcgagguguucaaugccaccagauucgccucuguguacgccuggaaccggaagcggaucagcaauugcguggccgacuacuccgugcuguacaacuccgccagcuucagcaccuucaagugcuacggcguguccccuaccaagcugaacgaccugugcuucacaaacguguacgccgacagcuucgugauccggggagaugaagugcggcagauugccccuggacagacaggcaagaucgccgacuacaacuacaagcugcccgacgacuucaccggcugugugauugccuggaacagcaacaaccuggacuccaaagucggcggcaacuacaauuaccuguaccggcuguuccggaaguccaaucugaagcccuucgagcgggacaucagcaccgaaaucuaucaggccggcagcaccccuugcaacggcguggaaggcuucaacugcuacuucccacugcaguccuacggcuuucagcccacaaauggcgugggcuaucagcccuacagagugguggugcugagcuucgaacugcugcaugcuccugccacagugugcggcccuaagaaaagcaccaaucucgugaagaacaaaugcgugaacuucaacuucaacggccugaccggcaccggcgugcugacagagagcaacaagaaguuccugccauuccagcaguuuggccgggauaucgccgauaccacagacgccguuagagauccccagacacuggaaauccuggacaucaccccaugcagcuucggcggagugucugugaucaccccuggcaccaacaccagcaaucagguggcagugcuguaccaggacgugaacuguaccgaagugcccguggccauucacgccgaucagcugacaccuacauggcggguguacuccaccggcagcaauguguuucagaccagagccggcugucugaucggagccgagcacgugaacaauagcuacgagugcgacauccccaucggcgcuggcaucugugccagcuaccagacacagacaaacagccccagacgggcuagaagcguggccagccagagcaucauugccuacacaaugucucugggcgccgagaacagcguggccuacuccaacaacucuaucgcuauccccaccaacuucaccaucagcgugaccaccgagauccugccuguguccaugaccaagaccagcguggacugcaccauguacaucugcggcgauuccaccgagugcuccaaccugcugcugcaguacggcagcuucugcacccagcugaauagagcccugacagggaucgccguggaacaggacaagaacacccaagagguguucgcccaagugaagcaaaucuacaagaccccuccuaucaaggacuucggcggcuucaauuucagccagauucugcccgauccuagcaagcccagcaagcggagcuucaucgaggaccugcuguucaacaaagugacacuggccgacgccggcuucaucaagcaguauggcgauugucugggcgacauugccgccagggaucugauuugcgcccagaaguuuaacggacugacagugcugccuccucugcugaccgaugagaugaucgcccaguacugcucugcccugcuggccggcacaaucacaagcggcuggacauuuggagcuggcgccgcucugcagauccccuuugcuaugcagauggccuaccgguucaacggcaucggagugacccagaaugugcuguacgagaaccagaagcugaucgccaaccaguucaacagcgccaucggcaagauccaggacagccugagcagcacagcaagcgcccugggaaagcugcaggacguggucaaccagaaugcccaggcacugaacacccuggucaagcagcuguccuccaacuucggcgccaucagcucugugcugaacgauauccugagcagacuggacaaggucgaggccgaggugcagaucgacagacugaucacaggcagacugcagagccuccagacauacgugacccagcagcugaucagagccgccgagauuagagccucugccaaucuggccgccaccaagaugucugagugugugcugggccagagcaagagaguggacuuuugcggcaagggcuaccaccugaugagcuucccucagugcgccccucacggcgugguguuucugcacgugacauaugugcccgcucaagagaagaauuucaccaccgcuccagccaucugccacgacggcaaagcccacuuuccuagagaaggcguguucguguccaacggcacccauugguucgugacacagcggaacuucuacgagccccagaucaucaccaccgacaacaccuucgugucuggcaacugcgacguugugaucggcauugugaacaauaccguguacgacccucugcagcccgagcuggacagcuucaaagaggaacuggacaaguacuuuaagaaccacacaagccccgacguggaccugggcgauaucagcggaaucaaugccagcgucgugaacauccagaaagagaucgaccggcugaacgagguggccaagaaucugaacgagagccugaucgaccugcaagaacuggggaaguacgagcaguacaucaaguggcccugguacaucuggcugggcuuuaucgccggacugauugccaucgugauggucacaaucaugcuguguugcaugaccagcugcuguagcugccugaagggcuguuguagcuguggcagcugcugcaaguucgacgaggacgauucugagcccgugcugaagggcgugaaacugcacuacaccuga

SEQ ID NO: 12049 - RNA, 2046 nt, Artificial Sequence; identical to SEQ ID NO: 147
  SARS-CoV-2/Wuhan/WIV05/2019__EPI_ISL_402128 spike protein CDS gc mod (1-681)

SEQ ID NO: 12050 - RNA, 1776 nt, Artificial Sequence
  SARS-CoV-2/Wuhan/WIV05/2019__EPI_ISL_402128 spike protein CDS gc mod (682-1273)
agacgggcuagaagcguggccagccagagcaucauugccuacacaaugucucugggcgccgagaacagcguggccuacuccaacaacucuaucgcuauccccaccaacuucaccaucagcgugaccaccgagauccugccuguguccaugaccaagaccagcguggacugcaccauguacaucugcggcgauuccaccgagugcuccaaccugcugcugcaguacggcagcuucugcacccagcugaauagagcccugacagggaucgccguggaacaggacaagaacacccaagagguguucgcccaagugaagcaaaucuacaagaccccuccuaucaaggacuucggcggcuucaauuucagccagauucugcccgauccuagcaagcccagcaagcggagcuucaucgaggaccugcuguucaacaaagugacacuggccgacgccggcuucaucaagcaguauggcgauugucugggcgacauugccgccagggaucugauuugcgcccagaaguuuaacggacugacagugcugccuccucugcugaccgaugagaugaucgcccaguacacaucugcccugcuggccggcacaaucacaagcggcuggacauuuggagcuggcgccgcucugcagauccccuuugcuaugcagauggccuaccgguucaacggcaucggagugacccagaaugugcuguacgagaaccagaagcugaucgccaaccaguucaacagcgccaucggcaagauccaggacagccugagcagcacagcaagcgcccugggaaagcugcaggacguggucaaccagaaugcccaggcacugaacacccuggucaagcagcuguccuccaacuucggcgccaucagcucugugcugaacgauauccugagcagacuggacaaggucgaggccgaggugcagaucgacagacugaucacaggcagacugcagagccuccagacauacgugacccagcagcugaucagagccgccgagauuagagccucugccaaucuggccgccaccaagaugucugagugugugcugggccagagcaagagaguggacuuuugcggcaagggcuaccaccugaugagcuucccucagucugccccucacggcgugguguuucugcacgugacauaugugcccgcucaagagaagaauuucaccaccgcuccagccaucugccacgacggcaaagcccacuuuccuagagaaggcguguucguguccaacggcacccauugguucgugacacagcggaacuucuacgagccccagaucaucaccaccgacaacaccuucgugucuggcaacugcgacguugugaucggcauugugaacaauaccguguacgacccucugcagcccgagcuggacagcuucaaagaggaacuggacaaguacuuuaagaaccacacaagccccgacguggaccugggcgauaucagcggaaucaaugccagcgucgugaacauccagaaagagaucgaccggcugaacgagguggccaagaaucugaacgagagccugaucgaccugcaagaacuggggaaguacgagcaguacaucaaguggcccugguacaucuggcugggcuuuaucgccggacugauugccaucgugauggucacaaucaugcuguguugcaugaccagcugcuguagcugccugaagggcuguuguagcuguggcagcugcugcaaguucgacgaggacgauucugagcccgugcugaagggcgugaaacugcacuacacc

SEQ ID NO: 12051 - RNA, 45 nt, Artificial Sequence
  SARS-CoV-2/Wuhan/WIV05/2019__EPI_ISL_402128 spike protein CDS gc mod (1-15)
auguucguguuucuggugcugcugccccugguguccagccagugu

SEQ ID NO: 12052 - RNA, 1998 nt, Artificial Sequence
  SARS-CoV-2/Wuhan/WIV05/2019__EPI_ISL_402128 spike protein CDS gc mod (16-681)
gugaaccugaccaccagaacacagcugccuccagccuacaccaacagcuucaccagaggcguguacuaccccgacaagguguucagauccagcgugcugcacucuacccaggaccuguuccugccuuucuucagcaacgugaccugguuccacgccauccacguguccggcaccaauggcaccaagagauucgacaaccccgugcugcccuucaacgacgggguguacuuugccagcaccgagaaguccaacaucaucagaggcuggaucuucggcaccacacuggacagcaagacccagagccugcugaucgugaacaacgccaccaacguggucaucaaagugugcgaguuccaguucugcaacgaccccuuccugggcgucuacuaccacaagaacaacaagagcuggauggaaagcgaguuccggguguacagcagcgccaacaacugcaccuucgaguacgugucccagccuuuccugauggaccuggaaggcaagcagggcaacuucaagaaccugcgcgaguucguguucaagaacaucgacggcuacuucaaaaucuacagcaagcacaccccuaucaaccucgugcgggaucugccucagggcuucucugcucuggaaccccugguggaucugcccaucggcaucaacaucacccgguuucagacacugcuggcccugcacagaagcuaccugacaccuggcgauagcagcagcggauggacagcuggugccgccgcuuacuaugugggcuaccugcagccuagaaccuuccugcugaaguacaacgagaacggcaccaucaccgacgccguggauugugcucuggauccucugagcgagacaaagugcacccugaaguccuucaccguggaaaagggcaucuaccagaccagcaacuuccgggugcagcccaccgaauccaucgugcgguuccccaauaucaccaaucugugccccuucggcgagguguucaaugccaccagauucgccucuguguacgccuggaaccggaagcggaucagcaauugcguggccgacuacuccgugcuguacaacuccgccagcuucagcaccuucaagugcuacggcguguccccuaccaagcugaacgaccugugcuucacaaacguguacgccgacagcuucgugauccggggagaugaagugcggcagauugccccuggacagacaggcaagaucgccgacuacaacuacaagcugcccgacgacuucaccggcugugugauugccuggaacagcaacaaccuggacuccaaagucggcggcaacuacaauuaccuguaccggcuguuccggaaguccaaucugaagcccuucgagcgggacaucagcaccgaaaucuaucaggccggcagcaccccuugcaacggcguggaaggcuucaacugcuacuucccacugcaguccuacggcuuucagcccacaaauggcgugggcuaucagcccuacagagugguggugcugagcuucgaacugcugcaugcuccugccacagugugcggcccuaagaaaagcaccaaucucgugaagaacaaaugcgugaacuucaacuucaacggccugaccggcaccggcgugcugacagagagcaacaagaaguuccugccauuccagcaguuuggccgggauaucgccgauaccacagacgccguuagagauccccagacacuggaaauccuggacaucaccccaugcagcuucggcggagugucugugaucaccccuggcaccaacaccagcaaucagguggcagugcuguaccaggacgugaacuguaccgaagugcccguggccauucacgccgaucagcugacaccuacauggcggguguacuccaccggcagcaauguguuucagaccagagccggcugucugaucggagccgagcacgugaacaauagcuacgagugcgacauccccaucggcgcuggcaucugugccagcuaccagacacagacaaacagcccc

SEQ ID NO: 12053 - RNA, 189 nt, Artificial Sequence
  SARS-CoV-2/Wuhan/WIV05/2019__EPI_ISL_402128 spike protein CDS gc mod (1212-1273)
uggcccugguacaucuggcugggcuuuaucgccggacugauugccaucgugauggucacaaucaugcuguguugcaugaccagcugcuguagcugccugaagggcuguuguagcuguggcagcugcugcaaguucgacgaggacgauucugagcccgugcugaagggcgugaaacugcacuacaccuga

SEQ ID NO: 12054 - RNA, 3633 nt, Artificial Sequence
  SARS-CoV-2/Wuhan/WIV05/2019__EPI_ISL_402128 spike protein CDS gc mod (1-1211)
auguucguguuucuggugcugcugccccugguguccagccagugugugaaccugaccaccagaacacagcugccuccagccuacaccaacagcuucaccagaggcguguacuaccccgacaagguguucagauccagcgugcugcacucuacccaggaccuguuccugccuuucuucagcaacgugaccugguuccacgccauccacguguccggcaccaauggcaccaagagauucgacaaccccgugcugcccuucaacgacgggguguacuuugccagcaccgagaaguccaacaucaucagaggcuggaucuucggcaccacacuggacagcaagacccagagccugcugaucgugaacaacgccaccaacguggucaucaaagugugcgaguuccaguucugcaacgaccccuuccugggcgucuacuaccacaagaacaacaagagcuggauggaaagcgaguuccggguguacagcagcgccaacaacugcaccuucgaguacgugucccagccuuuccugauggaccuggaaggcaagcagggcaacuucaagaaccugcgcgaguucguguucaagaacaucgacggcuacuucaaaaucuacagcaagcacaccccuaucaaccucgugcgggaucugccucagggcuucucugcucuggaaccccugguggaucugcccaucggcaucaacaucacccgguuucagacacugcuggcccugcacagaagcuaccugacaccuggcgauagcagcagcggauggacagcuggugccgccgcuuacuaugugggcuaccugcagccuagaaccuuccugcugaaguacaacgagaacggcaccaucaccgacgccguggauugugcucuggauccucugagcgagacaaagugcacccugaaguccuucaccguggaaaagggcaucuaccagaccagcaacuuccgggugcagcccaccgaauccaucgugcgguuccccaauaucaccaaucugugccccuucggcgagguguucaaugccaccagauucgccucuguguacgccuggaaccggaagcggaucagcaauugcguggccgacuacuccgugcuguacaacuccgccagcuucagcaccuucaagugcuacggcguguccccuaccaagcugaacgaccugugcuucacaaacguguacgccgacagcuucgugauccggggagaugaagugcggcagauugccccuggacagacaggcaagaucgccgacuacaacuacaagcugcccgacgacuucaccggcugugugauugccuggaacagcaacaaccuggacuccaaagucggcggcaacuacaauuaccuguaccggcuguuccggaaguccaaucugaagcccuucgagcgggacaucagcaccgaaaucuaucaggccggcagcaccccuugcaacggcguggaaggcuucaacugcuacuucccacugcaguccuacggcuuucagcccacaaauggcgugggcuaucagcccuacagagugguggugcugagcuucgaacugcugcaugcuccugccacagugugcggcccuaagaaaagcaccaaucucgugaagaacaaaugcgugaacuucaacuucaacggccugaccggcaccggcgugcugacagagagcaacaagaaguuccugccauuccagcaguuuggccgggauaucgccgauaccacagacgccguuagagauccccagacacuggaaauccuggacaucaccccaugcagcuucggcggagugucugugaucaccccuggcaccaacaccagcaaucagguggcagugcuguaccaggacgugaacuguaccgaagugcccguggccauucacgccgaucagcugacaccuacauggcggguguacuccaccggcagcaauguguuucagaccagagccggcugucugaucggagccgagcacgugaacaauagcuacgagugcgacauccccaucggcgcuggcaucugugccagcuaccagacacagacaaacagccccagacgggcuagaagcguggccagccagagcaucauugccuacacaaugucucugggcgccgagaacagcguggccuacuccaacaacucuaucgcuauccccaccaacuucaccaucagcgugaccaccgagauccugccuguguccaugaccaagaccagcguggacugcaccauguacaucugcggcgauuccaccgagugcuccaaccugcugcugcaguacggcagcuucugcacccagcugaauagagcccugacagggaucgccguggaacaggacaagaacacccaagagguguucgcccaagugaagcaaaucuacaagaccccuccuaucaaggacuucggcggcuucaauuucagccagauucugcccgauccuagcaagcccagcaagcggagcuucaucgaggaccugcuguucaacaaagugacacuggccgacgccggcuucaucaagcaguauggcgauugucugggcgacauugccgccagggaucugauuugcgcccagaaguuuaacggacugacagugcugccuccucugcugaccgaugagaugaucgcccaguacacaucugcccugcuggccggcacaaucacaagcggcuggacauuuggagcuggcgccgcucugcagauccccuuugcuaugcagauggccuaccgguucaacggcaucggagugacccagaaugugcuguacgagaaccagaagcugaucgccaaccaguucaacagcgccaucggcaagauccaggacagccugagcagcacagcaagcgcccugggaaagcugcaggacguggucaaccagaaugcccaggcacugaacacccuggucaagcagcuguccuccaacuucggcgccaucagcucugugcugaacgauauccugagcagacuggacaaggucgaggccgaggugcagaucgacagacugaucacaggcagacugcagagccuccagacauacgugacccagcagcugaucagagccgccgagauuagagccucugccaaucuggccgccaccaagaugucugagugugugcugggccagagcaagagaguggacuuuugcggcaagggcuaccaccugaugagcuucccucagucugccccucacggcgugguguuucugcacgugacauaugugcccgcucaagagaagaauuucaccaccgcuccagccaucugccacgacggcaaagcccacuuuccuagagaaggcguguucguguccaacggcacccauugguucgugacacagcggaacuucuacgagccccagaucaucaccaccgacaacaccuucgugucuggcaacugcgacguugugaucggcauugugaacaauaccguguacgacccucugcagcccgagcuggacagcuucaaagaggaacuggacaaguacuuuaagaaccacacaagccccgacguggaccugggcgauaucagcggaaucaaugccagcgucgugaacauccagaaagagaucgaccggcugaacgagguggccaagaaucugaacgagagccugaucgaccugcaagaacuggggaaguacgagcaguacaucaag

SEQ ID NO: 12055 - RNA, 3633 nt, Artificial Sequence
  SARS-CoV-2/Wuhan/WIV05/2019__EPI_ISL_402128 spike protein CDS gc mod (1-1211)(K986P_V987P)
auguucguguuucuggugcugcugccccugguguccagccagugugugaaccugaccaccagaacacagcugccuccagccuacaccaacagcuucaccagaggcguguacuaccccgacaagguguucagauccagcgugcugcacucuacccaggaccuguuccugccuuucuucagcaacgugaccugguuccacgccauccacguguccggcaccaauggcaccaagagauucgacaaccccgugcugcccuucaacgacgggguguacuuugccagcaccgagaaguccaacaucaucagaggcuggaucuucggcaccacacuggacagcaagacccagagccugcugaucgugaacaacgccaccaacguggucaucaaagugugcgaguuccaguucugcaacgaccccuuccugggcgucuacuaccacaagaacaacaagagcuggauggaaagcgaguuccggguguacagcagcgccaacaacugcaccuucgaguacgugucccagccuuuccugauggaccuggaaggcaagcagggcaacuucaagaaccugcgcgaguucguguucaagaacaucgacggcuacuucaaaaucuacagcaagcacaccccuaucaaccucgugcgggaucugccucagggcuucucugcucuggaaccccugguggaucugcccaucggcaucaacaucacccgguuucagacacugcuggcccugcacagaagcuaccugacaccuggcgauagcagcagcggauggacagcuggugccgccgcuuacuaugugggcuaccugcagccuagaaccuuccugcugaaguacaacgagaacggcaccaucaccgacgccguggauugugcucuggauccucugagcgagacaaagugcacccugaaguccuucaccguggaaaagggcaucuaccagaccagcaacuuccgggugcagcccaccgaauccaucgugcgguuccccaauaucaccaaucugugccccuucggcgagguguucaaugccaccagauucgccucuguguacgccuggaaccggaagcggaucagcaauugcguggccgacuacuccgugcuguacaacuccgccagcuucagcaccuucaagugcuacggcguguccccuaccaagcugaacgaccugugcuucacaaacguguacgccgacagcuucgugauccggggagaugaagugcggcagauugccccuggacagacaggcaagaucgccgacuacaacuacaagcugcccgacgacuucaccggcugugugauugccuggaacagcaacaaccuggacuccaaagucggcggcaacuacaauuaccuguaccggcuguuccggaaguccaaucugaagcccuucgagcgggacaucagcaccgaaaucuaucaggccggcagcaccccuugcaacggcguggaaggcuucaacugcuacuucccacugcaguccuacggcuuucagcccacaaauggcgugggcuaucagcccuacagagugguggugcugagcuucgaacugcugcaugcuccugccacagugugcggcccuaagaaaagcaccaaucucgugaagaacaaaugcgugaacuucaacuucaacggccugaccggcaccggcgugcugacagagagcaacaagaaguuccugccauuccagcaguuuggccgggauaucgccgauaccacagacgccguuagagauccccagacacuggaaauccuggacaucaccccaugcagcuucggcggagugucugugaucaccccuggcaccaacaccagcaaucagguggcagugcuguaccaggacgugaacuguaccgaagugcccguggccauucacgccgaucagcugacaccuacauggcggguguacuccaccggcagcaauguguuucagaccagagccggcugucugaucggagccgagcacgugaacaauagcuacgagugcgacauccccaucggcgcuggcaucugugccagcuaccagacacagacaaacagccccagacgggcuagaagcguggccagccagagcaucauugccuacacaaugucucugggcgccgagaacagcguggccuacuccaacaacucuaucgcuauccccaccaacuucaccaucagcgugaccaccgagauccugccuguguccaugaccaagaccagcguggacugcaccauguacaucugcggcgauuccaccgagugcuccaaccugcugcugcaguacggcagcuucugcacccagcugaauagagcccugacagggaucgccguggaacaggacaagaacacccaagagguguucgcccaagugaagcaaaucuacaagaccccuccuaucaaggacuucggcggcuucaauuucagccagauucugcccgauccuagcaagcccagcaagcggagcuucaucgaggaccugcuguucaacaaagugacacuggccgacgccggcuucaucaagcaguauggcgauugucugggcgacauugccgccagggaucugauuugcgcccagaaguuuaacggacugacagugcugccuccucugcugaccgaugagaugaucgcccaguacacaucugcccugcuggccggcacaaucacaagcggcuggacauuuggagcuggcgccgcucugcagauccccuuugcuaugcagauggccuaccgguucaacggcaucggagugacccagaaugugcuguacgagaaccagaagcugaucgccaaccaguucaacagcgccaucggcaagauccaggacagccugagcagcacagcaagcgcccugggaaagcugcaggacguggucaaccagaaugcccaggcacugaacacccuggucaagcagcuguccuccaacuucggcgccaucagcucugugcugaacgauauccugagcagacuggacccuccugaggccgaggugcagaucgacagacugaucacaggcagacugcagagccuccagacauacgugacccagcagcugaucagagccgccgagauuagagccucugccaaucuggccgccaccaagaugucugagugugugcugggccagagcaagagaguggacuuuugcggcaagggcuaccaccugaugagcuucccucagucugccccucacggcgugguguuucugcacgugacauaugugcccgcucaagagaagaauuucaccaccgcuccagccaucugccacgacggcaaagcccacuuuccuagagaaggcguguucguguccaacggcacccauugguucgugacacagcggaacuucuacgagccccagaucaucaccaccgacaacaccuucgugucuggcaacugcgacguugugaucggcauugugaacaauaccguguacgacccucugcagcccgagcuggacagcuucaaagaggaacuggacaaguacuuuaagaaccacacaagccccgacguggaccugggcgauaucagcggaaucaaugccagcgucgugaacauccagaaagagaucgaccggcugaacgagguggccaagaaucugaacgagagccugaucgaccugcaagaacuggggaaguacgagcaguacaucaag

SEQ ID NO: 12056 - RNA, 3633 nt, Artificial Sequence
  SARS-CoV-2/Wuhan/WIV05/2019__EPI_ISL_402128 spike protein CDS gc mod (1-1211)(K986P_V987P_T887WN_A1020W)
auguucguguuucuggugcugcugccccugguguccagccagugugugaaccugaccaccagaacacagcugccuccagccuacaccaacagcuucaccagaggcguguacuaccccgacaagguguucagauccagcgugcugcacucuacccaggaccuguuccugccuuucuucagcaacgugaccugguuccacgccauccacguguccggcaccaauggcaccaagagauucgacaaccccgugcugcccuucaacgacgggguguacuuugccagcaccgagaaguccaacaucaucagaggcuggaucuucggcaccacacuggacagcaagacccagagccugcugaucgugaacaacgccaccaacguggucaucaaagugugcgaguuccaguucugcaacgaccccuuccugggcgucuacuaccacaagaacaacaagagcuggauggaaagcgaguuccggguguacagcagcgccaacaacugcaccuucgaguacgugucccagccuuuccugauggaccuggaaggcaagcagggcaacuucaagaaccugcgcgaguucguguucaagaacaucgacggcuacuucaaaaucuacagcaagcacaccccuaucaaccucgugcgggaucugccucagggcuucucugcucuggaaccccugguggaucugcccaucggcaucaacaucacccgguuucagacacugcuggcccugcacagaagcuaccugacaccuggcgauagcagcagcggauggacagcuggugccgccgcuuacuaugugggcuaccugcagccuagaaccuuccugcugaaguacaacgagaacggcaccaucaccgacgccguggauugugcucuggauccucugagcgagacaaagugcacccugaaguccuucaccguggaaaagggcaucuaccagaccagcaacuuccgggugcagcccaccgaauccaucgugcgguuccccaauaucaccaaucugugccccuucggcgagguguucaaugccaccagauucgccucuguguacgccuggaaccggaagcggaucagcaauugcguggccgacuacuccgugcuguacaacuccgccagcuucagcaccuucaagugcuacggcguguccccuaccaagcugaacgaccugugcuucacaaacguguacgccgacagcuucgugauccggggagaugaagugcggcagauugccccuggacagacaggcaagaucgccgacuacaacuacaagcugcccgacgacuucaccggcugugugauugccuggaacagcaacaaccuggacuccaaagucggcggcaacuacaauuaccuguaccggcuguuccggaaguccaaucugaagcccuucgagcgggacaucagcaccgaaaucuaucaggccggcagcaccccuugcaacggcguggaaggcuucaacugcuacuucccacugcaguccuacggcuuucagcccacaaauggcgugggcuaucagcccuacagagugguggugcugagcuucgaacugcugcaugcuccugccacagugugcggcccuaagaaaagcaccaaucucgugaagaacaaaugcgugaacuucaacuucaacggccugaccggcaccggcgugcugacagagagcaacaagaaguuccugccauuccagcaguuuggccgggauaucgccgauaccacagacgccguuagagauccccagacacuggaaauccuggacaucaccccaugcagcuucggcggagugucugugaucaccccuggcaccaacaccagcaaucagguggcagugcuguaccaggacgugaacuguaccgaagugcccguggccauucacgccgaucagcugacaccuacauggcggguguacuccaccggcagcaauguguuucagaccagagccggcugucugaucggagccgagcacgugaacaauagcuacgagugcgacauccccaucggcgcuggcaucugugccagcuaccagacacagacaaacagccccagacgggcuagaagcguggccagccagagcaucauugccuacacaaugucucugggcgccgagaacagcguggccuacuccaacaacucuaucgcuauccccaccaacuucaccaucagcgugaccaccgagauccugccuguguccaugaccaagaccagcguggacugcaccauguacaucugcggcgauuccaccgagugcuccaaccugcugcugcaguacggcagcuucugcacccagcugaauagagcccugacagggaucgccguggaacaggacaagaacacccaagagguguucgcccaagugaagcaaaucuacaagaccccuccuaucaaggacuucggcggcuucaauuucagccagauucugcccgauccuagcaagcccagcaagcggagcuucaucgaggaccugcuguucaacaaagugacacuggccgacgccggcuucaucaagcaguauggcgauugucugggcgacauugccgccagggaucugauuugcgcccagaaguuuaacggacugacagugcugccuccucugcugaccgaugagaugaucgcccaguacacaucugcccugcuggccggcacaaucacaagcggcuggugguuuggagcuggcgccgcucugcagauccccuuugcuaugcagauggccuaccgguucaacggcaucggagugacccagaaugugcuguacgagaaccagaagcugaucgccaaccaguucaacagcgccaucggcaagauccaggacagccugagcagcacagcaagcgcccugggaaagcugcaggacguggucaaccagaaugcccaggcacugaacacccuggucaagcagcuguccuccaacuucggcgccaucagcucugugcugaacgauauccugagcagacuggacccuccugaggccgaggugcagaucgacagacugaucacaggcagacugcagagccuccagacauacgugacccagcagcugaucagagccgccgagauuagauggucugccaaucuggccgccaccaagaugucugagugugugcugggccagagcaagagaguggacuuuugcggcaagggcuaccaccugaugagcuucccucagucugccccucacggcgugguguuucugcacgugacauaugugcccgcucaagagaagaauuucaccaccgcuccagccaucugccacgacggcaaagcccacuuuccuagagaaggcguguucguguccaacggcacccauugguucgugacacagcggaacuucuacgagccccagaucaucaccaccgacaacaccuucgugucuggcaacugcgacguugugaucggcauugugaacaauaccguguacgacccucugcagcccgagcuggacagcuucaaagaggaacuggacaaguacuuuaagaaccacacaagccccgacguggaccugggcgauaucagcggaaucaaugccagcgucgugaacauccagaaagagaucgaccggcugaacgagguggccaagaaucugaacgagagccugaucgaccugcaagaacuggggaaguacgagcaguacaucaag

SEQ ID NO: 12057 - RNA, 3633 nt, Artificial Sequence
  SARS-CoV-2/Wuhan/WIV05/2019__EPI_ISL_402128 spike protein CDS gc mod (1-1211)(K986P_V987P_P1069F)
auguucguguuucuggugcugcugccccugguguccagccagugugugaaccugaccaccagaacacagcugccuccagccuacaccaacagcuucaccagaggcguguacuaccccgacaagguguucagauccagcgugcugcacucuacccaggaccuguuccugccuuucuucagcaacgugaccugguuccacgccauccacguguccggcaccaauggcaccaagagauucgacaaccccgugcugcccuucaacgacgggguguacuuugccagcaccgagaaguccaacaucaucagaggcuggaucuucggcaccacacuggacagcaagacccagagccugcugaucgugaacaacgccaccaacguggucaucaaagugugcgaguuccaguucugcaacgaccccuuccugggcgucuacuaccacaagaacaacaagagcuggauggaaagcgaguuccggguguacagcagcgccaacaacugcaccuucgaguacgugucccagccuuuccugauggaccuggaaggcaagcagggcaacuucaagaaccugcgcgaguucguguucaagaacaucgacggcuacuucaaaaucuacagcaagcacaccccuaucaaccucgugcgggaucugccucagggcuucucugcucuggaaccccugguggaucugcccaucggcaucaacaucacccgguuucagacacugcuggcccugcacagaagcuaccugacaccuggcgauagcagcagcggauggacagcuggugccgccgcuuacuaugugggcuaccugcagccuagaaccuuccugcugaaguacaacgagaacggcaccaucaccgacgccguggauugugcucuggauccucugagcgagacaaagugcacccugaaguccuucaccguggaaaagggcaucuaccagaccagcaacuuccgggugcagcccaccgaauccaucgugcgguuccccaauaucaccaaucugugccccuucggcgagguguucaaugccaccagauucgccucuguguacgccuggaaccggaagcggaucagcaauugcguggccgacuacuccgugcuguacaacuccgccagcuucagcaccuucaagugcuacggcguguccccuaccaagcugaacgaccugugcuucacaaacguguacgccgacagcuucgugauccggggagaugaagugcggcagauugccccuggacagacaggcaagaucgccgacuacaacuacaagcugcccgacgacuucaccggcugugugauugccuggaacagcaacaaccuggacuccaaagucggcggcaacuacaauuaccuguaccggcuguuccggaaguccaaucugaagcccuucgagcgggacaucagcaccgaaaucuaucaggccggcagcaccccuugcaacggcguggaaggcuucaacugcuacuucccacugcaguccuacggcuuucagcccacaaauggcgugggcuaucagcccuacagagugguggugcugagcuucgaacugcugcaugcuccugccacagugugcggcccuaagaaaagcaccaaucucgugaagaacaaaugcgugaacuucaacuucaacggccugaccggcaccggcgugcugacagagagcaacaagaaguuccugccauuccagcaguuuggccgggauaucgccgauaccacagacgccguuagagauccccagacacuggaaauccuggacaucaccccaugcagcuucggcggagugucugugaucaccccuggcaccaacaccagcaaucagguggcagugcuguaccaggacgugaacuguaccgaagugcccguggccauucacgccgaucagcugacaccuacauggcggguguacuccaccggcagcaauguguuucagaccagagccggcugucugaucggagccgagcacgugaacaauagcuacgagugcgacauccccaucggcgcuggcaucugugccagcuaccagacacagacaaacagccccagacgggcuagaagcguggccagccagagcaucauugccuacacaaugucucugggcgccgagaacagcguggccuacuccaacaacucuaucgcuauccccaccaacuucaccaucagcgugaccaccgagauccugccuguguccaugaccaagaccagcguggacugcaccauguacaucugcggcgauuccaccgagugcuccaaccugcugcugcaguacggcagcuucugcacccagcugaauagagcccugacagggaucgccguggaacaggacaagaacacccaagagguguucgcccaagugaagcaaaucuacaagaccccuccuaucaaggacuucggcggcuucaauuucagccagauucugcccgauccuagcaagcccagcaagcggagcuucaucgaggaccugcuguucaacaaagugacacuggccgacgccggcuucaucaagcaguauggcgauugucugggcgacauugccgccagggaucugauuugcgcccagaaguuuaacggacugacagugcugccuccucugcugaccgaugagaugaucgcccaguacacaucugcccugcuggccggcacaaucacaagcggcuggacauuuggagcuggcgccgcucugcagauccccuuugcuaugcagauggccuaccgguucaacggcaucggagugacccagaaugugcuguacgagaaccagaagcugaucgccaaccaguucaacagcgccaucggcaagauccaggacagccugagcagcacagcaagcgcccugggaaagcugcaggacguggucaaccagaaugcccaggcacugaacacccuggucaagcagcuguccuccaacuucggcgccaucagcucugugcugaacgauauccugagcagacuggacccuccugaggccgaggugcagaucgacagacugaucacaggcagacugcagagccuccagacauacgugacccagcagcugaucagagccgccgagauuagagccucugccaaucuggccgccaccaagaugucugagugugugcugggccagagcaagagaguggacuuuugcggcaagggcuaccaccugaugagcuucccucagucugccccucacggcgugguguuucugcacgugacauauguguucgcucaagagaagaauuucaccaccgcuccagccaucugccacgacggcaaagcccacuuuccuagagaaggcguguucguguccaacggcacccauugguucgugacacagcggaacuucuacgagccccagaucaucaccaccgacaacaccuucgugucuggcaacugcgacguugugaucggcauugugaacaauaccguguacgacccucugcagcccgagcuggacagcuucaaagaggaacuggacaaguacuuuaagaaccacacaagccccgacguggaccugggcgauaucagcggaaucaaugccagcgucgugaacauccagaaagagaucgaccggcugaacgagguggccaagaaucugaacgagagccugaucgaccugcaagaacuggggaaguacgagcaguacaucaag

SEQ ID NO: 12058 - RNA, 3633 nt, Artificial Sequence
  SARS-CoV-2/Wuhan/WIV05/2019__EPI_ISL_402128 spike protein CDS gc mod (1-1211)(K986P_V987P_ H1048Q_H1064N_ H1083N_H1101N)
auguucguguuucuggugcugcugccccugguguccagccagugugugaaccugaccaccagaacacagcugccuccagccuacaccaacagcuucaccagaggcguguacuaccccgacaagguguucagauccagcgugcugcacucuacccaggaccuguuccugccuuucuucagcaacgugaccugguuccacgccauccacguguccggcaccaauggcaccaagagauucgacaaccccgugcugcccuucaacgacgggguguacuuugccagcaccgagaaguccaacaucaucagaggcuggaucuucggcaccacacuggacagcaagacccagagccugcugaucgugaacaacgccaccaacguggucaucaaagugugcgaguuccaguucugcaacgaccccuuccugggcgucuacuaccacaagaacaacaagagcuggauggaaagcgaguuccggguguacagcagcgccaacaacugcaccuucgaguacgugucccagccuuuccugauggaccuggaaggcaagcagggcaacuucaagaaccugcgcgaguucguguucaagaacaucgacggcuacuucaaaaucuacagcaagcacaccccuaucaaccucgugcgggaucugccucagggcuucucugcucuggaaccccugguggaucugcccaucggcaucaacaucacccgguuucagacacugcuggcccugcacagaagcuaccugacaccuggcgauagcagcagcggauggacagcuggugccgccgcuuacuaugugggcuaccugcagccuagaaccuuccugcugaaguacaacgagaacggcaccaucaccgacgccguggauugugcucuggauccucugagcgagacaaagugcacccugaaguccuucaccguggaaaagggcaucuaccagaccagcaacuuccgggugcagcccaccgaauccaucgugcgguuccccaauaucaccaaucugugccccuucggcgagguguucaaugccaccagauucgccucuguguacgccuggaaccggaagcggaucagcaauugcguggccgacuacuccgugcuguacaacuccgccagcuucagcaccuucaagugcuacggcguguccccuaccaagcugaacgaccugugcuucacaaacguguacgccgacagcuucgugauccggggagaugaagugcggcagauugccccuggacagacaggcaagaucgccgacuacaacuacaagcugcccgacgacuucaccggcugugugauugccuggaacagcaacaaccuggacuccaaagucggcggcaacuacaauuaccuguaccggcuguuccggaaguccaaucugaagcccuucgagcgggacaucagcaccgaaaucuaucaggccggcagcaccccuugcaacggcguggaaggcuucaacugcuacuucccacugcaguccuacggcuuucagcccacaaauggcgugggcuaucagcccuacagagugguggugcugagcuucgaacugcugcaugcuccugccacagugugcggcccuaagaaaagcaccaaucucgugaagaacaaaugcgugaacuucaacuucaacggccugaccggcaccggcgugcugacagagagcaacaagaaguuccugccauuccagcaguuuggccgggauaucgccgauaccacagacgccguuagagauccccagacacuggaaauccuggacaucaccccaugcagcuucggcggagugucugugaucaccccuggcaccaacaccagcaaucagguggcagugcuguaccaggacgugaacuguaccgaagugcccguggccauucacgccgaucagcugacaccuacauggcggguguacuccaccggcagcaauguguuucagaccagagccggcugucugaucggagccgagcacgugaacaauagcuacgagugcgacauccccaucggcgcuggcaucugugccagcuaccagacacagacaaacagccccagacgggcuagaagcguggccagccagagcaucauugccuacacaaugucucugggcgccgagaacagcguggccuacuccaacaacucuaucgcuauccccaccaacuucaccaucagcgugaccaccgagauccugccuguguccaugaccaagaccagcguggacugcaccauguacaucugcggcgauuccaccgagugcuccaaccugcugcugcaguacggcagcuucugcacccagcugaauagagcccugacagggaucgccguggaacaggacaagaacacccaagagguguucgcccaagugaagcaaaucuacaagaccccuccuaucaaggacuucggcggcuucaauuucagccagauucugcccgauccuagcaagcccagcaagcggagcuucaucgaggaccugcuguucaacaaagugacacuggccgacgccggcuucaucaagcaguauggcgauugucugggcgacauugccgccagggaucugauuugcgcccagaaguuuaacggacugacagugcugccuccucugcugaccgaugagaugaucgcccaguacacaucugcccugcuggccggcacaaucacaagcggcuggacauuuggagcuggcgccgcucugcagauccccuuugcuaugcagauggccuaccgguucaacggcaucggagugacccagaaugugcuguacgagaaccagaagcugaucgccaaccaguucaacagcgccaucggcaagauccaggacagccugagcagcacagcaagcgcccugggaaagcugcaggacguggucaaccagaaugcccaggcacugaacacccuggucaagcagcuguccuccaacuucggcgccaucagcucugugcugaacgauauccugagcagacuggacccuccugaggccgaggugcagaucgacagacugaucacaggcagacugcagagccuccagacauacgugacccagcagcugaucagagccgccgagauuagagccucugccaaucuggccgccaccaagaugucugagugugugcugggccagagcaagagaguggacuuuugcggcaagggcuaccagcugaugagcuucccucagucugccccucacggcgugguguuucugaacgugacauaugugcccgcucaagagaagaauuucaccaccgcuccagccaucugcaacgacggcaaagcccacuuuccuagagaaggcguguucguguccaacggcaccaacugguucgugacacagcggaacuucuacgagccccagaucaucaccaccgacaacaccuucgugucuggcaacugcgacguugugaucggcauugugaacaauaccguguacgacccucugcagcccgagcuggacagcuucaaagaggaacuggacaaguacuuuaagaaccacacaagccccgacguggaccugggcgauaucagcggaaucaaugccagcgucgugaacauccagaaagagaucgaccggcugaacgagguggccaagaaucugaacgagagccugaucgaccugcaagaacuggggaaguacgagcaguacaucaag

SEQ ID NO: 12059 - RNA, 3633 nt, Artificial Sequence
  SARS-CoV-2/Wuhan/WIV05/2019__EPI_ISL_402128 spike protein CDS gc mod (1-1211)(I712C_T1077C)
auguucguguuucuggugcugcugccccugguguccagccagugugugaaccugaccaccagaacacagcugccuccagccuacaccaacagcuucaccagaggcguguacuaccccgacaagguguucagauccagcgugcugcacucuacccaggaccuguuccugccuuucuucagcaacgugaccugguuccacgccauccacguguccggcaccaauggcaccaagagauucgacaaccccgugcugcccuucaacgacgggguguacuuugccagcaccgagaaguccaacaucaucagaggcuggaucuucggcaccacacuggacagcaagacccagagccugcugaucgugaacaacgccaccaacguggucaucaaagugugcgaguuccaguucugcaacgaccccuuccugggcgucuacuaccacaagaacaacaagagcuggauggaaagcgaguuccggguguacagcagcgccaacaacugcaccuucgaguacgugucccagccuuuccugauggaccuggaaggcaagcagggcaacuucaagaaccugcgcgaguucguguucaagaacaucgacggcuacuucaaaaucuacagcaagcacaccccuaucaaccucgugcgggaucugccucagggcuucucugcucuggaaccccugguggaucugcccaucggcaucaacaucacccgguuucagacacugcuggcccugcacagaagcuaccugacaccuggcgauagcagcagcggauggacagcuggugccgccgcuuacuaugugggcuaccugcagccuagaaccuuccugcugaaguacaacgagaacggcaccaucaccgacgccguggauugugcucuggauccucugagcgagacaaagugcacccugaaguccuucaccguggaaaagggcaucuaccagaccagcaacuuccgggugcagcccaccgaauccaucgugcgguuccccaauaucaccaaucugugccccuucggcgagguguucaaugccaccagauucgccucuguguacgccuggaaccggaagcggaucagcaauugcguggccgacuacuccgugcuguacaacuccgccagcuucagcaccuucaagugcuacggcguguccccuaccaagcugaacgaccugugcuucacaaacguguacgccgacagcuucgugauccggggagaugaagugcggcagauugccccuggacagacaggcaagaucgccgacuacaacuacaagcugcccgacgacuucaccggcugugugauugccuggaacagcaacaaccuggacuccaaagucggcggcaacuacaauuaccuguaccggcuguuccggaaguccaaucugaagcccuucgagcgggacaucagcaccgaaaucuaucaggccggcagcaccccuugcaacggcguggaaggcuucaacugcuacuucccacugcaguccuacggcuuucagcccacaaauggcgugggcuaucagcccuacagagugguggugcugagcuucgaacugcugcaugcuccugccacagugugcggcccuaagaaaagcaccaaucucgugaagaacaaaugcgugaacuucaacuucaacggccugaccggcaccggcgugcugacagagagcaacaagaaguuccugccauuccagcaguuuggccgggauaucgccgauaccacagacgccguuagagauccccagacacuggaaauccuggacaucaccccaugcagcuucggcggagugucugugaucaccccuggcaccaacaccagcaaucagguggcagugcuguaccaggacgugaacuguaccgaagugcccguggccauucacgccgaucagcugacaccuacauggcggguguacuccaccggcagcaauguguuucagaccagagccggcugucugaucggagccgagcacgugaacaauagcuacgagugcgacauccccaucggcgcuggcaucugugccagcuaccagacacagacaaacagccccagacgggcuagaagcguggccagccagagcaucauugccuacacaaugucucugggcgccgagaacagcguggccuacuccaacaacucuugcgcuauccccaccaacuucaccaucagcgugaccaccgagauccugccuguguccaugaccaagaccagcguggacugcaccauguacaucugcggcgauuccaccgagugcuccaaccugcugcugcaguacggcagcuucugcacccagcugaauagagcccugacagggaucgccguggaacaggacaagaacacccaagagguguucgcccaagugaagcaaaucuacaagaccccuccuaucaaggacuucggcggcuucaauuucagccagauucugcccgauccuagcaagcccagcaagcggagcuucaucgaggaccugcuguucaacaaagugacacuggccgacgccggcuucaucaagcaguauggcgauugucugggcgacauugccgccagggaucugauuugcgcccagaaguuuaacggacugacagugcugccuccucugcugaccgaugagaugaucgcccaguacacaucugcccugcuggccggcacaaucacaagcggcuggacauuuggagcuggcgccgcucugcagauccccuuugcuaugcagauggccuaccgguucaacggcaucggagugacccagaaugugcuguacgagaaccagaagcugaucgccaaccaguucaacagcgccaucggcaagauccaggacagccugagcagcacagcaagcgcccugggaaagcugcaggacguggucaaccagaaugcccaggcacugaacacccuggucaagcagcuguccuccaacuucggcgccaucagcucugugcugaacgauauccugagcagacuggacaaggucgaggccgaggugcagaucgacagacugaucacaggcagacugcagagccuccagacauacgugacccagcagcugaucagagccgccgagauuagagccucugccaaucuggccgccaccaagaugucugagugugugcugggccagagcaagagaguggacuuuugcggcaagggcuaccaccugaugagcuucccucagucugccccucacggcgugguguuucugcacgugacauaugugcccgcucaagagaagaauuucaccugugcuccagccaucugccacgacggcaaagcccacuuuccuagagaaggcguguucguguccaacggcacccauugguucgugacacagcggaacuucuacgagccccagaucaucaccaccgacaacaccuucgugucuggcaacugcgacguugugaucggcauugugaacaauaccguguacgacccucugcagcccgagcuggacagcuucaaagaggaacuggacaaguacuuuaagaaccacacaagccccgacguggaccugggcgauaucagcggaaucaaugccagcgucgugaacauccagaaagagaucgaccggcugaacgagguggccaagaaucugaacgagagccugaucgaccugcaagaacuggggaaguacgagcaguacaucaag

SEQ ID NO: 12060 - RNA, 3633 nt, Artificial Sequence
  SARS-CoV-2/Wuhan/WIV05/2019__EPI_ISL_402128 spike protein CDS gc mod (1-1211)(I714C_Y1110C)
auguucguguuucuggugcugcugccccugguguccagccagugugugaaccugaccaccagaacacagcugccuccagccuacaccaacagcuucaccagaggcguguacuaccccgacaagguguucagauccagcgugcugcacucuacccaggaccuguuccugccuuucuucagcaacgugaccugguuccacgccauccacguguccggcaccaauggcaccaagagauucgacaaccccgugcugcccuucaacgacgggguguacuuugccagcaccgagaaguccaacaucaucagaggcuggaucuucggcaccacacuggacagcaagacccagagccugcugaucgugaacaacgccaccaacguggucaucaaagugugcgaguuccaguucugcaacgaccccuuccugggcgucuacuaccacaagaacaacaagagcuggauggaaagcgaguuccggguguacagcagcgccaacaacugcaccuucgaguacgugucccagccuuuccugauggaccuggaaggcaagcagggcaacuucaagaaccugcgcgaguucguguucaagaacaucgacggcuacuucaaaaucuacagcaagcacaccccuaucaaccucgugcgggaucugccucagggcuucucugcucuggaaccccugguggaucugcccaucggcaucaacaucacccgguuucagacacugcuggcccugcacagaagcuaccugacaccuggcgauagcagcagcggauggacagcuggugccgccgcuuacuaugugggcuaccugcagccuagaaccuuccugcugaaguacaacgagaacggcaccaucaccgacgccguggauugugcucuggauccucugagcgagacaaagugcacccugaaguccuucaccguggaaaagggcaucuaccagaccagcaacuuccgggugcagcccaccgaauccaucgugcgguuccccaauaucaccaaucugugccccuucggcgagguguucaaugccaccagauucgccucuguguacgccuggaaccggaagcggaucagcaauugcguggccgacuacuccgugcuguacaacuccgccagcuucagcaccuucaagugcuacggcguguccccuaccaagcugaacgaccugugcuucacaaacguguacgccgacagcuucgugauccggggagaugaagugcggcagauugccccuggacagacaggcaagaucgccgacuacaacuacaagcugcccgacgacuucaccggcugugugauugccuggaacagcaacaaccuggacuccaaagucggcggcaacuacaauuaccuguaccggcuguuccggaaguccaaucugaagcccuucgagcgggacaucagcaccgaaaucuaucaggccggcagcaccccuugcaacggcguggaaggcuucaacugcuacuucccacugcaguccuacggcuuucagcccacaaauggcgugggcuaucagcccuacagagugguggugcugagcuucgaacugcugcaugcuccugccacagugugcggcccuaagaaaagcaccaaucucgugaagaacaaaugcgugaacuucaacuucaacggccugaccggcaccggcgugcugacagagagcaacaagaaguuccugccauuccagcaguuuggccgggauaucgccgauaccacagacgccguuagagauccccagacacuggaaauccuggacaucaccccaugcagcuucggcggagugucugugaucaccccuggcaccaacaccagcaaucagguggcagugcuguaccaggacgugaacuguaccgaagugcccguggccauucacgccgaucagcugacaccuacauggcggguguacuccaccggcagcaauguguuucagaccagagccggcugucugaucggagccgagcacgugaacaauagcuacgagugcgacauccccaucggcgcuggcaucugugccagcuaccagacacagacaaacagccccagacgggcuagaagcguggccagccagagcaucauugccuacacaaugucucugggcgccgagaacagcguggccuacuccaacaacucuaucgcuugccccaccaacuucaccaucagcgugaccaccgagauccugccuguguccaugaccaagaccagcguggacugcaccauguacaucugcggcgauuccaccgagugcuccaaccugcugcugcaguacggcagcuucugcacccagcugaauagagcccugacagggaucgccguggaacaggacaagaacacccaagagguguucgcccaagugaagcaaaucuacaagaccccuccuaucaaggacuucggcggcuucaauuucagccagauucugcccgauccuagcaagcccagcaagcggagcuucaucgaggaccugcuguucaacaaagugacacuggccgacgccggcuucaucaagcaguauggcgauugucugggcgacauugccgccagggaucugauuugcgcccagaaguuuaacggacugacagugcugccuccucugcugaccgaugagaugaucgcccaguacacaucugcccugcuggccggcacaaucacaagcggcuggacauuuggagcuggcgccgcucugcagauccccuuugcuaugcagauggccuaccgguucaacggcaucggagugacccagaaugugcuguacgagaaccagaagcugaucgccaaccaguucaacagcgccaucggcaagauccaggacagccugagcagcacagcaagcgcccugggaaagcugcaggacguggucaaccagaaugcccaggcacugaacacccuggucaagcagcuguccuccaacuucggcgccaucagcucugugcugaacgauauccugagcagacuggacaaggucgaggccgaggugcagaucgacagacugaucacaggcagacugcagagccuccagacauacgugacccagcagcugaucagagccgccgagauuagagccucugccaaucuggccgccaccaagaugucugagugugugcugggccagagcaagagaguggacuuuugcggcaagggcuaccaccugaugagcuucccucagucugccccucacggcgugguguuucugcacgugacauaugugcccgcucaagagaagaauuucaccaccgcuccagccaucugccacgacggcaaagcccacuuuccuagagaaggcguguucguguccaacggcacccauugguucgugacacagcggaacuucugugagccccagaucaucaccaccgacaacaccuucgugucuggcaacugcgacguugugaucggcauugugaacaauaccguguacgacccucugcagcccgagcuggacagcuucaaagaggaacuggacaaguacuuuaagaaccacacaagccccgacguggaccugggcgauaucagcggaaucaaugccagcgucgugaacauccagaaagagaucgaccggcugaacgagguggccaagaaucugaacgagagccugaucgaccugcaagaacuggggaaguacgagcaguacaucaag

SEQ ID NO: 12061 - RNA, 3633 nt, Artificial Sequence
  SARS-CoV-2/Wuhan/WIV05/2019__EPI_ISL_402128 spike protein CDS gc mod (1-1211)(P715C_P1069C)
auguucguguuucuggugcugcugccccugguguccagccagugugugaaccugaccaccagaacacagcugccuccagccuacaccaacagcuucaccagaggcguguacuaccccgacaagguguucagauccagcgugcugcacucuacccaggaccuguuccugccuuucuucagcaacgugaccugguuccacgccauccacguguccggcaccaauggcaccaagagauucgacaaccccgugcugcccuucaacgacgggguguacuuugccagcaccgagaaguccaacaucaucagaggcuggaucuucggcaccacacuggacagcaagacccagagccugcugaucgugaacaacgccaccaacguggucaucaaagugugcgaguuccaguucugcaacgaccccuuccugggcgucuacuaccacaagaacaacaagagcuggauggaaagcgaguuccggguguacagcagcgccaacaacugcaccuucgaguacgugucccagccuuuccugauggaccuggaaggcaagcagggcaacuucaagaaccugcgcgaguucguguucaagaacaucgacggcuacuucaaaaucuacagcaagcacaccccuaucaaccucgugcgggaucugccucagggcuucucugcucuggaaccccugguggaucugcccaucggcaucaacaucacccgguuucagacacugcuggcccugcacagaagcuaccugacaccuggcgauagcagcagcggauggacagcuggugccgccgcuuacuaugugggcuaccugcagccuagaaccuuccugcugaaguacaacgagaacggcaccaucaccgacgccguggauugugcucuggauccucugagcgagacaaagugcacccugaaguccuucaccguggaaaagggcaucuaccagaccagcaacuuccgggugcagcccaccgaauccaucgugcgguuccccaauaucaccaaucugugccccuucggcgagguguucaaugccaccagauucgccucuguguacgccuggaaccggaagcggaucagcaauugcguggccgacuacuccgugcuguacaacuccgccagcuucagcaccuucaagugcuacggcguguccccuaccaagcugaacgaccugugcuucacaaacguguacgccgacagcuucgugauccggggagaugaagugcggcagauugccccuggacagacaggcaagaucgccgacuacaacuacaagcugcccgacgacuucaccggcugugugauugccuggaacagcaacaaccuggacuccaaagucggcggcaacuacaauuaccuguaccggcuguuccggaaguccaaucugaagcccuucgagcgggacaucagcaccgaaaucuaucaggccggcagcaccccuugcaacggcguggaaggcuucaacugcuacuucccacugcaguccuacggcuuucagcccacaaauggcgugggcuaucagcccuacagagugguggugcugagcuucgaacugcugcaugcuccugccacagugugcggcccuaagaaaagcaccaaucucgugaagaacaaaugcgugaacuucaacuucaacggccugaccggcaccggcgugcugacagagagcaacaagaaguuccugccauuccagcaguuuggccgggauaucgccgauaccacagacgccguuagagauccccagacacuggaaauccuggacaucaccccaugcagcuucggcggagugucugugaucaccccuggcaccaacaccagcaaucagguggcagugcuguaccaggacgugaacuguaccgaagugcccguggccauucacgccgaucagcugacaccuacauggcggguguacuccaccggcagcaauguguuucagaccagagccggcugucugaucggagccgagcacgugaacaauagcuacgagugcgacauccccaucggcgcuggcaucugugccagcuaccagacacagacaaacagccccagacgggcuagaagcguggccagccagagcaucauugccuacacaaugucucugggcgccgagaacagcguggccuacuccaacaacucuaucgcuaucugcaccaacuucaccaucagcgugaccaccgagauccugccuguguccaugaccaagaccagcguggacugcaccauguacaucugcggcgauuccaccgagugcuccaaccugcugcugcaguacggcagcuucugcacccagcugaauagagcccugacagggaucgccguggaacaggacaagaacacccaagagguguucgcccaagugaagcaaaucuacaagaccccuccuaucaaggacuucggcggcuucaauuucagccagauucugcccgauccuagcaagcccagcaagcggagcuucaucgaggaccugcuguucaacaaagugacacuggccgacgccggcuucaucaagcaguauggcgauugucugggcgacauugccgccagggaucugauuugcgcccagaaguuuaacggacugacagugcugccuccucugcugaccgaugagaugaucgcccaguacacaucugcccugcuggccggcacaaucacaagcggcuggacauuuggagcuggcgccgcucugcagauccccuuugcuaugcagauggccuaccgguucaacggcaucggagugacccagaaugugcuguacgagaaccagaagcugaucgccaaccaguucaacagcgccaucggcaagauccaggacagccugagcagcacagcaagcgcccugggaaagcugcaggacguggucaaccagaaugcccaggcacugaacacccuggucaagcagcuguccuccaacuucggcgccaucagcucugugcugaacgauauccugagcagacuggacaaggucgaggccgaggugcagaucgacagacugaucacaggcagacugcagagccuccagacauacgugacccagcagcugaucagagccgccgagauuagagccucugccaaucuggccgccaccaagaugucugagugugugcugggccagagcaagagaguggacuuuugcggcaagggcuaccaccugaugagcuucccucagucugccccucacggcgugguguuucugcacgugacauaugugugugcucaagagaagaauuucaccaccgcuccagccaucugccacgacggcaaagcccacuuuccuagagaaggcguguucguguccaacggcacccauugguucgugacacagcggaacuucuacgagccccagaucaucaccaccgacaacaccuucgugucuggcaacugcgacguugugaucggcauugugaacaauaccguguacgacccucugcagcccgagcuggacagcuucaaagaggaacuggacaaguacuuuaagaaccacacaagccccgacguggaccugggcgauaucagcggaaucaaugccagcgucgugaacauccagaaagagaucgaccggcugaacgagguggccaagaaucugaacgagagccugaucgaccugcaagaacuggggaaguacgagcaguacaucaag

SEQ ID NO: 12062 - RNA, 3633 nt, Artificial Sequence
  SARS-CoV-2/Wuhan/WIV05/2019__EPI_ISL_402128 spike protein CDS gc mod (1-1211)(G889C_L1034C)
auguucguguuucuggugcugcugccccugguguccagccagugugugaaccugaccaccagaacacagcugccuccagccuacaccaacagcuucaccagaggcguguacuaccccgacaagguguucagauccagcgugcugcacucuacccaggaccuguuccugccuuucuucagcaacgugaccugguuccacgccauccacguguccggcaccaauggcaccaagagauucgacaaccccgugcugcccuucaacgacgggguguacuuugccagcaccgagaaguccaacaucaucagaggcuggaucuucggcaccacacuggacagcaagacccagagccugcugaucgugaacaacgccaccaacguggucaucaaagugugcgaguuccaguucugcaacgaccccuuccugggcgucuacuaccacaagaacaacaagagcuggauggaaagcgaguuccggguguacagcagcgccaacaacugcaccuucgaguacgugucccagccuuuccugauggaccuggaaggcaagcagggcaacuucaagaaccugcgcgaguucguguucaagaacaucgacggcuacuucaaaaucuacagcaagcacaccccuaucaaccucgugcgggaucugccucagggcuucucugcucuggaaccccugguggaucugcccaucggcaucaacaucacccgguuucagacacugcuggcccugcacagaagcuaccugacaccuggcgauagcagcagcggauggacagcuggugccgccgcuuacuaugugggcuaccugcagccuagaaccuuccugcugaaguacaacgagaacggcaccaucaccgacgccguggauugugcucuggauccucugagcgagacaaagugcacccugaaguccuucaccguggaaaagggcaucuaccagaccagcaacuuccgggugcagcccaccgaauccaucgugcgguuccccaauaucaccaaucugugccccuucggcgagguguucaaugccaccagauucgccucuguguacgccuggaaccggaagcggaucagcaauugcguggccgacuacuccgugcuguacaacuccgccagcuucagcaccuucaagugcuacggcguguccccuaccaagcugaacgaccugugcuucacaaacguguacgccgacagcuucgugauccggggagaugaagugcggcagauugccccuggacagacaggcaagaucgccgacuacaacuacaagcugcccgacgacuucaccggcugugugauugccuggaacagcaacaaccuggacuccaaagucggcggcaacuacaauuaccuguaccggcuguuccggaaguccaaucugaagcccuucgagcgggacaucagcaccgaaaucuaucaggccggcagcaccccuugcaacggcguggaaggcuucaacugcuacuucccacugcaguccuacggcuuucagcccacaaauggcgugggcuaucagcccuacagagugguggugcugagcuucgaacugcugcaugcuccugccacagugugcggcccuaagaaaagcaccaaucucgugaagaacaaaugcgugaacuucaacuucaacggccugaccggcaccggcgugcugacagagagcaacaagaaguuccugccauuccagcaguuuggccgggauaucgccgauaccacagacgccguuagagauccccagacacuggaaauccuggacaucaccccaugcagcuucggcggagugucugugaucaccccuggcaccaacaccagcaaucagguggcagugcuguaccaggacgugaacuguaccgaagugcccguggccauucacgccgaucagcugacaccuacauggcggguguacuccaccggcagcaauguguuucagaccagagccggcugucugaucggagccgagcacgugaacaauagcuacgagugcgacauccccaucggcgcuggcaucugugccagcuaccagacacagacaaacagccccagacgggcuagaagcguggccagccagagcaucauugccuacacaaugucucugggcgccgagaacagcguggccuacuccaacaacucuaucgcuauccccaccaacuucaccaucagcgugaccaccgagauccugccuguguccaugaccaagaccagcguggacugcaccauguacaucugcggcgauuccaccgagugcuccaaccugcugcugcaguacggcagcuucugcacccagcugaauagagcccugacagggaucgccguggaacaggacaagaacacccaagagguguucgcccaagugaagcaaaucuacaagaccccuccuaucaaggacuucggcggcuucaauuucagccagauucugcccgauccuagcaagcccagcaagcggagcuucaucgaggaccugcuguucaacaaagugacacuggccgacgccggcuucaucaagcaguauggcgauugucugggcgacauugccgccagggaucugauuugcgcccagaaguuuaacggacugacagugcugccuccucugcugaccgaugagaugaucgcccaguacacaucugcccugcuggccggcacaaucacaagcggcuggacauuuugcgcuggcgccgcucugcagauccccuuugcuaugcagauggccuaccgguucaacggcaucggagugacccagaaugugcuguacgagaaccagaagcugaucgccaaccaguucaacagcgccaucggcaagauccaggacagccugagcagcacagcaagcgcccugggaaagcugcaggacguggucaaccagaaugcccaggcacugaacacccuggucaagcagcuguccuccaacuucggcgccaucagcucugugcugaacgauauccugagcagacuggacaaggucgaggccgaggugcagaucgacagacugaucacaggcagacugcagagccuccagacauacgugacccagcagcugaucagagccgccgagauuagagccucugccaaucuggccgccaccaagaugucugaguguguguguggccagagcaagagaguggacuuuugcggcaagggcuaccaccugaugagcuucccucagucugccccucacggcgugguguuucugcacgugacauaugugcccgcucaagagaagaauuucaccaccgcuccagccaucugccacgacggcaaagcccacuuuccuagagaaggcguguucguguccaacggcacccauugguucgugacacagcggaacuucuacgagccccagaucaucaccaccgacaacaccuucgugucuggcaacugcgacguugugaucggcauugugaacaauaccguguacgacccucugcagcccgagcuggacagcuucaaagaggaacuggacaaguacuuuaagaaccacacaagccccgacguggaccugggcgauaucagcggaaucaaugccagcgucgugaacauccagaaagagaucgaccggcugaacgagguggccaagaaucugaacgagagccugaucgaccugcaagaacuggggaaguacgagcaguacaucaag

SEQ ID NO: 12063 - RNA, 3633 nt, Artificial Sequence
  SARS-CoV-2/Wuhan/WIV05/2019__EPI_ISL_402128 spike protein CDS gc mod (1-1211)(I909C_Y1047C)
auguucguguuucuggugcugcugccccugguguccagccagugugugaaccugaccaccagaacacagcugccuccagccuacaccaacagcuucaccagaggcguguacuaccccgacaagguguucagauccagcgugcugcacucuacccaggaccuguuccugccuuucuucagcaacgugaccugguuccacgccauccacguguccggcaccaauggcaccaagagauucgacaaccccgugcugcccuucaacgacgggguguacuuugccagcaccgagaaguccaacaucaucagaggcuggaucuucggcaccacacuggacagcaagacccagagccugcugaucgugaacaacgccaccaacguggucaucaaagugugcgaguuccaguucugcaacgaccccuuccugggcgucuacuaccacaagaacaacaagagcuggauggaaagcgaguuccggguguacagcagcgccaacaacugcaccuucgaguacgugucccagccuuuccugauggaccuggaaggcaagcagggcaacuucaagaaccugcgcgaguucguguucaagaacaucgacggcuacuucaaaaucuacagcaagcacaccccuaucaaccucgugcgggaucugccucagggcuucucugcucuggaaccccugguggaucugcccaucggcaucaacaucacccgguuucagacacugcuggcccugcacagaagcuaccugacaccuggcgauagcagcagcggauggacagcuggugccgccgcuuacuaugugggcuaccugcagccuagaaccuuccugcugaaguacaacgagaacggcaccaucaccgacgccguggauugugcucuggauccucugagcgagacaaagugcacccugaaguccuucaccguggaaaagggcaucuaccagaccagcaacuuccgggugcagcccaccgaauccaucgugcgguuccccaauaucaccaaucugugccccuucggcgagguguucaaugccaccagauucgccucuguguacgccuggaaccggaagcggaucagcaauugcguggccgacuacuccgugcuguacaacuccgccagcuucagcaccuucaagugcuacggcguguccccuaccaagcugaacgaccugugcuucacaaacguguacgccgacagcuucgugauccggggagaugaagugcggcagauugccccuggacagacaggcaagaucgccgacuacaacuacaagcugcccgacgacuucaccggcugugugauugccuggaacagcaacaaccuggacuccaaagucggcggcaacuacaauuaccuguaccggcuguuccggaaguccaaucugaagcccuucgagcgggacaucagcaccgaaaucuaucaggccggcagcaccccuugcaacggcguggaaggcuucaacugcuacuucccacugcaguccuacggcuuucagcccacaaauggcgugggcuaucagcccuacagagugguggugcugagcuucgaacugcugcaugcuccugccacagugugcggcccuaagaaaagcaccaaucucgugaagaacaaaugcgugaacuucaacuucaacggccugaccggcaccggcgugcugacagagagcaacaagaaguuccugccauuccagcaguuuggccgggauaucgccgauaccacagacgccguuagagauccccagacacuggaaauccuggacaucaccccaugcagcuucggcggagugucugugaucaccccuggcaccaacaccagcaaucagguggcagugcuguaccaggacgugaacuguaccgaagugcccguggccauucacgccgaucagcugacaccuacauggcggguguacuccaccggcagcaauguguuucagaccagagccggcugucugaucggagccgagcacgugaacaauagcuacgagugcgacauccccaucggcgcuggcaucugugccagcuaccagacacagacaaacagccccagacgggcuagaagcguggccagccagagcaucauugccuacacaaugucucugggcgccgagaacagcguggccuacuccaacaacucuaucgcuauccccaccaacuucaccaucagcgugaccaccgagauccugccuguguccaugaccaagaccagcguggacugcaccauguacaucugcggcgauuccaccgagugcuccaaccugcugcugcaguacggcagcuucugcacccagcugaauagagcccugacagggaucgccguggaacaggacaagaacacccaagagguguucgcccaagugaagcaaaucuacaagaccccuccuaucaaggacuucggcggcuucaauuucagccagauucugcccgauccuagcaagcccagcaagcggagcuucaucgaggaccugcuguucaacaaagugacacuggccgacgccggcuucaucaagcaguauggcgauugucugggcgacauugccgccagggaucugauuugcgcccagaaguuuaacggacugacagugcugccuccucugcugaccgaugagaugaucgcccaguacacaucugcccugcuggccggcacaaucacaagcggcuggacauuuggagcuggcgccgcucugcagauccccuuugcuaugcagauggccuaccgguucaacggcugcggagugacccagaaugugcuguacgagaaccagaagcugaucgccaaccaguucaacagcgccaucggcaagauccaggacagccugagcagcacagcaagcgcccugggaaagcugcaggacguggucaaccagaaugcccaggcacugaacacccuggucaagcagcuguccuccaacuucggcgccaucagcucugugcugaacgauauccugagcagacuggacaaggucgaggccgaggugcagaucgacagacugaucacaggcagacugcagagccuccagacauacgugacccagcagcugaucagagccgccgagauuagagccucugccaaucuggccgccaccaagaugucugagugugugcugggccagagcaagagaguggacuuuugcggcaagggcugucaccugaugagcuucccucagucugccccucacggcgugguguuucugcacgugacauaugugcccgcucaagagaagaauuucaccaccgcuccagccaucugccacgacggcaaagcccacuuuccuagagaaggcguguucguguccaacggcacccauugguucgugacacagcggaacuucuacgagccccagaucaucaccaccgacaacaccuucgugucuggcaacugcgacguugugaucggcauugugaacaauaccguguacgacccucugcagcccgagcuggacagcuucaaagaggaacuggacaaguacuuuaagaaccacacaagccccgacguggaccugggcgauaucagcggaaucaaugccagcgucgugaacauccagaaagagaucgaccggcugaacgagguggccaagaaucugaacgagagccugaucgaccugcaagaacuggggaaguacgagcaguacaucaag

SEQ ID NO: 12064 - RNA, 3633 nt, Artificial Sequence
  SARS-CoV-2/Wuhan/WIV05/2019__EPI_ISL_402128 spike protein CDS gc mod (1-1211)(Q965C_S1003C)
auguucguguuucuggugcugcugccccugguguccagccagugugugaaccugaccaccagaacacagcugccuccagccuacaccaacagcuucaccagaggcguguacuaccccgacaagguguucagauccagcgugcugcacucuacccaggaccuguuccugccuuucuucagcaacgugaccugguuccacgccauccacguguccggcaccaauggcaccaagagauucgacaaccccgugcugcccuucaacgacgggguguacuuugccagcaccgagaaguccaacaucaucagaggcuggaucuucggcaccacacuggacagcaagacccagagccugcugaucgugaacaacgccaccaacguggucaucaaagugugcgaguuccaguucugcaacgaccccuuccugggcgucuacuaccacaagaacaacaagagcuggauggaaagcgaguuccggguguacagcagcgccaacaacugcaccuucgaguacgugucccagccuuuccugauggaccuggaaggcaagcagggcaacuucaagaaccugcgcgaguucguguucaagaacaucgacggcuacuucaaaaucuacagcaagcacaccccuaucaaccucgugcgggaucugccucagggcuucucugcucuggaaccccugguggaucugcccaucggcaucaacaucacccgguuucagacacugcuggcccugcacagaagcuaccugacaccuggcgauagcagcagcggauggacagcuggugccgccgcuuacuaugugggcuaccugcagccuagaaccuuccugcugaaguacaacgagaacggcaccaucaccgacgccguggauugugcucuggauccucugagcgagacaaagugcacccugaaguccuucaccguggaaaagggcaucuaccagaccagcaacuuccgggugcagcccaccgaauccaucgugcgguuccccaauaucaccaaucugugccccuucggcgagguguucaaugccaccagauucgccucuguguacgccuggaaccggaagcggaucagcaauugcguggccgacuacuccgugcuguacaacuccgccagcuucagcaccuucaagugcuacggcguguccccuaccaagcugaacgaccugugcuucacaaacguguacgccgacagcuucgugauccggggagaugaagugcggcagauugccccuggacagacaggcaagaucgccgacuacaacuacaagcugcccgacgacuucaccggcugugugauugccuggaacagcaacaaccuggacuccaaagucggcggcaacuacaauuaccuguaccggcuguuccggaaguccaaucugaagcccuucgagcgggacaucagcaccgaaaucuaucaggccggcagcaccccuugcaacggcguggaaggcuucaacugcuacuucccacugcaguccuacggcuuucagcccacaaauggcgugggcuaucagcccuacagagugguggugcugagcuucgaacugcugcaugcuccugccacagugugcggcccuaagaaaagcaccaaucucgugaagaacaaaugcgugaacuucaacuucaacggccugaccggcaccggcgugcugacagagagcaacaagaaguuccugccauuccagcaguuuggccgggauaucgccgauaccacagacgccguuagagauccccagacacuggaaauccuggacaucaccccaugcagcuucggcggagugucugugaucaccccuggcaccaacaccagcaaucagguggcagugcuguaccaggacgugaacuguaccgaagugcccguggccauucacgccgaucagcugacaccuacauggcggguguacuccaccggcagcaauguguuucagaccagagccggcugucugaucggagccgagcacgugaacaauagcuacgagugcgacauccccaucggcgcuggcaucugugccagcuaccagacacagacaaacagccccagacgggcuagaagcguggccagccagagcaucauugccuacacaaugucucugggcgccgagaacagcguggccuacuccaacaacucuaucgcuauccccaccaacuucaccaucagcgugaccaccgagauccugccuguguccaugaccaagaccagcguggacugcaccauguacaucugcggcgauuccaccgagugcuccaaccugcugcugcaguacggcagcuucugcacccagcugaauagagcccugacagggaucgccguggaacaggacaagaacacccaagagguguucgcccaagugaagcaaaucuacaagaccccuccuaucaaggacuucggcggcuucaauuucagccagauucugcccgauccuagcaagcccagcaagcggagcuucaucgaggaccugcuguucaacaaagugacacuggccgacgccggcuucaucaagcaguauggcgauugucugggcgacauugccgccagggaucugauuugcgcccagaaguuuaacggacugacagugcugccuccucugcugaccgaugagaugaucgcccaguacacaucugcccugcuggccggcacaaucacaagcggcuggacauuuggagcuggcgccgcucugcagauccccuuugcuaugcagauggccuaccgguucaacggcaucggagugacccagaaugugcuguacgagaaccagaagcugaucgccaaccaguucaacagcgccaucggcaagauccaggacagccugagcagcacagcaagcgcccugggaaagcugcaggacguggucaaccagaaugcccaggcacugaacacccuggucaagugccuguccuccaacuucggcgccaucagcucugugcugaacgauauccugagcagacuggacaaggucgaggccgaggugcagaucgacagacugaucacaggcagacugcagugucuccagacauacgugacccagcagcugaucagagccgccgagauuagagccucugccaaucuggccgccaccaagaugucugagugugugcugggccagagcaagagaguggacuuuugcggcaagggcuaccaccugaugagcuucccucagucugccccucacggcgugguguuucugcacgugacauaugugcccgcucaagagaagaauuucaccaccgcuccagccaucugccacgacggcaaagcccacuuuccuagagaaggcguguucguguccaacggcacccauugguucgugacacagcggaacuucuacgagccccagaucaucaccaccgacaacaccuucgugucuggcaacugcgacguugugaucggcauugugaacaauaccguguacgacccucugcagcccgagcuggacagcuucaaagaggaacuggacaaguacuuuaagaaccacacaagccccgacguggaccugggcgauaucagcggaaucaaugccagcgucgugaacauccagaaagagaucgaccggcugaacgagguggccaagaaucugaacgagagccugaucgaccugcaagaacuggggaaguacgagcaguacaucaag

SEQ ID NO: 12065 - RNA, 3633 nt, Artificial Sequence
  SARS-CoV-2/Wuhan/WIV05/2019__EPI_ISL_402128 spike protein CDS gc mod (1-1211)(F970C_G999C)
auguucguguuucuggugcugcugccccugguguccagccagugugugaaccugaccaccagaacacagcugccuccagccuacaccaacagcuucaccagaggcguguacuaccccgacaagguguucagauccagcgugcugcacucuacccaggaccuguuccugccuuucuucagcaacgugaccugguuccacgccauccacguguccggcaccaauggcaccaagagauucgacaaccccgugcugcccuucaacgacgggguguacuuugccagcaccgagaaguccaacaucaucagaggcuggaucuucggcaccacacuggacagcaagacccagagccugcugaucgugaacaacgccaccaacguggucaucaaagugugcgaguuccaguucugcaacgaccccuuccugggcgucuacuaccacaagaacaacaagagcuggauggaaagcgaguuccggguguacagcagcgccaacaacugcaccuucgaguacgugucccagccuuuccugauggaccuggaaggcaagcagggcaacuucaagaaccugcgcgaguucguguucaagaacaucgacggcuacuucaaaaucuacagcaagcacaccccuaucaaccucgugcgggaucugccucagggcuucucugcucuggaaccccugguggaucugcccaucggcaucaacaucacccgguuucagacacugcuggcccugcacagaagcuaccugacaccuggcgauagcagcagcggauggacagcuggugccgccgcuuacuaugugggcuaccugcagccuagaaccuuccugcugaaguacaacgagaacggcaccaucaccgacgccguggauugugcucuggauccucugagcgagacaaagugcacccugaaguccuucaccguggaaaagggcaucuaccagaccagcaacuuccgggugcagcccaccgaauccaucgugcgguuccccaauaucaccaaucugugccccuucggcgagguguucaaugccaccagauucgccucuguguacgccuggaaccggaagcggaucagcaauugcguggccgacuacuccgugcuguacaacuccgccagcuucagcaccuucaagugcuacggcguguccccuaccaagcugaacgaccugugcuucacaaacguguacgccgacagcuucgugauccggggagaugaagugcggcagauugccccuggacagacaggcaagaucgccgacuacaacuacaagcugcccgacgacuucaccggcugugugauugccuggaacagcaacaaccuggacuccaaagucggcggcaacuacaauuaccuguaccggcuguuccggaaguccaaucugaagcccuucgagcgggacaucagcaccgaaaucuaucaggccggcagcaccccuugcaacggcguggaaggcuucaacugcuacuucccacugcaguccuacggcuuucagcccacaaauggcgugggcuaucagcccuacagagugguggugcugagcuucgaacugcugcaugcuccugccacagugugcggcccuaagaaaagcaccaaucucgugaagaacaaaugcgugaacuucaacuucaacggccugaccggcaccggcgugcugacagagagcaacaagaaguuccugccauuccagcaguuuggccgggauaucgccgauaccacagacgccguuagagauccccagacacuggaaauccuggacaucaccccaugcagcuucggcggagugucugugaucaccccuggcaccaacaccagcaaucagguggcagugcuguaccaggacgugaacuguaccgaagugcccguggccauucacgccgaucagcugacaccuacauggcggguguacuccaccggcagcaauguguuucagaccagagccggcugucugaucggagccgagcacgugaacaauagcuacgagugcgacauccccaucggcgcuggcaucugugccagcuaccagacacagacaaacagccccagacgggcuagaagcguggccagccagagcaucauugccuacacaaugucucugggcgccgagaacagcguggccuacuccaacaacucuaucgcuauccccaccaacuucaccaucagcgugaccaccgagauccugccuguguccaugaccaagaccagcguggacugcaccauguacaucugcggcgauuccaccgagugcuccaaccugcugcugcaguacggcagcuucugcacccagcugaauagagcccugacagggaucgccguggaacaggacaagaacacccaagagguguucgcccaagugaagcaaaucuacaagaccccuccuaucaaggacuucggcggcuucaauuucagccagauucugcccgauccuagcaagcccagcaagcggagcuucaucgaggaccugcuguucaacaaagugacacuggccgacgccggcuucaucaagcaguauggcgauugucugggcgacauugccgccagggaucugauuugcgcccagaaguuuaacggacugacagugcugccuccucugcugaccgaugagaugaucgcccaguacacaucugcccugcuggccggcacaaucacaagcggcuggacauuuggagcuggcgccgcucugcagauccccuuugcuaugcagauggccuaccgguucaacggcaucggagugacccagaaugugcuguacgagaaccagaagcugaucgccaaccaguucaacagcgccaucggcaagauccaggacagccugagcagcacagcaagcgcccugggaaagcugcaggacguggucaaccagaaugcccaggcacugaacacccuggucaagcagcuguccuccaacugcggcgccaucagcucugugcugaacgauauccugagcagacuggacaaggucgaggccgaggugcagaucgacagacugaucacauguagacugcagagccuccagacauacgugacccagcagcugaucagagccgccgagauuagagccucugccaaucuggccgccaccaagaugucugagugugugcugggccagagcaagagaguggacuuuugcggcaagggcuaccaccugaugagcuucccucagucugccccucacggcgugguguuucugcacgugacauaugugcccgcucaagagaagaauuucaccaccgcuccagccaucugccacgacggcaaagcccacuuuccuagagaaggcguguucguguccaacggcacccauugguucgugacacagcggaacuucuacgagccccagaucaucaccaccgacaacaccuucgugucuggcaacugcgacguugugaucggcauugugaacaauaccguguacgacccucugcagcccgagcuggacagcuucaaagaggaacuggacaaguacuuuaagaaccacacaagccccgacguggaccugggcgauaucagcggaaucaaugccagcgucgugaacauccagaaagagaucgaccggcugaacgagguggccaagaaucugaacgagagccugaucgaccugcaagaacuggggaaguacgagcaguacaucaag

SEQ ID NO: 12066 - RNA, 3633 nt, Artificial Sequence
  SARS-CoV-2/Wuhan/WIV05/2019__EPI_ISL_402128 spike protein CDS gc mod (1-1211)(A972C_R995C)
auguucguguuucuggugcugcugccccugguguccagccagugugugaaccugaccaccagaacacagcugccuccagccuacaccaacagcuucaccagaggcguguacuaccccgacaagguguucagauccagcgugcugcacucuacccaggaccuguuccugccuuucuucagcaacgugaccugguuccacgccauccacguguccggcaccaauggcaccaagagauucgacaaccccgugcugcccuucaacgacgggguguacuuugccagcaccgagaaguccaacaucaucagaggcuggaucuucggcaccacacuggacagcaagacccagagccugcugaucgugaacaacgccaccaacguggucaucaaagugugcgaguuccaguucugcaacgaccccuuccugggcgucuacuaccacaagaacaacaagagcuggauggaaagcgaguuccggguguacagcagcgccaacaacugcaccuucgaguacgugucccagccuuuccugauggaccuggaaggcaagcagggcaacuucaagaaccugcgcgaguucguguucaagaacaucgacggcuacuucaaaaucuacagcaagcacaccccuaucaaccucgugcgggaucugccucagggcuucucugcucuggaaccccugguggaucugcccaucggcaucaacaucacccgguuucagacacugcuggcccugcacagaagcuaccugacaccuggcgauagcagcagcggauggacagcuggugccgccgcuuacuaugugggcuaccugcagccuagaaccuuccugcugaaguacaacgagaacggcaccaucaccgacgccguggauugugcucuggauccucugagcgagacaaagugcacccugaaguccuucaccguggaaaagggcaucuaccagaccagcaacuuccgggugcagcccaccgaauccaucgugcgguuccccaauaucaccaaucugugccccuucggcgagguguucaaugccaccagauucgccucuguguacgccuggaaccggaagcggaucagcaauugcguggccgacuacuccgugcuguacaacuccgccagcuucagcaccuucaagugcuacggcguguccccuaccaagcugaacgaccugugcuucacaaacguguacgccgacagcuucgugauccggggagaugaagugcggcagauugccccuggacagacaggcaagaucgccgacuacaacuacaagcugcccgacgacuucaccggcugugugauugccuggaacagcaacaaccuggacuccaaagucggcggcaacuacaauuaccuguaccggcuguuccggaaguccaaucugaagcccuucgagcgggacaucagcaccgaaaucuaucaggccggcagcaccccuugcaacggcguggaaggcuucaacugcuacuucccacugcaguccuacggcuuucagcccacaaauggcgugggcuaucagcccuacagagugguggugcugagcuucgaacugcugcaugcuccugccacagugugcggcccuaagaaaagcaccaaucucgugaagaacaaaugcgugaacuucaacuucaacggccugaccggcaccggcgugcugacagagagcaacaagaaguuccugccauuccagcaguuuggccgggauaucgccgauaccacagacgccguuagagauccccagacacuggaaauccuggacaucaccccaugcagcuucggcggagugucugugaucaccccuggcaccaacaccagcaaucagguggcagugcuguaccaggacgugaacuguaccgaagugcccguggccauucacgccgaucagcugacaccuacauggcggguguacuccaccggcagcaauguguuucagaccagagccggcugucugaucggagccgagcacgugaacaauagcuacgagugcgacauccccaucggcgcuggcaucugugccagcuaccagacacagacaaacagccccagacgggcuagaagcguggccagccagagcaucauugccuacacaaugucucugggcgccgagaacagcguggccuacuccaacaacucuaucgcuauccccaccaacuucaccaucagcgugaccaccgagauccugccuguguccaugaccaagaccagcguggacugcaccauguacaucugcggcgauuccaccgagugcuccaaccugcugcugcaguacggcagcuucugcacccagcugaauagagcccugacagggaucgccguggaacaggacaagaacacccaagagguguucgcccaagugaagcaaaucuacaagaccccuccuaucaaggacuucggcggcuucaauuucagccagauucugcccgauccuagcaagcccagcaagcggagcuucaucgaggaccugcuguucaacaaagugacacuggccgacgccggcuucaucaagcaguauggcgauugucugggcgacauugccgccagggaucugauuugcgcccagaaguuuaacggacugacagugcugccuccucugcugaccgaugagaugaucgcccaguacacaucugcccugcuggccggcacaaucacaagcggcuggacauuuggagcuggcgccgcucugcagauccccuuugcuaugcagauggccuaccgguucaacggcaucggagugacccagaaugugcuguacgagaaccagaagcugaucgccaaccaguucaacagcgccaucggcaagauccaggacagccugagcagcacagcaagcgcccugggaaagcugcaggacguggucaaccagaaugcccaggcacugaacacccuggucaagcagcuguccuccaacuucggcugcaucagcucugugcugaacgauauccugagcagacuggacaaggucgaggccgaggugcagaucgacugucugaucacaggcagacugcagagccuccagacauacgugacccagcagcugaucagagccgccgagauuagagccucugccaaucuggccgccaccaagaugucugagugugugcugggccagagcaagagaguggacuuuugcggcaagggcuaccaccugaugagcuucccucagucugccccucacggcgugguguuucugcacgugacauaugugcccgcucaagagaagaauuucaccaccgcuccagccaucugccacgacggcaaagcccacuuuccuagagaaggcguguucguguccaacggcacccauugguucgugacacagcggaacuucuacgagccccagaucaucaccaccgacaacaccuucgugucuggcaacugcgacguugugaucggcauugugaacaauaccguguacgacccucugcagcccgagcuggacagcuucaaagaggaacuggacaaguacuuuaagaaccacacaagccccgacguggaccugggcgauaucagcggaaucaaugccagcgucgugaacauccagaaagagaucgaccggcugaacgagguggccaagaaucugaacgagagccugaucgaccugcaagaacuggggaaguacgagcaguacaucaag

SEQ ID NO: 12067 - RNA, 3633 nt, Artificial Sequence
  SARS-CoV-2/Wuhan/WIV05/2019__EPI_ISL_402128 spike protein CDS gc mod (1-1211)(A890C_V1040C)
auguucguguuucuggugcugcugccccugguguccagccagugugugaaccugaccaccagaacacagcugccuccagccuacaccaacagcuucaccagaggcguguacuaccccgacaagguguucagauccagcgugcugcacucuacccaggaccuguuccugccuuucuucagcaacgugaccugguuccacgccauccacguguccggcaccaauggcaccaagagauucgacaaccccgugcugcccuucaacgacgggguguacuuugccagcaccgagaaguccaacaucaucagaggcuggaucuucggcaccacacuggacagcaagacccagagccugcugaucgugaacaacgccaccaacguggucaucaaagugugcgaguuccaguucugcaacgaccccuuccugggcgucuacuaccacaagaacaacaagagcuggauggaaagcgaguuccggguguacagcagcgccaacaacugcaccuucgaguacgugucccagccuuuccugauggaccuggaaggcaagcagggcaacuucaagaaccugcgcgaguucguguucaagaacaucgacggcuacuucaaaaucuacagcaagcacaccccuaucaaccucgugcgggaucugccucagggcuucucugcucuggaaccccugguggaucugcccaucggcaucaacaucacccgguuucagacacugcuggcccugcacagaagcuaccugacaccuggcgauagcagcagcggauggacagcuggugccgccgcuuacuaugugggcuaccugcagccuagaaccuuccugcugaaguacaacgagaacggcaccaucaccgacgccguggauugugcucuggauccucugagcgagacaaagugcacccugaaguccuucaccguggaaaagggcaucuaccagaccagcaacuuccgggugcagcccaccgaauccaucgugcgguuccccaauaucaccaaucugugccccuucggcgagguguucaaugccaccagauucgccucuguguacgccuggaaccggaagcggaucagcaauugcguggccgacuacuccgugcuguacaacuccgccagcuucagcaccuucaagugcuacggcguguccccuaccaagcugaacgaccugugcuucacaaacguguacgccgacagcuucgugauccggggagaugaagugcggcagauugccccuggacagacaggcaagaucgccgacuacaacuacaagcugcccgacgacuucaccggcugugugauugccuggaacagcaacaaccuggacuccaaagucggcggcaacuacaauuaccuguaccggcuguuccggaaguccaaucugaagcccuucgagcgggacaucagcaccgaaaucuaucaggccggcagcaccccuugcaacggcguggaaggcuucaacugcuacuucccacugcaguccuacggcuuucagcccacaaauggcgugggcuaucagcccuacagagugguggugcugagcuucgaacugcugcaugcuccugccacagugugcggcccuaagaaaagcaccaaucucgugaagaacaaaugcgugaacuucaacuucaacggccugaccggcaccggcgugcugacagagagcaacaagaaguuccugccauuccagcaguuuggccgggauaucgccgauaccacagacgccguuagagauccccagacacuggaaauccuggacaucaccccaugcagcuucggcggagugucugugaucaccccuggcaccaacaccagcaaucagguggcagugcuguaccaggacgugaacuguaccgaagugcccguggccauucacgccgaucagcugacaccuacauggcggguguacuccaccggcagcaauguguuucagaccagagccggcugucugaucggagccgagcacgugaacaauagcuacgagugcgacauccccaucggcgcuggcaucugugccagcuaccagacacagacaaacagccccagacgggcuagaagcguggccagccagagcaucauugccuacacaaugucucugggcgccgagaacagcguggccuacuccaacaacucuaucgcuauccccaccaacuucaccaucagcgugaccaccgagauccugccuguguccaugaccaagaccagcguggacugcaccauguacaucugcggcgauuccaccgagugcuccaaccugcugcugcaguacggcagcuucugcacccagcugaauagagcccugacagggaucgccguggaacaggacaagaacacccaagagguguucgcccaagugaagcaaaucuacaagaccccuccuaucaaggacuucggcggcuucaauuucagccagauucugcccgauccuagcaagcccagcaagcggagcuucaucgaggaccugcuguucaacaaagugacacuggccgacgccggcuucaucaagcaguauggcgauugucugggcgacauugccgccagggaucugauuugcgcccagaaguuuaacggacugacagugcugccuccucugcugaccgaugagaugaucgcccaguacacaucugcccugcuggccggcacaaucacaagcggcuggacauuuggaugcggcgccgcucugcagauccccuuugcuaugcagauggccuaccgguucaacggcaucggagugacccagaaugugcuguacgagaaccagaagcugaucgccaaccaguucaacagcgccaucggcaagauccaggacagccugagcagcacagcaagcgcccugggaaagcugcaggacguggucaaccagaaugcccaggcacugaacacccuggucaagcagcuguccuccaacuucggcgccaucagcucugugcugaacgauauccugagcagacuggacaaggucgaggccgaggugcagaucgacagacugaucacaggcagacugcagagccuccagacauacgugacccagcagcugaucagagccgccgagauuagagccucugccaaucuggccgccaccaagaugucugagugugugcugggccagagcaagagaugugacuuuugcggcaagggcuaccaccugaugagcuucccucagucugccccucacggcgugguguuucugcacgugacauaugugcccgcucaagagaagaauuucaccaccgcuccagccaucugccacgacggcaaagcccacuuuccuagagaaggcguguucguguccaacggcacccauugguucgugacacagcggaacuucuacgagccccagaucaucaccaccgacaacaccuucgugucuggcaacugcgacguugugaucggcauugugaacaauaccguguacgacccucugcagcccgagcuggacagcuucaaagaggaacuggacaaguacuuuaagaaccacacaagccccgacguggaccugggcgauaucagcggaaucaaugccagcgucgugaacauccagaaagagaucgaccggcugaacgagguggccaagaaucugaacgagagccugaucgaccugcaagaacuggggaaguacgagcaguacaucaag

SEQ ID NO: 12068 - RNA, 3633 nt, Artificial Sequence
  SARS-CoV-2/Wuhan/WIV05/2019__EPI_ISL_402128 spike protein CDS gc mod (1-1211)(T874C_S1055C)
auguucguguuucuggugcugcugccccugguguccagccagugugugaaccugaccaccagaacacagcugccuccagccuacaccaacagcuucaccagaggcguguacuaccccgacaagguguucagauccagcgugcugcacucuacccaggaccuguuccugccuuucuucagcaacgugaccugguuccacgccauccacguguccggcaccaauggcaccaagagauucgacaaccccgugcugcccuucaacgacgggguguacuuugccagcaccgagaaguccaacaucaucagaggcuggaucuucggcaccacacuggacagcaagacccagagccugcugaucgugaacaacgccaccaacguggucaucaaagugugcgaguuccaguucugcaacgaccccuuccugggcgucuacuaccacaagaacaacaagagcuggauggaaagcgaguuccggguguacagcagcgccaacaacugcaccuucgaguacgugucccagccuuuccugauggaccuggaaggcaagcagggcaacuucaagaaccugcgcgaguucguguucaagaacaucgacggcuacuucaaaaucuacagcaagcacaccccuaucaaccucgugcgggaucugccucagggcuucucugcucuggaaccccugguggaucugcccaucggcaucaacaucacccgguuucagacacugcuggcccugcacagaagcuaccugacaccuggcgauagcagcagcggauggacagcuggugccgccgcuuacuaugugggcuaccugcagccuagaaccuuccugcugaaguacaacgagaacggcaccaucaccgacgccguggauugugcucuggauccucugagcgagacaaagugcacccugaaguccuucaccguggaaaagggcaucuaccagaccagcaacuuccgggugcagcccaccgaauccaucgugcgguuccccaauaucaccaaucugugccccuucggcgagguguucaaugccaccagauucgccucuguguacgccuggaaccggaagcggaucagcaauugcguggccgacuacuccgugcuguacaacuccgccagcuucagcaccuucaagugcuacggcguguccccuaccaagcugaacgaccugugcuucacaaacguguacgccgacagcuucgugauccggggagaugaagugcggcagauugccccuggacagacaggcaagaucgccgacuacaacuacaagcugcccgacgacuucaccggcugugugauugccuggaacagcaacaaccuggacuccaaagucggcggcaacuacaauuaccuguaccggcuguuccggaaguccaaucugaagcccuucgagcgggacaucagcaccgaaaucuaucaggccggcagcaccccuugcaacggcguggaaggcuucaacugcuacuucccacugcaguccuacggcuuucagcccacaaauggcgugggcuaucagcccuacagagugguggugcugagcuucgaacugcugcaugcuccugccacagugugcggcccuaagaaaagcaccaaucucgugaagaacaaaugcgugaacuucaacuucaacggccugaccggcaccggcgugcugacagagagcaacaagaaguuccugccauuccagcaguuuggccgggauaucgccgauaccacagacgccguuagagauccccagacacuggaaauccuggacaucaccccaugcagcuucggcggagugucugugaucaccccuggcaccaacaccagcaaucagguggcagugcuguaccaggacgugaacuguaccgaagugcccguggccauucacgccgaucagcugacaccuacauggcggguguacuccaccggcagcaauguguuucagaccagagccggcugucugaucggagccgagcacgugaacaauagcuacgagugcgacauccccaucggcgcuggcaucugugccagcuaccagacacagacaaacagccccagacgggcuagaagcguggccagccagagcaucauugccuacacaaugucucugggcgccgagaacagcguggccuacuccaacaacucuaucgcuauccccaccaacuucaccaucagcgugaccaccgagauccugccuguguccaugaccaagaccagcguggacugcaccauguacaucugcggcgauuccaccgagugcuccaaccugcugcugcaguacggcagcuucugcacccagcugaauagagcccugacagggaucgccguggaacaggacaagaacacccaagagguguucgcccaagugaagcaaaucuacaagaccccuccuaucaaggacuucggcggcuucaauuucagccagauucugcccgauccuagcaagcccagcaagcggagcuucaucgaggaccugcuguucaacaaagugacacuggccgacgccggcuucaucaagcaguauggcgauugucugggcgacauugccgccagggaucugauuugcgcccagaaguuuaacggacugacagugcugccuccucugcugaccgaugagaugaucgcccaguacugcucugcccugcuggccggcacaaucacaagcggcuggacauuuggagcuggcgccgcucugcagauccccuuugcuaugcagauggccuaccgguucaacggcaucggagugacccagaaugugcuguacgagaaccagaagcugaucgccaaccaguucaacagcgccaucggcaagauccaggacagccugagcagcacagcaagcgcccugggaaagcugcaggacguggucaaccagaaugcccaggcacugaacacccuggucaagcagcuguccuccaacuucggcgccaucagcucugugcugaacgauauccugagcagacuggacaaggucgaggccgaggugcagaucgacagacugaucacaggcagacugcagagccuccagacauacgugacccagcagcugaucagagccgccgagauuagagccucugccaaucuggccgccaccaagaugucugagugugugcugggccagagcaagagaguggacuuuugcggcaagggcuaccaccugaugagcuucccucagugcgccccucacggcgugguguuucugcacgugacauaugugcccgcucaagagaagaauuucaccaccgcuccagccaucugccacgacggcaaagcccacuuuccuagagaaggcguguucguguccaacggcacccauugguucgugacacagcggaacuucuacgagccccagaucaucaccaccgacaacaccuucgugucuggcaacugcgacguugugaucggcauugugaacaauaccguguacgacccucugcagcccgagcuggacagcuucaaagaggaacuggacaaguacuuuaagaaccacacaagccccgacguggaccugggcgauaucagcggaaucaaugccagcgucgugaacauccagaaagagaucgaccggcugaacgagguggccaagaaucugaacgagagccugaucgaccugcaagaacuggggaaguacgagcaguacaucaag

SEQ ID NO: 12069 - RNA, 3441 nt, Artificial Sequence
  SARS-CoV-2/Wuhan/WIV05/2019__EPI_ISL_402128 spike protein CDS gc mod (1-1147)
auguucguguuucuggugcugcugccccugguguccagccagugugugaaccugaccaccagaacacagcugccuccagccuacaccaacagcuucaccagaggcguguacuaccccgacaagguguucagauccagcgugcugcacucuacccaggaccuguuccugccuuucuucagcaacgugaccugguuccacgccauccacguguccggcaccaauggcaccaagagauucgacaaccccgugcugcccuucaacgacgggguguacuuugccagcaccgagaaguccaacaucaucagaggcuggaucuucggcaccacacuggacagcaagacccagagccugcugaucgugaacaacgccaccaacguggucaucaaagugugcgaguuccaguucugcaacgaccccuuccugggcgucuacuaccacaagaacaacaagagcuggauggaaagcgaguuccggguguacagcagcgccaacaacugcaccuucgaguacgugucccagccuuuccugauggaccuggaaggcaagcagggcaacuucaagaaccugcgcgaguucguguucaagaacaucgacggcuacuucaaaaucuacagcaagcacaccccuaucaaccucgugcgggaucugccucagggcuucucugcucuggaaccccugguggaucugcccaucggcaucaacaucacccgguuucagacacugcuggcccugcacagaagcuaccugacaccuggcgauagcagcagcggauggacagcuggugccgccgcuuacuaugugggcuaccugcagccuagaaccuuccugcugaaguacaacgagaacggcaccaucaccgacgccguggauugugcucuggauccucugagcgagacaaagugcacccugaaguccuucaccguggaaaagggcaucuaccagaccagcaacuuccgggugcagcccaccgaauccaucgugcgguuccccaauaucaccaaucugugccccuucggcgagguguucaaugccaccagauucgccucuguguacgccuggaaccggaagcggaucagcaauugcguggccgacuacuccgugcuguacaacuccgccagcuucagcaccuucaagugcuacggcguguccccuaccaagcugaacgaccugugcuucacaaacguguacgccgacagcuucgugauccggggagaugaagugcggcagauugccccuggacagacaggcaagaucgccgacuacaacuacaagcugcccgacgacuucaccggcugugugauugccuggaacagcaacaaccuggacuccaaagucggcggcaacuacaauuaccuguaccggcuguuccggaaguccaaucugaagcccuucgagcgggacaucagcaccgaaaucuaucaggccggcagcaccccuugcaacggcguggaaggcuucaacugcuacuucccacugcaguccuacggcuuucagcccacaaauggcgugggcuaucagcccuacagagugguggugcugagcuucgaacugcugcaugcuccugccacagugugcggcccuaagaaaagcaccaaucucgugaagaacaaaugcgugaacuucaacuucaacggccugaccggcaccggcgugcugacagagagcaacaagaaguuccugccauuccagcaguuuggccgggauaucgccgauaccacagacgccguuagagauccccagacacuggaaauccuggacaucaccccaugcagcuucggcggagugucugugaucaccccuggcaccaacaccagcaaucagguggcagugcuguaccaggacgugaacuguaccgaagugcccguggccauucacgccgaucagcugacaccuacauggcggguguacuccaccggcagcaauguguuucagaccagagccggcugucugaucggagccgagcacgugaacaauagcuacgagugcgacauccccaucggcgcuggcaucugugccagcuaccagacacagacaaacagccccagacgggcuagaagcguggccagccagagcaucauugccuacacaaugucucugggcgccgagaacagcguggccuacuccaacaacucuaucgcuauccccaccaacuucaccaucagcgugaccaccgagauccugccuguguccaugaccaagaccagcguggacugcaccauguacaucugcggcgauuccaccgagugcuccaaccugcugcugcaguacggcagcuucugcacccagcugaauagagcccugacagggaucgccguggaacaggacaagaacacccaagagguguucgcccaagugaagcaaaucuacaagaccccuccuaucaaggacuucggcggcuucaauuucagccagauucugcccgauccuagcaagcccagcaagcggagcuucaucgaggaccugcuguucaacaaagugacacuggccgacgccggcuucaucaagcaguauggcgauugucugggcgacauugccgccagggaucugauuugcgcccagaaguuuaacggacugacagugcugccuccucugcugaccgaugagaugaucgcccaguacacaucugcccugcuggccggcacaaucacaagcggcuggacauuuggagcuggcgccgcucugcagauccccuuugcuaugcagauggccuaccgguucaacggcaucggagugacccagaaugugcuguacgagaaccagaagcugaucgccaaccaguucaacagcgccaucggcaagauccaggacagccugagcagcacagcaagcgcccugggaaagcugcaggacguggucaaccagaaugcccaggcacugaacacccuggucaagcagcuguccuccaacuucggcgccaucagcucugugcugaacgauauccugagcagacuggacaaggucgaggccgaggugcagaucgacagacugaucacaggcagacugcagagccuccagacauacgugacccagcagcugaucagagccgccgagauuagagccucugccaaucuggccgccaccaagaugucugagugugugcugggccagagcaagagaguggacuuuugcggcaagggcuaccaccugaugagcuucccucagucugccccucacggcgugguguuucugcacgugacauaugugcccgcucaagagaagaauuucaccaccgcuccagccaucugccacgacggcaaagcccacuuuccuagagaaggcguguucguguccaacggcacccauugguucgugacacagcggaacuucuacgagccccagaucaucaccaccgacaacaccuucgugucuggcaacugcgacguugugaucggcauugugaacaauaccguguacgacccucugcagcccgagcuggacagc

SEQ ID NO: 12070 - RNA, 3441 nt, Artificial Sequence
  SARS-CoV-2/Wuhan/WIV05/2019__EPI_ISL_402128 spike protein CDS gc mod (1-1147)(K986P_V987P)
auguucguguuucuggugcugcugccccugguguccagccagugugugaaccugaccaccagaacacagcugccuccagccuacaccaacagcuucaccagaggcguguacuaccccgacaagguguucagauccagcgugcugcacucuacccaggaccuguuccugccuuucuucagcaacgugaccugguuccacgccauccacguguccggcaccaauggcaccaagagauucgacaaccccgugcugcccuucaacgacgggguguacuuugccagcaccgagaaguccaacaucaucagaggcuggaucuucggcaccacacuggacagcaagacccagagccugcugaucgugaacaacgccaccaacguggucaucaaagugugcgaguuccaguucugcaacgaccccuuccugggcgucuacuaccacaagaacaacaagagcuggauggaaagcgaguuccggguguacagcagcgccaacaacugcaccuucgaguacgugucccagccuuuccugauggaccuggaaggcaagcagggcaacuucaagaaccugcgcgaguucguguucaagaacaucgacggcuacuucaaaaucuacagcaagcacaccccuaucaaccucgugcgggaucugccucagggcuucucugcucuggaaccccugguggaucugcccaucggcaucaacaucacccgguuucagacacugcuggcccugcacagaagcuaccugacaccuggcgauagcagcagcggauggacagcuggugccgccgcuuacuaugugggcuaccugcagccuagaaccuuccugcugaaguacaacgagaacggcaccaucaccgacgccguggauugugcucuggauccucugagcgagacaaagugcacccugaaguccuucaccguggaaaagggcaucuaccagaccagcaacuuccgggugcagcccaccgaauccaucgugcgguuccccaauaucaccaaucugugccccuucggcgagguguucaaugccaccagauucgccucuguguacgccuggaaccggaagcggaucagcaauugcguggccgacuacuccgugcuguacaacuccgccagcuucagcaccuucaagugcuacggcguguccccuaccaagcugaacgaccugugcuucacaaacguguacgccgacagcuucgugauccggggagaugaagugcggcagauugccccuggacagacaggcaagaucgccgacuacaacuacaagcugcccgacgacuucaccggcugugugauugccuggaacagcaacaaccuggacuccaaagucggcggcaacuacaauuaccuguaccggcuguuccggaaguccaaucugaagcccuucgagcgggacaucagcaccgaaaucuaucaggccggcagcaccccuugcaacggcguggaaggcuucaacugcuacuucccacugcaguccuacggcuuucagcccacaaauggcgugggcuaucagcccuacagagugguggugcugagcuucgaacugcugcaugcuccugccacagugugcggcccuaagaaaagcaccaaucucgugaagaacaaaugcgugaacuucaacuucaacggccugaccggcaccggcgugcugacagagagcaacaagaaguuccugccauuccagcaguuuggccgggauaucgccgauaccacagacgccguuagagauccccagacacuggaaauccuggacaucaccccaugcagcuucggcggagugucugugaucaccccuggcaccaacaccagcaaucagguggcagugcuguaccaggacgugaacuguaccgaagugcccguggccauucacgccgaucagcugacaccuacauggcggguguacuccaccggcagcaauguguuucagaccagagccggcugucugaucggagccgagcacgugaacaauagcuacgagugcgacauccccaucggcgcuggcaucugugccagcuaccagacacagacaaacagccccagacgggcuagaagcguggccagccagagcaucauugccuacacaaugucucugggcgccgagaacagcguggccuacuccaacaacucuaucgcuauccccaccaacuucaccaucagcgugaccaccgagauccugccuguguccaugaccaagaccagcguggacugcaccauguacaucugcggcgauuccaccgagugcuccaaccugcugcugcaguacggcagcuucugcacccagcugaauagagcccugacagggaucgccguggaacaggacaagaacacccaagagguguucgcccaagugaagcaaaucuacaagaccccuccuaucaaggacuucggcggcuucaauuucagccagauucugcccgauccuagcaagcccagcaagcggagcuucaucgaggaccugcuguucaacaaagugacacuggccgacgccggcuucaucaagcaguauggcgauugucugggcgacauugccgccagggaucugauuugcgcccagaaguuuaacggacugacagugcugccuccucugcugaccgaugagaugaucgcccaguacacaucugcccugcuggccggcacaaucacaagcggcuggacauuuggagcuggcgccgcucugcagauccccuuugcuaugcagauggccuaccgguucaacggcaucggagugacccagaaugugcuguacgagaaccagaagcugaucgccaaccaguucaacagcgccaucggcaagauccaggacagccugagcagcacagcaagcgcccugggaaagcugcaggacguggucaaccagaaugcccaggcacugaacacccuggucaagcagcuguccuccaacuucggcgccaucagcucugugcugaacgauauccugagcagacuggacccuccugaggccgaggugcagaucgacagacugaucacaggcagacugcagagccuccagacauacgugacccagcagcugaucagagccgccgagauuagagccucugccaaucuggccgccaccaagaugucugagugugugcugggccagagcaagagaguggacuuuugcggcaagggcuaccaccugaugagcuucccucagucugccccucacggcgugguguuucugcacgugacauaugugcccgcucaagagaagaauuucaccaccgcuccagccaucugccacgacggcaaagcccacuuuccuagagaaggcguguucguguccaacggcacccauugguucgugacacagcggaacuucuacgagccccagaucaucaccaccgacaacaccuucgugucuggcaacugcgacguugugaucggcauugugaacaauaccguguacgacccucugcagcccgagcuggacagc

SEQ ID NO: 12071 - RNA, 3441 nt, Artificial Sequence
  SARS-CoV-2/Wuhan/WIV05/2019__EPI_ISL_402128 spike protein CDS gc mod (1-1147)(K986P_V987P_T887WN_A1020W)
auguucguguuucuggugcugcugccccugguguccagccagugugugaaccugaccaccagaacacagcugccuccagccuacaccaacagcuucaccagaggcguguacuaccccgacaagguguucagauccagcgugcugcacucuacccaggaccuguuccugccuuucuucagcaacgugaccugguuccacgccauccacguguccggcaccaauggcaccaagagauucgacaaccccgugcugcccuucaacgacgggguguacuuugccagcaccgagaaguccaacaucaucagaggcuggaucuucggcaccacacuggacagcaagacccagagccugcugaucgugaacaacgccaccaacguggucaucaaagugugcgaguuccaguucugcaacgaccccuuccugggcgucuacuaccacaagaacaacaagagcuggauggaaagcgaguuccggguguacagcagcgccaacaacugcaccuucgaguacgugucccagccuuuccugauggaccuggaaggcaagcagggcaacuucaagaaccugcgcgaguucguguucaagaacaucgacggcuacuucaaaaucuacagcaagcacaccccuaucaaccucgugcgggaucugccucagggcuucucugcucuggaaccccugguggaucugcccaucggcaucaacaucacccgguuucagacacugcuggcccugcacagaagcuaccugacaccuggcgauagcagcagcggauggacagcuggugccgccgcuuacuaugugggcuaccugcagccuagaaccuuccugcugaaguacaacgagaacggcaccaucaccgacgccguggauugugcucuggauccucugagcgagacaaagugcacccugaaguccuucaccguggaaaagggcaucuaccagaccagcaacuuccgggugcagcccaccgaauccaucgugcgguuccccaauaucaccaaucugugccccuucggcgagguguucaaugccaccagauucgccucuguguacgccuggaaccggaagcggaucagcaauugcguggccgacuacuccgugcuguacaacuccgccagcuucagcaccuucaagugcuacggcguguccccuaccaagcugaacgaccugugcuucacaaacguguacgccgacagcuucgugauccggggagaugaagugcggcagauugccccuggacagacaggcaagaucgccgacuacaacuacaagcugcccgacgacuucaccggcugugugauugccuggaacagcaacaaccuggacuccaaagucggcggcaacuacaauuaccuguaccggcuguuccggaaguccaaucugaagcccuucgagcgggacaucagcaccgaaaucuaucaggccggcagcaccccuugcaacggcguggaaggcuucaacugcuacuucccacugcaguccuacggcuuucagcccacaaauggcgugggcuaucagcccuacagagugguggugcugagcuucgaacugcugcaugcuccugccacagugugcggcccuaagaaaagcaccaaucucgugaagaacaaaugcgugaacuucaacuucaacggccugaccggcaccggcgugcugacagagagcaacaagaaguuccugccauuccagcaguuuggccgggauaucgccgauaccacagacgccguuagagauccccagacacuggaaauccuggacaucaccccaugcagcuucggcggagugucugugaucaccccuggcaccaacaccagcaaucagguggcagugcuguaccaggacgugaacuguaccgaagugcccguggccauucacgccgaucagcugacaccuacauggcggguguacuccaccggcagcaauguguuucagaccagagccggcugucugaucggagccgagcacgugaacaauagcuacgagugcgacauccccaucggcgcuggcaucugugccagcuaccagacacagacaaacagccccagacgggcuagaagcguggccagccagagcaucauugccuacacaaugucucugggcgccgagaacagcguggccuacuccaacaacucuaucgcuauccccaccaacuucaccaucagcgugaccaccgagauccugccuguguccaugaccaagaccagcguggacugcaccauguacaucugcggcgauuccaccgagugcuccaaccugcugcugcaguacggcagcuucugcacccagcugaauagagcccugacagggaucgccguggaacaggacaagaacacccaagagguguucgcccaagugaagcaaaucuacaagaccccuccuaucaaggacuucggcggcuucaauuucagccagauucugcccgauccuagcaagcccagcaagcggagcuucaucgaggaccugcuguucaacaaagugacacuggccgacgccggcuucaucaagcaguauggcgauugucugggcgacauugccgccagggaucugauuugcgcccagaaguuuaacggacugacagugcugccuccucugcugaccgaugagaugaucgcccaguacacaucugcccugcuggccggcacaaucacaagcggcuggugguuuggagcuggcgccgcucugcagauccccuuugcuaugcagauggccuaccgguucaacggcaucggagugacccagaaugugcuguacgagaaccagaagcugaucgccaaccaguucaacagcgccaucggcaagauccaggacagccugagcagcacagcaagcgcccugggaaagcugcaggacguggucaaccagaaugcccaggcacugaacacccuggucaagcagcuguccuccaacuucggcgccaucagcucugugcugaacgauauccugagcagacuggacccuccugaggccgaggugcagaucgacagacugaucacaggcagacugcagagccuccagacauacgugacccagcagcugaucagagccgccgagauuagauggucugccaaucuggccgccaccaagaugucugagugugugcugggccagagcaagagaguggacuuuugcggcaagggcuaccaccugaugagcuucccucagucugccccucacggcgugguguuucugcacgugacauaugugcccgcucaagagaagaauuucaccaccgcuccagccaucugccacgacggcaaagcccacuuuccuagagaaggcguguucguguccaacggcacccauugguucgugacacagcggaacuucuacgagccccagaucaucaccaccgacaacaccuucgugucuggcaacugcgacguugugaucggcauugugaacaauaccguguacgacccucugcagcccgagcuggacagc

SEQ ID NO: 12072 - RNA, 3441 nt, Artificial Sequence
  SARS-CoV-2/Wuhan/WIV05/2019__EPI_ISL_402128 spike protein CDS gc mod (1-1147)(K986P_V987P_P1069F)
auguucguguuucuggugcugcugccccugguguccagccagugugugaaccugaccaccagaacacagcugccuccagccuacaccaacagcuucaccagaggcguguacuaccccgacaagguguucagauccagcgugcugcacucuacccaggaccuguuccugccuuucuucagcaacgugaccugguuccacgccauccacguguccggcaccaauggcaccaagagauucgacaaccccgugcugcccuucaacgacgggguguacuuugccagcaccgagaaguccaacaucaucagaggcuggaucuucggcaccacacuggacagcaagacccagagccugcugaucgugaacaacgccaccaacguggucaucaaagugugcgaguuccaguucugcaacgaccccuuccugggcgucuacuaccacaagaacaacaagagcuggauggaaagcgaguuccggguguacagcagcgccaacaacugcaccuucgaguacgugucccagccuuuccugauggaccuggaaggcaagcagggcaacuucaagaaccugcgcgaguucguguucaagaacaucgacggcuacuucaaaaucuacagcaagcacaccccuaucaaccucgugcgggaucugccucagggcuucucugcucuggaaccccugguggaucugcccaucggcaucaacaucacccgguuucagacacugcuggcccugcacagaagcuaccugacaccuggcgauagcagcagcggauggacagcuggugccgccgcuuacuaugugggcuaccugcagccuagaaccuuccugcugaaguacaacgagaacggcaccaucaccgacgccguggauugugcucuggauccucugagcgagacaaagugcacccugaaguccuucaccguggaaaagggcaucuaccagaccagcaacuuccgggugcagcccaccgaauccaucgugcgguuccccaauaucaccaaucugugccccuucggcgagguguucaaugccaccagauucgccucuguguacgccuggaaccggaagcggaucagcaauugcguggccgacuacuccgugcuguacaacuccgccagcuucagcaccuucaagugcuacggcguguccccuaccaagcugaacgaccugugcuucacaaacguguacgccgacagcuucgugauccggggagaugaagugcggcagauugccccuggacagacaggcaagaucgccgacuacaacuacaagcugcccgacgacuucaccggcugugugauugccuggaacagcaacaaccuggacuccaaagucggcggcaacuacaauuaccuguaccggcuguuccggaaguccaaucugaagcccuucgagcgggacaucagcaccgaaaucuaucaggccggcagcaccccuugcaacggcguggaaggcuucaacugcuacuucccacugcaguccuacggcuuucagcccacaaauggcgugggcuaucagcccuacagagugguggugcugagcuucgaacugcugcaugcuccugccacagugugcggcccuaagaaaagcaccaaucucgugaagaacaaaugcgugaacuucaacuucaacggccugaccggcaccggcgugcugacagagagcaacaagaaguuccugccauuccagcaguuuggccgggauaucgccgauaccacagacgccguuagagauccccagacacuggaaauccuggacaucaccccaugcagcuucggcggagugucugugaucaccccuggcaccaacaccagcaaucagguggcagugcuguaccaggacgugaacuguaccgaagugcccguggccauucacgccgaucagcugacaccuacauggcggguguacuccaccggcagcaauguguuucagaccagagccggcugucugaucggagccgagcacgugaacaauagcuacgagugcgacauccccaucggcgcuggcaucugugccagcuaccagacacagacaaacagccccagacgggcuagaagcguggccagccagagcaucauugccuacacaaugucucugggcgccgagaacagcguggccuacuccaacaacucuaucgcuauccccaccaacuucaccaucagcgugaccaccgagauccugccuguguccaugaccaagaccagcguggacugcaccauguacaucugcggcgauuccaccgagugcuccaaccugcugcugcaguacggcagcuucugcacccagcugaauagagcccugacagggaucgccguggaacaggacaagaacacccaagagguguucgcccaagugaagcaaaucuacaagaccccuccuaucaaggacuucggcggcuucaauuucagccagauucugcccgauccuagcaagcccagcaagcggagcuucaucgaggaccugcuguucaacaaagugacacuggccgacgccggcuucaucaagcaguauggcgauugucugggcgacauugccgccagggaucugauuugcgcccagaaguuuaacggacugacagugcugccuccucugcugaccgaugagaugaucgcccaguacacaucugcccugcuggccggcacaaucacaagcggcuggacauuuggagcuggcgccgcucugcagauccccuuugcuaugcagauggccuaccgguucaacggcaucggagugacccagaaugugcuguacgagaaccagaagcugaucgccaaccaguucaacagcgccaucggcaagauccaggacagccugagcagcacagcaagcgcccugggaaagcugcaggacguggucaaccagaaugcccaggcacugaacacccuggucaagcagcuguccuccaacuucggcgccaucagcucugugcugaacgauauccugagcagacuggacccuccugaggccgaggugcagaucgacagacugaucacaggcagacugcagagccuccagacauacgugacccagcagcugaucagagccgccgagauuagagccucugccaaucuggccgccaccaagaugucugagugugugcugggccagagcaagagaguggacuuuugcggcaagggcuaccaccugaugagcuucccucagucugccccucacggcgugguguuucugcacgugacauauguguucgcucaagagaagaauuucaccaccgcuccagccaucugccacgacggcaaagcccacuuuccuagagaaggcguguucguguccaacggcacccauugguucgugacacagcggaacuucuacgagccccagaucaucaccaccgacaacaccuucgugucuggcaacugcgacguugugaucggcauugugaacaauaccguguacgacccucugcagcccgagcuggacagc

SEQ ID NO: 12073 - RNA, 3441 nt, Artificial Sequence
  SARS-CoV-2/Wuhan/WIV05/2019__EPI_ISL_402128 spike protein CDS gc mod (1-1147)(K986P_V987P_ H1048Q_H1064N_ H1083N_H1101N)
auguucguguuucuggugcugcugccccugguguccagccagugugugaaccugaccaccagaacacagcugccuccagccuacaccaacagcuucaccagaggcguguacuaccccgacaagguguucagauccagcgugcugcacucuacccaggaccuguuccugccuuucuucagcaacgugaccugguuccacgccauccacguguccggcaccaauggcaccaagagauucgacaaccccgugcugcccuucaacgacgggguguacuuugccagcaccgagaaguccaacaucaucagaggcuggaucuucggcaccacacuggacagcaagacccagagccugcugaucgugaacaacgccaccaacguggucaucaaagugugcgaguuccaguucugcaacgaccccuuccugggcgucuacuaccacaagaacaacaagagcuggauggaaagcgaguuccggguguacagcagcgccaacaacugcaccuucgaguacgugucccagccuuuccugauggaccuggaaggcaagcagggcaacuucaagaaccugcgcgaguucguguucaagaacaucgacggcuacuucaaaaucuacagcaagcacaccccuaucaaccucgugcgggaucugccucagggcuucucugcucuggaaccccugguggaucugcccaucggcaucaacaucacccgguuucagacacugcuggcccugcacagaagcuaccugacaccuggcgauagcagcagcggauggacagcuggugccgccgcuuacuaugugggcuaccugcagccuagaaccuuccugcugaaguacaacgagaacggcaccaucaccgacgccguggauugugcucuggauccucugagcgagacaaagugcacccugaaguccuucaccguggaaaagggcaucuaccagaccagcaacuuccgggugcagcccaccgaauccaucgugcgguuccccaauaucaccaaucugugccccuucggcgagguguucaaugccaccagauucgccucuguguacgccuggaaccggaagcggaucagcaauugcguggccgacuacuccgugcuguacaacuccgccagcuucagcaccuucaagugcuacggcguguccccuaccaagcugaacgaccugugcuucacaaacguguacgccgacagcuucgugauccggggagaugaagugcggcagauugccccuggacagacaggcaagaucgccgacuacaacuacaagcugcccgacgacuucaccggcugugugauugccuggaacagcaacaaccuggacuccaaagucggcggcaacuacaauuaccuguaccggcuguuccggaaguccaaucugaagcccuucgagcgggacaucagcaccgaaaucuaucaggccggcagcaccccuugcaacggcguggaaggcuucaacugcuacuucccacugcaguccuacggcuuucagcccacaaauggcgugggcuaucagcccuacagagugguggugcugagcuucgaacugcugcaugcuccugccacagugugcggcccuaagaaaagcaccaaucucgugaagaacaaaugcgugaacuucaacuucaacggccugaccggcaccggcgugcugacagagagcaacaagaaguuccugccauuccagcaguuuggccgggauaucgccgauaccacagacgccguuagagauccccagacacuggaaauccuggacaucaccccaugcagcuucggcggagugucugugaucaccccuggcaccaacaccagcaaucagguggcagugcuguaccaggacgugaacuguaccgaagugcccguggccauucacgccgaucagcugacaccuacauggcggguguacuccaccggcagcaauguguuucagaccagagccggcugucugaucggagccgagcacgugaacaauagcuacgagugcgacauccccaucggcgcuggcaucugugccagcuaccagacacagacaaacagccccagacgggcuagaagcguggccagccagagcaucauugccuacacaaugucucugggcgccgagaacagcguggccuacuccaacaacucuaucgcuauccccaccaacuucaccaucagcgugaccaccgagauccugccuguguccaugaccaagaccagcguggacugcaccauguacaucugcggcgauuccaccgagugcuccaaccugcugcugcaguacggcagcuucugcacccagcugaauagagcccugacagggaucgccguggaacaggacaagaacacccaagagguguucgcccaagugaagcaaaucuacaagaccccuccuaucaaggacuucggcggcuucaauuucagccagauucugcccgauccuagcaagcccagcaagcggagcuucaucgaggaccugcuguucaacaaagugacacuggccgacgccggcuucaucaagcaguauggcgauugucugggcgacauugccgccagggaucugauuugcgcccagaaguuuaacggacugacagugcugccuccucugcugaccgaugagaugaucgcccaguacacaucugcccugcuggccggcacaaucacaagcggcuggacauuuggagcuggcgccgcucugcagauccccuuugcuaugcagauggccuaccgguucaacggcaucggagugacccagaaugugcuguacgagaaccagaagcugaucgccaaccaguucaacagcgccaucggcaagauccaggacagccugagcagcacagcaagcgcccugggaaagcugcaggacguggucaaccagaaugcccaggcacugaacacccuggucaagcagcuguccuccaacuucggcgccaucagcucugugcugaacgauauccugagcagacuggacccuccugaggccgaggugcagaucgacagacugaucacaggcagacugcagagccuccagacauacgugacccagcagcugaucagagccgccgagauuagagccucugccaaucuggccgccaccaagaugucugagugugugcugggccagagcaagagaguggacuuuugcggcaagggcuaccagcugaugagcuucccucagucugccccucacggcgugguguuucugaacgugacauaugugcccgcucaagagaagaauuucaccaccgcuccagccaucugcaacgacggcaaagcccacuuuccuagagaaggcguguucguguccaacggcaccaacugguucgugacacagcggaacuucuacgagccccagaucaucaccaccgacaacaccuucgugucuggcaacugcgacguugugaucggcauugugaacaauaccguguacgacccucugcagcccgagcuggacagc

SEQ ID NO: 12074 - RNA, 3441 nt, Artificial Sequence
  SARS-CoV-2/Wuhan/WIV05/2019__EPI_ISL_402128 spike protein CDS gc mod (1-1147)(I712C_T1077C)
auguucguguuucuggugcugcugccccugguguccagccagugugugaaccugaccaccagaacacagcugccuccagccuacaccaacagcuucaccagaggcguguacuaccccgacaagguguucagauccagcgugcugcacucuacccaggaccuguuccugccuuucuucagcaacgugaccugguuccacgccauccacguguccggcaccaauggcaccaagagauucgacaaccccgugcugcccuucaacgacgggguguacuuugccagcaccgagaaguccaacaucaucagaggcuggaucuucggcaccacacuggacagcaagacccagagccugcugaucgugaacaacgccaccaacguggucaucaaagugugcgaguuccaguucugcaacgaccccuuccugggcgucuacuaccacaagaacaacaagagcuggauggaaagcgaguuccggguguacagcagcgccaacaacugcaccuucgaguacgugucccagccuuuccugauggaccuggaaggcaagcagggcaacuucaagaaccugcgcgaguucguguucaagaacaucgacggcuacuucaaaaucuacagcaagcacaccccuaucaaccucgugcgggaucugccucagggcuucucugcucuggaaccccugguggaucugcccaucggcaucaacaucacccgguuucagacacugcuggcccugcacagaagcuaccugacaccuggcgauagcagcagcggauggacagcuggugccgccgcuuacuaugugggcuaccugcagccuagaaccuuccugcugaaguacaacgagaacggcaccaucaccgacgccguggauugugcucuggauccucugagcgagacaaagugcacccugaaguccuucaccguggaaaagggcaucuaccagaccagcaacuuccgggugcagcccaccgaauccaucgugcgguuccccaauaucaccaaucugugccccuucggcgagguguucaaugccaccagauucgccucuguguacgccuggaaccggaagcggaucagcaauugcguggccgacuacuccgugcuguacaacuccgccagcuucagcaccuucaagugcuacggcguguccccuaccaagcugaacgaccugugcuucacaaacguguacgccgacagcuucgugauccggggagaugaagugcggcagauugccccuggacagacaggcaagaucgccgacuacaacuacaagcugcccgacgacuucaccggcugugugauugccuggaacagcaacaaccuggacuccaaagucggcggcaacuacaauuaccuguaccggcuguuccggaaguccaaucugaagcccuucgagcgggacaucagcaccgaaaucuaucaggccggcagcaccccuugcaacggcguggaaggcuucaacugcuacuucccacugcaguccuacggcuuucagcccacaaauggcgugggcuaucagcccuacagagugguggugcugagcuucgaacugcugcaugcuccugccacagugugcggcccuaagaaaagcaccaaucucgugaagaacaaaugcgugaacuucaacuucaacggccugaccggcaccggcgugcugacagagagcaacaagaaguuccugccauuccagcaguuuggccgggauaucgccgauaccacagacgccguuagagauccccagacacuggaaauccuggacaucaccccaugcagcuucggcggagugucugugaucaccccuggcaccaacaccagcaaucagguggcagugcuguaccaggacgugaacuguaccgaagugcccguggccauucacgccgaucagcugacaccuacauggcggguguacuccaccggcagcaauguguuucagaccagagccggcugucugaucggagccgagcacgugaacaauagcuacgagugcgacauccccaucggcgcuggcaucugugccagcuaccagacacagacaaacagccccagacgggcuagaagcguggccagccagagcaucauugccuacacaaugucucugggcgccgagaacagcguggccuacuccaacaacucuugcgcuauccccaccaacuucaccaucagcgugaccaccgagauccugccuguguccaugaccaagaccagcguggacugcaccauguacaucugcggcgauuccaccgagugcuccaaccugcugcugcaguacggcagcuucugcacccagcugaauagagcccugacagggaucgccguggaacaggacaagaacacccaagagguguucgcccaagugaagcaaaucuacaagaccccuccuaucaaggacuucggcggcuucaauuucagccagauucugcccgauccuagcaagcccagcaagcggagcuucaucgaggaccugcuguucaacaaagugacacuggccgacgccggcuucaucaagcaguauggcgauugucugggcgacauugccgccagggaucugauuugcgcccagaaguuuaacggacugacagugcugccuccucugcugaccgaugagaugaucgcccaguacacaucugcccugcuggccggcacaaucacaagcggcuggacauuuggagcuggcgccgcucugcagauccccuuugcuaugcagauggccuaccgguucaacggcaucggagugacccagaaugugcuguacgagaaccagaagcugaucgccaaccaguucaacagcgccaucggcaagauccaggacagccugagcagcacagcaagcgcccugggaaagcugcaggacguggucaaccagaaugcccaggcacugaacacccuggucaagcagcuguccuccaacuucggcgccaucagcucugugcugaacgauauccugagcagacuggacaaggucgaggccgaggugcagaucgacagacugaucacaggcagacugcagagccuccagacauacgugacccagcagcugaucagagccgccgagauuagagccucugccaaucuggccgccaccaagaugucugagugugugcugggccagagcaagagaguggacuuuugcggcaagggcuaccaccugaugagcuucccucagucugccccucacggcgugguguuucugcacgugacauaugugcccgcucaagagaagaauuucaccugugcuccagccaucugccacgacggcaaagcccacuuuccuagagaaggcguguucguguccaacggcacccauugguucgugacacagcggaacuucuacgagccccagaucaucaccaccgacaacaccuucgugucuggcaacugcgacguugugaucggcauugugaacaauaccguguacgacccucugcagcccgagcuggacagc

SEQ ID NO: 12075 - RNA, 3441 nt, Artificial Sequence
  SARS-CoV-2/Wuhan/WIV05/2019__EPI_ISL_402128 spike protein CDS gc mod (1-1147)(I714C_Y1110C)
auguucguguuucuggugcugcugccccugguguccagccagugugugaaccugaccaccagaacacagcugccuccagccuacaccaacagcuucaccagaggcguguacuaccccgacaagguguucagauccagcgugcugcacucuacccaggaccuguuccugccuuucuucagcaacgugaccugguuccacgccauccacguguccggcaccaauggcaccaagagauucgacaaccccgugcugcccuucaacgacgggguguacuuugccagcaccgagaaguccaacaucaucagaggcuggaucuucggcaccacacuggacagcaagacccagagccugcugaucgugaacaacgccaccaacguggucaucaaagugugcgaguuccaguucugcaacgaccccuuccugggcgucuacuaccacaagaacaacaagagcuggauggaaagcgaguuccggguguacagcagcgccaacaacugcaccuucgaguacgugucccagccuuuccugauggaccuggaaggcaagcagggcaacuucaagaaccugcgcgaguucguguucaagaacaucgacggcuacuucaaaaucuacagcaagcacaccccuaucaaccucgugcgggaucugccucagggcuucucugcucuggaaccccugguggaucugcccaucggcaucaacaucacccgguuucagacacugcuggcccugcacagaagcuaccugacaccuggcgauagcagcagcggauggacagcuggugccgccgcuuacuaugugggcuaccugcagccuagaaccuuccugcugaaguacaacgagaacggcaccaucaccgacgccguggauugugcucuggauccucugagcgagacaaagugcacccugaaguccuucaccguggaaaagggcaucuaccagaccagcaacuuccgggugcagcccaccgaauccaucgugcgguuccccaauaucaccaaucugugccccuucggcgagguguucaaugccaccagauucgccucuguguacgccuggaaccggaagcggaucagcaauugcguggccgacuacuccgugcuguacaacuccgccagcuucagcaccuucaagugcuacggcguguccccuaccaagcugaacgaccugugcuucacaaacguguacgccgacagcuucgugauccggggagaugaagugcggcagauugccccuggacagacaggcaagaucgccgacuacaacuacaagcugcccgacgacuucaccggcugugugauugccuggaacagcaacaaccuggacuccaaagucggcggcaacuacaauuaccuguaccggcuguuccggaaguccaaucugaagcccuucgagcgggacaucagcaccgaaaucuaucaggccggcagcaccccuugcaacggcguggaaggcuucaacugcuacuucccacugcaguccuacggcuuucagcccacaaauggcgugggcuaucagcccuacagagugguggugcugagcuucgaacugcugcaugcuccugccacagugugcggcccuaagaaaagcaccaaucucgugaagaacaaaugcgugaacuucaacuucaacggccugaccggcaccggcgugcugacagagagcaacaagaaguuccugccauuccagcaguuuggccgggauaucgccgauaccacagacgccguuagagauccccagacacuggaaauccuggacaucaccccaugcagcuucggcggagugucugugaucaccccuggcaccaacaccagcaaucagguggcagugcuguaccaggacgugaacuguaccgaagugcccguggccauucacgccgaucagcugacaccuacauggcggguguacuccaccggcagcaauguguuucagaccagagccggcugucugaucggagccgagcacgugaacaauagcuacgagugcgacauccccaucggcgcuggcaucugugccagcuaccagacacagacaaacagccccagacgggcuagaagcguggccagccagagcaucauugccuacacaaugucucugggcgccgagaacagcguggccuacuccaacaacucuaucgcuugccccaccaacuucaccaucagcgugaccaccgagauccugccuguguccaugaccaagaccagcguggacugcaccauguacaucugcggcgauuccaccgagugcuccaaccugcugcugcaguacggcagcuucugcacccagcugaauagagcccugacagggaucgccguggaacaggacaagaacacccaagagguguucgcccaagugaagcaaaucuacaagaccccuccuaucaaggacuucggcggcuucaauuucagccagauucugcccgauccuagcaagcccagcaagcggagcuucaucgaggaccugcuguucaacaaagugacacuggccgacgccggcuucaucaagcaguauggcgauugucugggcgacauugccgccagggaucugauuugcgcccagaaguuuaacggacugacagugcugccuccucugcugaccgaugagaugaucgcccaguacacaucugcccugcuggccggcacaaucacaagcggcuggacauuuggagcuggcgccgcucugcagauccccuuugcuaugcagauggccuaccgguucaacggcaucggagugacccagaaugugcuguacgagaaccagaagcugaucgccaaccaguucaacagcgccaucggcaagauccaggacagccugagcagcacagcaagcgcccugggaaagcugcaggacguggucaaccagaaugcccaggcacugaacacccuggucaagcagcuguccuccaacuucggcgccaucagcucugugcugaacgauauccugagcagacuggacaaggucgaggccgaggugcagaucgacagacugaucacaggcagacugcagagccuccagacauacgugacccagcagcugaucagagccgccgagauuagagccucugccaaucuggccgccaccaagaugucugagugugugcugggccagagcaagagaguggacuuuugcggcaagggcuaccaccugaugagcuucccucagucugccccucacggcgugguguuucugcacgugacauaugugcccgcucaagagaagaauuucaccaccgcuccagccaucugccacgacggcaaagcccacuuuccuagagaaggcguguucguguccaacggcacccauugguucgugacacagcggaacuucugugagccccagaucaucaccaccgacaacaccuucgugucuggcaacugcgacguugugaucggcauugugaacaauaccguguacgacccucugcagcccgagcuggacagc

SEQ ID NO: 12076 - RNA, 3441 nt, Artificial Sequence
  SARS-CoV-2/Wuhan/WIV05/2019__EPI_ISL_402128 spike protein CDS gc mod (1-1147)(P715C_P1069C)
auguucguguuucuggugcugcugccccugguguccagccagugugugaaccugaccaccagaacacagcugccuccagccuacaccaacagcuucaccagaggcguguacuaccccgacaagguguucagauccagcgugcugcacucuacccaggaccuguuccugccuuucuucagcaacgugaccugguuccacgccauccacguguccggcaccaauggcaccaagagauucgacaaccccgugcugcccuucaacgacgggguguacuuugccagcaccgagaaguccaacaucaucagaggcuggaucuucggcaccacacuggacagcaagacccagagccugcugaucgugaacaacgccaccaacguggucaucaaagugugcgaguuccaguucugcaacgaccccuuccugggcgucuacuaccacaagaacaacaagagcuggauggaaagcgaguuccggguguacagcagcgccaacaacugcaccuucgaguacgugucccagccuuuccugauggaccuggaaggcaagcagggcaacuucaagaaccugcgcgaguucguguucaagaacaucgacggcuacuucaaaaucuacagcaagcacaccccuaucaaccucgugcgggaucugccucagggcuucucugcucuggaaccccugguggaucugcccaucggcaucaacaucacccgguuucagacacugcuggcccugcacagaagcuaccugacaccuggcgauagcagcagcggauggacagcuggugccgccgcuuacuaugugggcuaccugcagccuagaaccuuccugcugaaguacaacgagaacggcaccaucaccgacgccguggauugugcucuggauccucugagcgagacaaagugcacccugaaguccuucaccguggaaaagggcaucuaccagaccagcaacuuccgggugcagcccaccgaauccaucgugcgguuccccaauaucaccaaucugugccccuucggcgagguguucaaugccaccagauucgccucuguguacgccuggaaccggaagcggaucagcaauugcguggccgacuacuccgugcuguacaacuccgccagcuucagcaccuucaagugcuacggcguguccccuaccaagcugaacgaccugugcuucacaaacguguacgccgacagcuucgugauccggggagaugaagugcggcagauugccccuggacagacaggcaagaucgccgacuacaacuacaagcugcccgacgacuucaccggcugugugauugccuggaacagcaacaaccuggacuccaaagucggcggcaacuacaauuaccuguaccggcuguuccggaaguccaaucugaagcccuucgagcgggacaucagcaccgaaaucuaucaggccggcagcaccccuugcaacggcguggaaggcuucaacugcuacuucccacugcaguccuacggcuuucagcccacaaauggcgugggcuaucagcccuacagagugguggugcugagcuucgaacugcugcaugcuccugccacagugugcggcccuaagaaaagcaccaaucucgugaagaacaaaugcgugaacuucaacuucaacggccugaccggcaccggcgugcugacagagagcaacaagaaguuccugccauuccagcaguuuggccgggauaucgccgauaccacagacgccguuagagauccccagacacuggaaauccuggacaucaccccaugcagcuucggcggagugucugugaucaccccuggcaccaacaccagcaaucagguggcagugcuguaccaggacgugaacuguaccgaagugcccguggccauucacgccgaucagcugacaccuacauggcggguguacuccaccggcagcaauguguuucagaccagagccggcugucugaucggagccgagcacgugaacaauagcuacgagugcgacauccccaucggcgcuggcaucugugccagcuaccagacacagacaaacagccccagacgggcuagaagcguggccagccagagcaucauugccuacacaaugucucugggcgccgagaacagcguggccuacuccaacaacucuaucgcuaucugcaccaacuucaccaucagcgugaccaccgagauccugccuguguccaugaccaagaccagcguggacugcaccauguacaucugcggcgauuccaccgagugcuccaaccugcugcugcaguacggcagcuucugcacccagcugaauagagcccugacagggaucgccguggaacaggacaagaacacccaagagguguucgcccaagugaagcaaaucuacaagaccccuccuaucaaggacuucggcggcuucaauuucagccagauucugcccgauccuagcaagcccagcaagcggagcuucaucgaggaccugcuguucaacaaagugacacuggccgacgccggcuucaucaagcaguauggcgauugucugggcgacauugccgccagggaucugauuugcgcccagaaguuuaacggacugacagugcugccuccucugcugaccgaugagaugaucgcccaguacacaucugcccugcuggccggcacaaucacaagcggcuggacauuuggagcuggcgccgcucugcagauccccuuugcuaugcagauggccuaccgguucaacggcaucggagugacccagaaugugcuguacgagaaccagaagcugaucgccaaccaguucaacagcgccaucggcaagauccaggacagccugagcagcacagcaagcgcccugggaaagcugcaggacguggucaaccagaaugcccaggcacugaacacccuggucaagcagcuguccuccaacuucggcgccaucagcucugugcugaacgauauccugagcagacuggacaaggucgaggccgaggugcagaucgacagacugaucacaggcagacugcagagccuccagacauacgugacccagcagcugaucagagccgccgagauuagagccucugccaaucuggccgccaccaagaugucugagugugugcugggccagagcaagagaguggacuuuugcggcaagggcuaccaccugaugagcuucccucagucugccccucacggcgugguguuucugcacgugacauaugugugugcucaagagaagaauuucaccaccgcuccagccaucugccacgacggcaaagcccacuuuccuagagaaggcguguucguguccaacggcacccauugguucgugacacagcggaacuucuacgagccccagaucaucaccaccgacaacaccuucgugucuggcaacugcgacguugugaucggcauugugaacaauaccguguacgacccucugcagcccgagcuggacagc

SEQ ID NO: 12077 - RNA, 3441 nt, Artificial Sequence
  SARS-CoV-2/Wuhan/WIV05/2019__EPI_ISL_402128 spike protein CDS gc mod (1-1147)(G889C_L1034C)
auguucguguuucuggugcugcugccccugguguccagccagugugugaaccugaccaccagaacacagcugccuccagccuacaccaacagcuucaccagaggcguguacuaccccgacaagguguucagauccagcgugcugcacucuacccaggaccuguuccugccuuucuucagcaacgugaccugguuccacgccauccacguguccggcaccaauggcaccaagagauucgacaaccccgugcugcccuucaacgacgggguguacuuugccagcaccgagaaguccaacaucaucagaggcuggaucuucggcaccacacuggacagcaagacccagagccugcugaucgugaacaacgccaccaacguggucaucaaagugugcgaguuccaguucugcaacgaccccuuccugggcgucuacuaccacaagaacaacaagagcuggauggaaagcgaguuccggguguacagcagcgccaacaacugcaccuucgaguacgugucccagccuuuccugauggaccuggaaggcaagcagggcaacuucaagaaccugcgcgaguucguguucaagaacaucgacggcuacuucaaaaucuacagcaagcacaccccuaucaaccucgugcgggaucugccucagggcuucucugcucuggaaccccugguggaucugcccaucggcaucaacaucacccgguuucagacacugcuggcccugcacagaagcuaccugacaccuggcgauagcagcagcggauggacagcuggugccgccgcuuacuaugugggcuaccugcagccuagaaccuuccugcugaaguacaacgagaacggcaccaucaccgacgccguggauugugcucuggauccucugagcgagacaaagugcacccugaaguccuucaccguggaaaagggcaucuaccagaccagcaacuuccgggugcagcccaccgaauccaucgugcgguuccccaauaucaccaaucugugccccuucggcgagguguucaaugccaccagauucgccucuguguacgccuggaaccggaagcggaucagcaauugcguggccgacuacuccgugcuguacaacuccgccagcuucagcaccuucaagugcuacggcguguccccuaccaagcugaacgaccugugcuucacaaacguguacgccgacagcuucgugauccggggagaugaagugcggcagauugccccuggacagacaggcaagaucgccgacuacaacuacaagcugcccgacgacuucaccggcugugugauugccuggaacagcaacaaccuggacuccaaagucggcggcaacuacaauuaccuguaccggcuguuccggaaguccaaucugaagcccuucgagcgggacaucagcaccgaaaucuaucaggccggcagcaccccuugcaacggcguggaaggcuucaacugcuacuucccacugcaguccuacggcuuucagcccacaaauggcgugggcuaucagcccuacagagugguggugcugagcuucgaacugcugcaugcuccugccacagugugcggcccuaagaaaagcaccaaucucgugaagaacaaaugcgugaacuucaacuucaacggccugaccggcaccggcgugcugacagagagcaacaagaaguuccugccauuccagcaguuuggccgggauaucgccgauaccacagacgccguuagagauccccagacacuggaaauccuggacaucaccccaugcagcuucggcggagugucugugaucaccccuggcaccaacaccagcaaucagguggcagugcuguaccaggacgugaacuguaccgaagugcccguggccauucacgccgaucagcugacaccuacauggcggguguacuccaccggcagcaauguguuucagaccagagccggcugucugaucggagccgagcacgugaacaauagcuacgagugcgacauccccaucggcgcuggcaucugugccagcuaccagacacagacaaacagccccagacgggcuagaagcguggccagccagagcaucauugccuacacaaugucucugggcgccgagaacagcguggccuacuccaacaacucuaucgcuauccccaccaacuucaccaucagcgugaccaccgagauccugccuguguccaugaccaagaccagcguggacugcaccauguacaucugcggcgauuccaccgagugcuccaaccugcugcugcaguacggcagcuucugcacccagcugaauagagcccugacagggaucgccguggaacaggacaagaacacccaagagguguucgcccaagugaagcaaaucuacaagaccccuccuaucaaggacuucggcggcuucaauuucagccagauucugcccgauccuagcaagcccagcaagcggagcuucaucgaggaccugcuguucaacaaagugacacuggccgacgccggcuucaucaagcaguauggcgauugucugggcgacauugccgccagggaucugauuugcgcccagaaguuuaacggacugacagugcugccuccucugcugaccgaugagaugaucgcccaguacacaucugcccugcuggccggcacaaucacaagcggcuggacauuuugcgcuggcgccgcucugcagauccccuuugcuaugcagauggccuaccgguucaacggcaucggagugacccagaaugugcuguacgagaaccagaagcugaucgccaaccaguucaacagcgccaucggcaagauccaggacagccugagcagcacagcaagcgcccugggaaagcugcaggacguggucaaccagaaugcccaggcacugaacacccuggucaagcagcuguccuccaacuucggcgccaucagcucugugcugaacgauauccugagcagacuggacaaggucgaggccgaggugcagaucgacagacugaucacaggcagacugcagagccuccagacauacgugacccagcagcugaucagagccgccgagauuagagccucugccaaucuggccgccaccaagaugucugaguguguguguggccagagcaagagaguggacuuuugcggcaagggcuaccaccugaugagcuucccucagucugccccucacggcgugguguuucugcacgugacauaugugcccgcucaagagaagaauuucaccaccgcuccagccaucugccacgacggcaaagcccacuuuccuagagaaggcguguucguguccaacggcacccauugguucgugacacagcggaacuucuacgagccccagaucaucaccaccgacaacaccuucgugucuggcaacugcgacguugugaucggcauugugaacaauaccguguacgacccucugcagcccgagcuggacagc

SEQ ID NO: 12078 - RNA, 3441 nt, Artificial Sequence
  SARS-CoV-2/Wuhan/WIV05/2019__EPI_ISL_402128 spike protein CDS gc mod (1-1147)(I909C_Y1047C)
auguucguguuucuggugcugcugccccugguguccagccagugugugaaccugaccaccagaacacagcugccuccagccuacaccaacagcuucaccagaggcguguacuaccccgacaagguguucagauccagcgugcugcacucuacccaggaccuguuccugccuuucuucagcaacgugaccugguuccacgccauccacguguccggcaccaauggcaccaagagauucgacaaccccgugcugcccuucaacgacgggguguacuuugccagcaccgagaaguccaacaucaucagaggcuggaucuucggcaccacacuggacagcaagacccagagccugcugaucgugaacaacgccaccaacguggucaucaaagugugcgaguuccaguucugcaacgaccccuuccugggcgucuacuaccacaagaacaacaagagcuggauggaaagcgaguuccggguguacagcagcgccaacaacugcaccuucgaguacgugucccagccuuuccugauggaccuggaaggcaagcagggcaacuucaagaaccugcgcgaguucguguucaagaacaucgacggcuacuucaaaaucuacagcaagcacaccccuaucaaccucgugcgggaucugccucagggcuucucugcucuggaaccccugguggaucugcccaucggcaucaacaucacccgguuucagacacugcuggcccugcacagaagcuaccugacaccuggcgauagcagcagcggauggacagcuggugccgccgcuuacuaugugggcuaccugcagccuagaaccuuccugcugaaguacaacgagaacggcaccaucaccgacgccguggauugugcucuggauccucugagcgagacaaagugcacccugaaguccuucaccguggaaaagggcaucuaccagaccagcaacuuccgggugcagcccaccgaauccaucgugcgguuccccaauaucaccaaucugugccccuucggcgagguguucaaugccaccagauucgccucuguguacgccuggaaccggaagcggaucagcaauugcguggccgacuacuccgugcuguacaacuccgccagcuucagcaccuucaagugcuacggcguguccccuaccaagcugaacgaccugugcuucacaaacguguacgccgacagcuucgugauccggggagaugaagugcggcagauugccccuggacagacaggcaagaucgccgacuacaacuacaagcugcccgacgacuucaccggcugugugauugccuggaacagcaacaaccuggacuccaaagucggcggcaacuacaauuaccuguaccggcuguuccggaaguccaaucugaagcccuucgagcgggacaucagcaccgaaaucuaucaggccggcagcaccccuugcaacggcguggaaggcuucaacugcuacuucccacugcaguccuacggcuuucagcccacaaauggcgugggcuaucagcccuacagagugguggugcugagcuucgaacugcugcaugcuccugccacagugugcggcccuaagaaaagcaccaaucucgugaagaacaaaugcgugaacuucaacuucaacggccugaccggcaccggcgugcugacagagagcaacaagaaguuccugccauuccagcaguuuggccgggauaucgccgauaccacagacgccguuagagauccccagacacuggaaauccuggacaucaccccaugcagcuucggcggagugucugugaucaccccuggcaccaacaccagcaaucagguggcagugcuguaccaggacgugaacuguaccgaagugcccguggccauucacgccgaucagcugacaccuacauggcggguguacuccaccggcagcaauguguuucagaccagagccggcugucugaucggagccgagcacgugaacaauagcuacgagugcgacauccccaucggcgcuggcaucugugccagcuaccagacacagacaaacagccccagacgggcuagaagcguggccagccagagcaucauugccuacacaaugucucugggcgccgagaacagcguggccuacuccaacaacucuaucgcuauccccaccaacuucaccaucagcgugaccaccgagauccugccuguguccaugaccaagaccagcguggacugcaccauguacaucugcggcgauuccaccgagugcuccaaccugcugcugcaguacggcagcuucugcacccagcugaauagagcccugacagggaucgccguggaacaggacaagaacacccaagagguguucgcccaagugaagcaaaucuacaagaccccuccuaucaaggacuucggcggcuucaauuucagccagauucugcccgauccuagcaagcccagcaagcggagcuucaucgaggaccugcuguucaacaaagugacacuggccgacgccggcuucaucaagcaguauggcgauugucugggcgacauugccgccagggaucugauuugcgcccagaaguuuaacggacugacagugcugccuccucugcugaccgaugagaugaucgcccaguacacaucugcccugcuggccggcacaaucacaagcggcuggacauuuggagcuggcgccgcucugcagauccccuuugcuaugcagauggccuaccgguucaacggcugcggagugacccagaaugugcuguacgagaaccagaagcugaucgccaaccaguucaacagcgccaucggcaagauccaggacagccugagcagcacagcaagcgcccugggaaagcugcaggacguggucaaccagaaugcccaggcacugaacacccuggucaagcagcuguccuccaacuucggcgccaucagcucugugcugaacgauauccugagcagacuggacaaggucgaggccgaggugcagaucgacagacugaucacaggcagacugcagagccuccagacauacgugacccagcagcugaucagagccgccgagauuagagccucugccaaucuggccgccaccaagaugucugagugugugcugggccagagcaagagaguggacuuuugcggcaagggcugucaccugaugagcuucccucagucugccccucacggcgugguguuucugcacgugacauaugugcccgcucaagagaagaauuucaccaccgcuccagccaucugccacgacggcaaagcccacuuuccuagagaaggcguguucguguccaacggcacccauugguucgugacacagcggaacuucuacgagccccagaucaucaccaccgacaacaccuucgugucuggcaacugcgacguugugaucggcauugugaacaauaccguguacgacccucugcagcccgagcuggacagc

SEQ ID NO: 12079 - RNA, 3441 nt, Artificial Sequence
  SARS-CoV-2/Wuhan/WIV05/2019__EPI_ISL_402128 spike protein CDS gc mod (1-1147)(Q965C_S1003C)
auguucguguuucuggugcugcugccccugguguccagccagugugugaaccugaccaccagaacacagcugccuccagccuacaccaacagcuucaccagaggcguguacuaccccgacaagguguucagauccagcgugcugcacucuacccaggaccuguuccugccuuucuucagcaacgugaccugguuccacgccauccacguguccggcaccaauggcaccaagagauucgacaaccccgugcugcccuucaacgacgggguguacuuugccagcaccgagaaguccaacaucaucagaggcuggaucuucggcaccacacuggacagcaagacccagagccugcugaucgugaacaacgccaccaacguggucaucaaagugugcgaguuccaguucugcaacgaccccuuccugggcgucuacuaccacaagaacaacaagagcuggauggaaagcgaguuccggguguacagcagcgccaacaacugcaccuucgaguacgugucccagccuuuccugauggaccuggaaggcaagcagggcaacuucaagaaccugcgcgaguucguguucaagaacaucgacggcuacuucaaaaucuacagcaagcacaccccuaucaaccucgugcgggaucugccucagggcuucucugcucuggaaccccugguggaucugcccaucggcaucaacaucacccgguuucagacacugcuggcccugcacagaagcuaccugacaccuggcgauagcagcagcggauggacagcuggugccgccgcuuacuaugugggcuaccugcagccuagaaccuuccugcugaaguacaacgagaacggcaccaucaccgacgccguggauugugcucuggauccucugagcgagacaaagugcacccugaaguccuucaccguggaaaagggcaucuaccagaccagcaacuuccgggugcagcccaccgaauccaucgugcgguuccccaauaucaccaaucugugccccuucggcgagguguucaaugccaccagauucgccucuguguacgccuggaaccggaagcggaucagcaauugcguggccgacuacuccgugcuguacaacuccgccagcuucagcaccuucaagugcuacggcguguccccuaccaagcugaacgaccugugcuucacaaacguguacgccgacagcuucgugauccggggagaugaagugcggcagauugccccuggacagacaggcaagaucgccgacuacaacuacaagcugcccgacgacuucaccggcugugugauugccuggaacagcaacaaccuggacuccaaagucggcggcaacuacaauuaccuguaccggcuguuccggaaguccaaucugaagcccuucgagcgggacaucagcaccgaaaucuaucaggccggcagcaccccuugcaacggcguggaaggcuucaacugcuacuucccacugcaguccuacggcuuucagcccacaaauggcgugggcuaucagcccuacagagugguggugcugagcuucgaacugcugcaugcuccugccacagugugcggcccuaagaaaagcaccaaucucgugaagaacaaaugcgugaacuucaacuucaacggccugaccggcaccggcgugcugacagagagcaacaagaaguuccugccauuccagcaguuuggccgggauaucgccgauaccacagacgccguuagagauccccagacacuggaaauccuggacaucaccccaugcagcuucggcggagugucugugaucaccccuggcaccaacaccagcaaucagguggcagugcuguaccaggacgugaacuguaccgaagugcccguggccauucacgccgaucagcugacaccuacauggcggguguacuccaccggcagcaauguguuucagaccagagccggcugucugaucggagccgagcacgugaacaauagcuacgagugcgacauccccaucggcgcuggcaucugugccagcuaccagacacagacaaacagccccagacgggcuagaagcguggccagccagagcaucauugccuacacaaugucucugggcgccgagaacagcguggccuacuccaacaacucuaucgcuauccccaccaacuucaccaucagcgugaccaccgagauccugccuguguccaugaccaagaccagcguggacugcaccauguacaucugcggcgauuccaccgagugcuccaaccugcugcugcaguacggcagcuucugcacccagcugaauagagcccugacagggaucgccguggaacaggacaagaacacccaagagguguucgcccaagugaagcaaaucuacaagaccccuccuaucaaggacuucggcggcuucaauuucagccagauucugcccgauccuagcaagcccagcaagcggagcuucaucgaggaccugcuguucaacaaagugacacuggccgacgccggcuucaucaagcaguauggcgauugucugggcgacauugccgccagggaucugauuugcgcccagaaguuuaacggacugacagugcugccuccucugcugaccgaugagaugaucgcccaguacacaucugcccugcuggccggcacaaucacaagcggcuggacauuuggagcuggcgccgcucugcagauccccuuugcuaugcagauggccuaccgguucaacggcaucggagugacccagaaugugcuguacgagaaccagaagcugaucgccaaccaguucaacagcgccaucggcaagauccaggacagccugagcagcacagcaagcgcccugggaaagcugcaggacguggucaaccagaaugcccaggcacugaacacccuggucaagugccuguccuccaacuucggcgccaucagcucugugcugaacgauauccugagcagacuggacaaggucgaggccgaggugcagaucgacagacugaucacaggcagacugcagugucuccagacauacgugacccagcagcugaucagagccgccgagauuagagccucugccaaucuggccgccaccaagaugucugagugugugcugggccagagcaagagaguggacuuuugcggcaagggcuaccaccugaugagcuucccucagucugccccucacggcgugguguuucugcacgugacauaugugcccgcucaagagaagaauuucaccaccgcuccagccaucugccacgacggcaaagcccacuuuccuagagaaggcguguucguguccaacggcacccauugguucgugacacagcggaacuucuacgagccccagaucaucaccaccgacaacaccuucgugucuggcaacugcgacguugugaucggcauugugaacaauaccguguacgacccucugcagcccgagcuggacagc

SEQ ID NO: 12080 - RNA, 3441 nt, Artificial Sequence
  SARS-CoV-2/Wuhan/WIV05/2019__EPI_ISL_402128 spike protein CDS gc mod (1-1147)(F970C_G999C)
auguucguguuucuggugcugcugccccugguguccagccagugugugaaccugaccaccagaacacagcugccuccagccuacaccaacagcuucaccagaggcguguacuaccccgacaagguguucagauccagcgugcugcacucuacccaggaccuguuccugccuuucuucagcaacgugaccugguuccacgccauccacguguccggcaccaauggcaccaagagauucgacaaccccgugcugcccuucaacgacgggguguacuuugccagcaccgagaaguccaacaucaucagaggcuggaucuucggcaccacacuggacagcaagacccagagccugcugaucgugaacaacgccaccaacguggucaucaaagugugcgaguuccaguucugcaacgaccccuuccugggcgucuacuaccacaagaacaacaagagcuggauggaaagcgaguuccggguguacagcagcgccaacaacugcaccuucgaguacgugucccagccuuuccugauggaccuggaaggcaagcagggcaacuucaagaaccugcgcgaguucguguucaagaacaucgacggcuacuucaaaaucuacagcaagcacaccccuaucaaccucgugcgggaucugccucagggcuucucugcucuggaaccccugguggaucugcccaucggcaucaacaucacccgguuucagacacugcuggcccugcacagaagcuaccugacaccuggcgauagcagcagcggauggacagcuggugccgccgcuuacuaugugggcuaccugcagccuagaaccuuccugcugaaguacaacgagaacggcaccaucaccgacgccguggauugugcucuggauccucugagcgagacaaagugcacccugaaguccuucaccguggaaaagggcaucuaccagaccagcaacuuccgggugcagcccaccgaauccaucgugcgguuccccaauaucaccaaucugugccccuucggcgagguguucaaugccaccagauucgccucuguguacgccuggaaccggaagcggaucagcaauugcguggccgacuacuccgugcuguacaacuccgccagcuucagcaccuucaagugcuacggcguguccccuaccaagcugaacgaccugugcuucacaaacguguacgccgacagcuucgugauccggggagaugaagugcggcagauugccccuggacagacaggcaagaucgccgacuacaacuacaagcugcccgacgacuucaccggcugugugauugccuggaacagcaacaaccuggacuccaaagucggcggcaacuacaauuaccuguaccggcuguuccggaaguccaaucugaagcccuucgagcgggacaucagcaccgaaaucuaucaggccggcagcaccccuugcaacggcguggaaggcuucaacugcuacuucccacugcaguccuacggcuuucagcccacaaauggcgugggcuaucagcccuacagagugguggugcugagcuucgaacugcugcaugcuccugccacagugugcggcccuaagaaaagcaccaaucucgugaagaacaaaugcgugaacuucaacuucaacggccugaccggcaccggcgugcugacagagagcaacaagaaguuccugccauuccagcaguuuggccgggauaucgccgauaccacagacgccguuagagauccccagacacuggaaauccuggacaucaccccaugcagcuucggcggagugucugugaucaccccuggcaccaacaccagcaaucagguggcagugcuguaccaggacgugaacuguaccgaagugcccguggccauucacgccgaucagcugacaccuacauggcggguguacuccaccggcagcaauguguuucagaccagagccggcugucugaucggagccgagcacgugaacaauagcuacgagugcgacauccccaucggcgcuggcaucugugccagcuaccagacacagacaaacagccccagacgggcuagaagcguggccagccagagcaucauugccuacacaaugucucugggcgccgagaacagcguggccuacuccaacaacucuaucgcuauccccaccaacuucaccaucagcgugaccaccgagauccugccuguguccaugaccaagaccagcguggacugcaccauguacaucugcggcgauuccaccgagugcuccaaccugcugcugcaguacggcagcuucugcacccagcugaauagagcccugacagggaucgccguggaacaggacaagaacacccaagagguguucgcccaagugaagcaaaucuacaagaccccuccuaucaaggacuucggcggcuucaauuucagccagauucugcccgauccuagcaagcccagcaagcggagcuucaucgaggaccugcuguucaacaaagugacacuggccgacgccggcuucaucaagcaguauggcgauugucugggcgacauugccgccagggaucugauuugcgcccagaaguuuaacggacugacagugcugccuccucugcugaccgaugagaugaucgcccaguacacaucugcccugcuggccggcacaaucacaagcggcuggacauuuggagcuggcgccgcucugcagauccccuuugcuaugcagauggccuaccgguucaacggcaucggagugacccagaaugugcuguacgagaaccagaagcugaucgccaaccaguucaacagcgccaucggcaagauccaggacagccugagcagcacagcaagcgcccugggaaagcugcaggacguggucaaccagaaugcccaggcacugaacacccuggucaagcagcuguccuccaacugcggcgccaucagcucugugcugaacgauauccugagcagacuggacaaggucgaggccgaggugcagaucgacagacugaucacauguagacugcagagccuccagacauacgugacccagcagcugaucagagccgccgagauuagagccucugccaaucuggccgccaccaagaugucugagugugugcugggccagagcaagagaguggacuuuugcggcaagggcuaccaccugaugagcuucccucagucugccccucacggcgugguguuucugcacgugacauaugugcccgcucaagagaagaauuucaccaccgcuccagccaucugccacgacggcaaagcccacuuuccuagagaaggcguguucguguccaacggcacccauugguucgugacacagcggaacuucuacgagccccagaucaucaccaccgacaacaccuucgugucuggcaacugcgacguugugaucggcauugugaacaauaccguguacgacccucugcagcccgagcuggacagc

SEQ ID NO: 12081 - RNA, 3441 nt, Artificial Sequence
  SARS-CoV-2/Wuhan/WIV05/2019__EPI_ISL_402128 spike protein CDS gc mod (1-1147)(A972C_R995C)
auguucguguuucuggugcugcugccccugguguccagccagugugugaaccugaccaccagaacacagcugccuccagccuacaccaacagcuucaccagaggcguguacuaccccgacaagguguucagauccagcgugcugcacucuacccaggaccuguuccugccuuucuucagcaacgugaccugguuccacgccauccacguguccggcaccaauggcaccaagagauucgacaaccccgugcugcccuucaacgacgggguguacuuugccagcaccgagaaguccaacaucaucagaggcuggaucuucggcaccacacuggacagcaagacccagagccugcugaucgugaacaacgccaccaacguggucaucaaagugugcgaguuccaguucugcaacgaccccuuccugggcgucuacuaccacaagaacaacaagagcuggauggaaagcgaguuccggguguacagcagcgccaacaacugcaccuucgaguacgugucccagccuuuccugauggaccuggaaggcaagcagggcaacuucaagaaccugcgcgaguucguguucaagaacaucgacggcuacuucaaaaucuacagcaagcacaccccuaucaaccucgugcgggaucugccucagggcuucucugcucuggaaccccugguggaucugcccaucggcaucaacaucacccgguuucagacacugcuggcccugcacagaagcuaccugacaccuggcgauagcagcagcggauggacagcuggugccgccgcuuacuaugugggcuaccugcagccuagaaccuuccugcugaaguacaacgagaacggcaccaucaccgacgccguggauugugcucuggauccucugagcgagacaaagugcacccugaaguccuucaccguggaaaagggcaucuaccagaccagcaacuuccgggugcagcccaccgaauccaucgugcgguuccccaauaucaccaaucugugccccuucggcgagguguucaaugccaccagauucgccucuguguacgccuggaaccggaagcggaucagcaauugcguggccgacuacuccgugcuguacaacuccgccagcuucagcaccuucaagugcuacggcguguccccuaccaagcugaacgaccugugcuucacaaacguguacgccgacagcuucgugauccggggagaugaagugcggcagauugccccuggacagacaggcaagaucgccgacuacaacuacaagcugcccgacgacuucaccggcugugugauugccuggaacagcaacaaccuggacuccaaagucggcggcaacuacaauuaccuguaccggcuguuccggaaguccaaucugaagcccuucgagcgggacaucagcaccgaaaucuaucaggccggcagcaccccuugcaacggcguggaaggcuucaacugcuacuucccacugcaguccuacggcuuucagcccacaaauggcgugggcuaucagcccuacagagugguggugcugagcuucgaacugcugcaugcuccugccacagugugcggcccuaagaaaagcaccaaucucgugaagaacaaaugcgugaacuucaacuucaacggccugaccggcaccggcgugcugacagagagcaacaagaaguuccugccauuccagcaguuuggccgggauaucgccgauaccacagacgccguuagagauccccagacacuggaaauccuggacaucaccccaugcagcuucggcggagugucugugaucaccccuggcaccaacaccagcaaucagguggcagugcuguaccaggacgugaacuguaccgaagugcccguggccauucacgccgaucagcugacaccuacauggcggguguacuccaccggcagcaauguguuucagaccagagccggcugucugaucggagccgagcacgugaacaauagcuacgagugcgacauccccaucggcgcuggcaucugugccagcuaccagacacagacaaacagccccagacgggcuagaagcguggccagccagagcaucauugccuacacaaugucucugggcgccgagaacagcguggccuacuccaacaacucuaucgcuauccccaccaacuucaccaucagcgugaccaccgagauccugccuguguccaugaccaagaccagcguggacugcaccauguacaucugcggcgauuccaccgagugcuccaaccugcugcugcaguacggcagcuucugcacccagcugaauagagcccugacagggaucgccguggaacaggacaagaacacccaagagguguucgcccaagugaagcaaaucuacaagaccccuccuaucaaggacuucggcggcuucaauuucagccagauucugcccgauccuagcaagcccagcaagcggagcuucaucgaggaccugcuguucaacaaagugacacuggccgacgccggcuucaucaagcaguauggcgauugucugggcgacauugccgccagggaucugauuugcgcccagaaguuuaacggacugacagugcugccuccucugcugaccgaugagaugaucgcccaguacacaucugcccugcuggccggcacaaucacaagcggcuggacauuuggagcuggcgccgcucugcagauccccuuugcuaugcagauggccuaccgguucaacggcaucggagugacccagaaugugcuguacgagaaccagaagcugaucgccaaccaguucaacagcgccaucggcaagauccaggacagccugagcagcacagcaagcgcccugggaaagcugcaggacguggucaaccagaaugcccaggcacugaacacccuggucaagcagcuguccuccaacuucggcugcaucagcucugugcugaacgauauccugagcagacuggacaaggucgaggccgaggugcagaucgacugucugaucacaggcagacugcagagccuccagacauacgugacccagcagcugaucagagccgccgagauuagagccucugccaaucuggccgccaccaagaugucugagugugugcugggccagagcaagagaguggacuuuugcggcaagggcuaccaccugaugagcuucccucagucugccccucacggcgugguguuucugcacgugacauaugugcccgcucaagagaagaauuucaccaccgcuccagccaucugccacgacggcaaagcccacuuuccuagagaaggcguguucguguccaacggcacccauugguucgugacacagcggaacuucuacgagccccagaucaucaccaccgacaacaccuucgugucuggcaacugcgacguugugaucggcauugugaacaauaccguguacgacccucugcagcccgagcuggacagc

SEQ ID NO: 12082 - RNA, 3441 nt, Artificial Sequence
  SARS-CoV-2/Wuhan/WIV05/2019__EPI_ISL_402128 spike protein CDS gc mod (1-1147)(A890C_V1040C)
auguucguguuucuggugcugcugccccugguguccagccagugugugaaccugaccaccagaacacagcugccuccagccuacaccaacagcuucaccagaggcguguacuaccccgacaagguguucagauccagcgugcugcacucuacccaggaccuguuccugccuuucuucagcaacgugaccugguuccacgccauccacguguccggcaccaauggcaccaagagauucgacaaccccgugcugcccuucaacgacgggguguacuuugccagcaccgagaaguccaacaucaucagaggcuggaucuucggcaccacacuggacagcaagacccagagccugcugaucgugaacaacgccaccaacguggucaucaaagugugcgaguuccaguucugcaacgaccccuuccugggcgucuacuaccacaagaacaacaagagcuggauggaaagcgaguuccggguguacagcagcgccaacaacugcaccuucgaguacgugucccagccuuuccugauggaccuggaaggcaagcagggcaacuucaagaaccugcgcgaguucguguucaagaacaucgacggcuacuucaaaaucuacagcaagcacaccccuaucaaccucgugcgggaucugccucagggcuucucugcucuggaaccccugguggaucugcccaucggcaucaacaucacccgguuucagacacugcuggcccugcacagaagcuaccugacaccuggcgauagcagcagcggauggacagcuggugccgccgcuuacuaugugggcuaccugcagccuagaaccuuccugcugaaguacaacgagaacggcaccaucaccgacgccguggauugugcucuggauccucugagcgagacaaagugcacccugaaguccuucaccguggaaaagggcaucuaccagaccagcaacuuccgggugcagcccaccgaauccaucgugcgguuccccaauaucaccaaucugugccccuucggcgagguguucaaugccaccagauucgccucuguguacgccuggaaccggaagcggaucagcaauugcguggccgacuacuccgugcuguacaacuccgccagcuucagcaccuucaagugcuacggcguguccccuaccaagcugaacgaccugugcuucacaaacguguacgccgacagcuucgugauccggggagaugaagugcggcagauugccccuggacagacaggcaagaucgccgacuacaacuacaagcugcccgacgacuucaccggcugugugauugccuggaacagcaacaaccuggacuccaaagucggcggcaacuacaauuaccuguaccggcuguuccggaaguccaaucugaagcccuucgagcgggacaucagcaccgaaaucuaucaggccggcagcaccccuugcaacggcguggaaggcuucaacugcuacuucccacugcaguccuacggcuuucagcccacaaauggcgugggcuaucagcccuacagagugguggugcugagcuucgaacugcugcaugcuccugccacagugugcggcccuaagaaaagcaccaaucucgugaagaacaaaugcgugaacuucaacuucaacggccugaccggcaccggcgugcugacagagagcaacaagaaguuccugccauuccagcaguuuggccgggauaucgccgauaccacagacgccguuagagauccccagacacuggaaauccuggacaucaccccaugcagcuucggcggagugucugugaucaccccuggcaccaacaccagcaaucagguggcagugcuguaccaggacgugaacuguaccgaagugcccguggccauucacgccgaucagcugacaccuacauggcggguguacuccaccggcagcaauguguuucagaccagagccggcugucugaucggagccgagcacgugaacaauagcuacgagugcgacauccccaucggcgcuggcaucugugccagcuaccagacacagacaaacagccccagacgggcuagaagcguggccagccagagcaucauugccuacacaaugucucugggcgccgagaacagcguggccuacuccaacaacucuaucgcuauccccaccaacuucaccaucagcgugaccaccgagauccugccuguguccaugaccaagaccagcguggacugcaccauguacaucugcggcgauuccaccgagugcuccaaccugcugcugcaguacggcagcuucugcacccagcugaauagagcccugacagggaucgccguggaacaggacaagaacacccaagagguguucgcccaagugaagcaaaucuacaagaccccuccuaucaaggacuucggcggcuucaauuucagccagauucugcccgauccuagcaagcccagcaagcggagcuucaucgaggaccugcuguucaacaaagugacacuggccgacgccggcuucaucaagcaguauggcgauugucugggcgacauugccgccagggaucugauuugcgcccagaaguuuaacggacugacagugcugccuccucugcugaccgaugagaugaucgcccaguacacaucugcccugcuggccggcacaaucacaagcggcuggacauuuggaugcggcgccgcucugcagauccccuuugcuaugcagauggccuaccgguucaacggcaucggagugacccagaaugugcuguacgagaaccagaagcugaucgccaaccaguucaacagcgccaucggcaagauccaggacagccugagcagcacagcaagcgcccugggaaagcugcaggacguggucaaccagaaugcccaggcacugaacacccuggucaagcagcuguccuccaacuucggcgccaucagcucugugcugaacgauauccugagcagacuggacaaggucgaggccgaggugcagaucgacagacugaucacaggcagacugcagagccuccagacauacgugacccagcagcugaucagagccgccgagauuagagccucugccaaucuggccgccaccaagaugucugagugugugcugggccagagcaagagaugugacuuuugcggcaagggcuaccaccugaugagcuucccucagucugccccucacggcgugguguuucugcacgugacauaugugcccgcucaagagaagaauuucaccaccgcuccagccaucugccacgacggcaaagcccacuuuccuagagaaggcguguucguguccaacggcacccauugguucgugacacagcggaacuucuacgagccccagaucaucaccaccgacaacaccuucgugucuggcaacugcgacguugugaucggcauugugaacaauaccguguacgacccucugcagcccgagcuggacagc

SEQ ID NO: 12083 - RNA, 3441 nt, Artificial Sequence
  SARS-CoV-2/Wuhan/WIV05/2019__EPI_ISL_402128 spike protein CDS gc mod (1-1147)(T874C_S1055C)
auguucguguuucuggugcugcugccccugguguccagccagugugugaaccugaccaccagaacacagcugccuccagccuacaccaacagcuucaccagaggcguguacuaccccgacaagguguucagauccagcgugcugcacucuacccaggaccuguuccugccuuucuucagcaacgugaccugguuccacgccauccacguguccggcaccaauggcaccaagagauucgacaaccccgugcugcccuucaacgacgggguguacuuugccagcaccgagaaguccaacaucaucagaggcuggaucuucggcaccacacuggacagcaagacccagagccugcugaucgugaacaacgccaccaacguggucaucaaagugugcgaguuccaguucugcaacgaccccuuccugggcgucuacuaccacaagaacaacaagagcuggauggaaagcgaguuccggguguacagcagcgccaacaacugcaccuucgaguacgugucccagccuuuccugauggaccuggaaggcaagcagggcaacuucaagaaccugcgcgaguucguguucaagaacaucgacggcuacuucaaaaucuacagcaagcacaccccuaucaaccucgugcgggaucugccucagggcuucucugcucuggaaccccugguggaucugcccaucggcaucaacaucacccgguuucagacacugcuggcccugcacagaagcuaccugacaccuggcgauagcagcagcggauggacagcuggugccgccgcuuacuaugugggcuaccugcagccuagaaccuuccugcugaaguacaacgagaacggcaccaucaccgacgccguggauugugcucuggauccucugagcgagacaaagugcacccugaaguccuucaccguggaaaagggcaucuaccagaccagcaacuuccgggugcagcccaccgaauccaucgugcgguuccccaauaucaccaaucugugccccuucggcgagguguucaaugccaccagauucgccucuguguacgccuggaaccggaagcggaucagcaauugcguggccgacuacuccgugcuguacaacuccgccagcuucagcaccuucaagugcuacggcguguccccuaccaagcugaacgaccugugcuucacaaacguguacgccgacagcuucgugauccggggagaugaagugcggcagauugccccuggacagacaggcaagaucgccgacuacaacuacaagcugcccgacgacuucaccggcugugugauugccuggaacagcaacaaccuggacuccaaagucggcggcaacuacaauuaccuguaccggcuguuccggaaguccaaucugaagcccuucgagcgggacaucagcaccgaaaucuaucaggccggcagcaccccuugcaacggcguggaaggcuucaacugcuacuucccacugcaguccuacggcuuucagcccacaaauggcgugggcuaucagcccuacagagugguggugcugagcuucgaacugcugcaugcuccugccacagugugcggcccuaagaaaagcaccaaucucgugaagaacaaaugcgugaacuucaacuucaacggccugaccggcaccggcgugcugacagagagcaacaagaaguuccugccauuccagcaguuuggccgggauaucgccgauaccacagacgccguuagagauccccagacacuggaaauccuggacaucaccccaugcagcuucggcggagugucugugaucaccccuggcaccaacaccagcaaucagguggcagugcuguaccaggacgugaacuguaccgaagugcccguggccauucacgccgaucagcugacaccuacauggcggguguacuccaccggcagcaauguguuucagaccagagccggcugucugaucggagccgagcacgugaacaauagcuacgagugcgacauccccaucggcgcuggcaucugugccagcuaccagacacagacaaacagccccagacgggcuagaagcguggccagccagagcaucauugccuacacaaugucucugggcgccgagaacagcguggccuacuccaacaacucuaucgcuauccccaccaacuucaccaucagcgugaccaccgagauccugccuguguccaugaccaagaccagcguggacugcaccauguacaucugcggcgauuccaccgagugcuccaaccugcugcugcaguacggcagcuucugcacccagcugaauagagcccugacagggaucgccguggaacaggacaagaacacccaagagguguucgcccaagugaagcaaaucuacaagaccccuccuaucaaggacuucggcggcuucaauuucagccagauucugcccgauccuagcaagcccagcaagcggagcuucaucgaggaccugcuguucaacaaagugacacuggccgacgccggcuucaucaagcaguauggcgauugucugggcgacauugccgccagggaucugauuugcgcccagaaguuuaacggacugacagugcugccuccucugcugaccgaugagaugaucgcccaguacugcucugcccugcuggccggcacaaucacaagcggcuggacauuuggagcuggcgccgcucugcagauccccuuugcuaugcagauggccuaccgguucaacggcaucggagugacccagaaugugcuguacgagaaccagaagcugaucgccaaccaguucaacagcgccaucggcaagauccaggacagccugagcagcacagcaagcgcccugggaaagcugcaggacguggucaaccagaaugcccaggcacugaacacccuggucaagcagcuguccuccaacuucggcgccaucagcucugugcugaacgauauccugagcagacuggacaaggucgaggccgaggugcagaucgacagacugaucacaggcagacugcagagccuccagacauacgugacccagcagcugaucagagccgccgagauuagagccucugccaaucuggccgccaccaagaugucugagugugugcugggccagagcaagagaguggacuuuugcggcaagggcuaccaccugaugagcuucccucagugcgccccucacggcgugguguuucugcacgugacauaugugcccgcucaagagaagaauuucaccaccgcuccagccaucugccacgacggcaaagcccacuuuccuagagaaggcguguucguguccaacggcacccauugguucgugacacagcggaacuucuacgagccccagaucaucaccaccgacaacaccuucgugucuggcaacugcgacguugugaucggcauugugaacaauaccguguacgacccucugcagcccgagcuggacagc

SEQ ID NO: 12084 - RNA, 4116 nt, Artificial Sequence
  SARS-CoV-2/Wuhan/WIV05/2019__EPI_ISL_402128 spike protein CDS gc mod (1-1211) LumSynth construct
auguucguguuucuggugcugcugccccugguguccagccagugugugaaccugaccaccagaacacagcugccuccagccuacaccaacagcuucaccagaggcguguacuaccccgacaagguguucagauccagcgugcugcacucuacccaggaccuguuccugccuuucuucagcaacgugaccugguuccacgccauccacguguccggcaccaauggcaccaagagauucgacaaccccgugcugcccuucaacgacgggguguacuuugccagcaccgagaaguccaacaucaucagaggcuggaucuucggcaccacacuggacagcaagacccagagccugcugaucgugaacaacgccaccaacguggucaucaaagugugcgaguuccaguucugcaacgaccccuuccugggcgucuacuaccacaagaacaacaagagcuggauggaaagcgaguuccggguguacagcagcgccaacaacugcaccuucgaguacgugucccagccuuuccugauggaccuggaaggcaagcagggcaacuucaagaaccugcgcgaguucguguucaagaacaucgacggcuacuucaaaaucuacagcaagcacaccccuaucaaccucgugcgggaucugccucagggcuucucugcucuggaaccccugguggaucugcccaucggcaucaacaucacccgguuucagacacugcuggcccugcacagaagcuaccugacaccuggcgauagcagcagcggauggacagcuggugccgccgcuuacuaugugggcuaccugcagccuagaaccuuccugcugaaguacaacgagaacggcaccaucaccgacgccguggauugugcucuggauccucugagcgagacaaagugcacccugaaguccuucaccguggaaaagggcaucuaccagaccagcaacuuccgggugcagcccaccgaauccaucgugcgguuccccaauaucaccaaucugugccccuucggcgagguguucaaugccaccagauucgccucuguguacgccuggaaccggaagcggaucagcaauugcguggccgacuacuccgugcuguacaacuccgccagcuucagcaccuucaagugcuacggcguguccccuaccaagcugaacgaccugugcuucacaaacguguacgccgacagcuucgugauccggggagaugaagugcggcagauugccccuggacagacaggcaagaucgccgacuacaacuacaagcugcccgacgacuucaccggcugugugauugccuggaacagcaacaaccuggacuccaaagucggcggcaacuacaauuaccuguaccggcuguuccggaaguccaaucugaagcccuucgagcgggacaucagcaccgaaaucuaucaggccggcagcaccccuugcaacggcguggaaggcuucaacugcuacuucccacugcaguccuacggcuuucagcccacaaauggcgugggcuaucagcccuacagagugguggugcugagcuucgaacugcugcaugcuccugccacagugugcggcccuaagaaaagcaccaaucucgugaagaacaaaugcgugaacuucaacuucaacggccugaccggcaccggcgugcugacagagagcaacaagaaguuccugccauuccagcaguuuggccgggauaucgccgauaccacagacgccguuagagauccccagacacuggaaauccuggacaucaccccaugcagcuucggcggagugucugugaucaccccuggcaccaacaccagcaaucagguggcagugcuguaccaggacgugaacuguaccgaagugcccguggccauucacgccgaucagcugacaccuacauggcggguguacuccaccggcagcaauguguuucagaccagagccggcugucugaucggagccgagcacgugaacaauagcuacgagugcgacauccccaucggcgcuggcaucugugccagcuaccagacacagacaaacagccccagacgggcuagaagcguggccagccagagcaucauugccuacacaaugucucugggcgccgagaacagcguggccuacuccaacaacucuaucgcuauccccaccaacuucaccaucagcgugaccaccgagauccugccuguguccaugaccaagaccagcguggacugcaccauguacaucugcggcgauuccaccgagugcuccaaccugcugcugcaguacggcagcuucugcacccagcugaauagagcccugacagggaucgccguggaacaggacaagaacacccaagagguguucgcccaagugaagcaaaucuacaagaccccuccuaucaaggacuucggcggcuucaauuucagccagauucugcccgauccuagcaagcccagcaagcggagcuucaucgaggaccugcuguucaacaaagugacacuggccgacgccggcuucaucaagcaguauggcgauugucugggcgacauugccgccagggaucugauuugcgcccagaaguuuaacggacugacagugcugccuccucugcugaccgaugagaugaucgcccaguacacaucugcccugcuggccggcacaaucacaagcggcuggacauuuggagcuggcgccgcucugcagauccccuuugcuaugcagauggccuaccgguucaacggcaucggagugacccagaaugugcuguacgagaaccagaagcugaucgccaaccaguucaacagcgccaucggcaagauccaggacagccugagcagcacagcaagcgcccugggaaagcugcaggacguggucaaccagaaugcccaggcacugaacacccuggucaagcagcuguccuccaacuucggcgccaucagcucugugcugaacgauauccugagcagacuggacaaggucgaggccgaggugcagaucgacagacugaucacaggcagacugcagagccuccagacauacgugacccagcagcugaucagagccgccgagauuagagccucugccaaucuggccgccaccaagaugucugagugugugcugggccagagcaagagaguggacuuuugcggcaagggcuaccaccugaugagcuucccucagucugccccucacggcgugguguuucugcacgugacauaugugcccgcucaagagaagaauuucaccaccgcuccagccaucugccacgacggcaaagcccacuuuccuagagaaggcguguucguguccaacggcacccauugguucgugacacagcggaacuucuacgagccccagaucaucaccaccgacaacaccuucgugucuggcaacugcgacguugugaucggcauugugaacaauaccguguacgacccucugcagcccgagcuggacagcuucaaagaggaacuggacaaguacuuuaagaaccacacaagccccgacguggaccugggcgauaucagcggaaucaaugccagcgucgugaacauccagaaagagaucgaccggcugaacgagguggccaagaaucugaacgagagccugaucgaccugcaagaacuggggaaguacgagcaguacaucaagggcggaggaucuggcggaggacagaucuacgagggcaagcugacagccgagggccugagauuuggaaucguggccagccgguucaaucacgcccugguggauagacugguggaaggcgccaucgaugccauugucagacacggcggcagagaagaggacaucacccucguuagagugcccggcucuugggagauuccuguggcugcuggcgagcuggcccggaaagaagauaucgacgccguuaucgccaucggcgugcugaucagaggcgccacaccucacuucgacuauaucgccagcgagguguccaaaggccuggccgaucugagccuggaacugagaaagcccaucaccuucggcgugaucaccgcugacacacuggaacaggccauugagagagccggcaccaagcacggcaacaaaggaugggaagccgcucuguccgccaucgagauggccaaccuguucaagagccugcgguga

SEQ ID NO: 12085 - RNA, 4116 nt, Artificial Sequence
  SARS-CoV-2/Wuhan/WIV05/2019__EPI_ISL_402128 spike protein CDS gc mod (1-1211)(K986P_V987P) LumSynth construct
auguucguguuucuggugcugcugccccugguguccagccagugugugaaccugaccaccagaacacagcugccuccagccuacaccaacagcuucaccagaggcguguacuaccccgacaagguguucagauccagcgugcugcacucuacccaggaccuguuccugccuuucuucagcaacgugaccugguuccacgccauccacguguccggcaccaauggcaccaagagauucgacaaccccgugcugcccuucaacgacgggguguacuuugccagcaccgagaaguccaacaucaucagaggcuggaucuucggcaccacacuggacagcaagacccagagccugcugaucgugaacaacgccaccaacguggucaucaaagugugcgaguuccaguucugcaacgaccccuuccugggcgucuacuaccacaagaacaacaagagcuggauggaaagcgaguuccggguguacagcagcgccaacaacugcaccuucgaguacgugucccagccuuuccugauggaccuggaaggcaagcagggcaacuucaagaaccugcgcgaguucguguucaagaacaucgacggcuacuucaaaaucuacagcaagcacaccccuaucaaccucgugcgggaucugccucagggcuucucugcucuggaaccccugguggaucugcccaucggcaucaacaucacccgguuucagacacugcuggcccugcacagaagcuaccugacaccuggcgauagcagcagcggauggacagcuggugccgccgcuuacuaugugggcuaccugcagccuagaaccuuccugcugaaguacaacgagaacggcaccaucaccgacgccguggauugugcucuggauccucugagcgagacaaagugcacccugaaguccuucaccguggaaaagggcaucuaccagaccagcaacuuccgggugcagcccaccgaauccaucgugcgguuccccaauaucaccaaucugugccccuucggcgagguguucaaugccaccagauucgccucuguguacgccuggaaccggaagcggaucagcaauugcguggccgacuacuccgugcuguacaacuccgccagcuucagcaccuucaagugcuacggcguguccccuaccaagcugaacgaccugugcuucacaaacguguacgccgacagcuucgugauccggggagaugaagugcggcagauugccccuggacagacaggcaagaucgccgacuacaacuacaagcugcccgacgacuucaccggcugugugauugccuggaacagcaacaaccuggacuccaaagucggcggcaacuacaauuaccuguaccggcuguuccggaaguccaaucugaagcccuucgagcgggacaucagcaccgaaaucuaucaggccggcagcaccccuugcaacggcguggaaggcuucaacugcuacuucccacugcaguccuacggcuuucagcccacaaauggcgugggcuaucagcccuacagagugguggugcugagcuucgaacugcugcaugcuccugccacagugugcggcccuaagaaaagcaccaaucucgugaagaacaaaugcgugaacuucaacuucaacggccugaccggcaccggcgugcugacagagagcaacaagaaguuccugccauuccagcaguuuggccgggauaucgccgauaccacagacgccguuagagauccccagacacuggaaauccuggacaucaccccaugcagcuucggcggagugucugugaucaccccuggcaccaacaccagcaaucagguggcagugcuguaccaggacgugaacuguaccgaagugcccguggccauucacgccgaucagcugacaccuacauggcggguguacuccaccggcagcaauguguuucagaccagagccggcugucugaucggagccgagcacgugaacaauagcuacgagugcgacauccccaucggcgcuggcaucugugccagcuaccagacacagacaaacagccccagacgggcuagaagcguggccagccagagcaucauugccuacacaaugucucugggcgccgagaacagcguggccuacuccaacaacucuaucgcuauccccaccaacuucaccaucagcgugaccaccgagauccugccuguguccaugaccaagaccagcguggacugcaccauguacaucugcggcgauuccaccgagugcuccaaccugcugcugcaguacggcagcuucugcacccagcugaauagagcccugacagggaucgccguggaacaggacaagaacacccaagagguguucgcccaagugaagcaaaucuacaagaccccuccuaucaaggacuucggcggcuucaauuucagccagauucugcccgauccuagcaagcccagcaagcggagcuucaucgaggaccugcuguucaacaaagugacacuggccgacgccggcuucaucaagcaguauggcgauugucugggcgacauugccgccagggaucugauuugcgcccagaaguuuaacggacugacagugcugccuccucugcugaccgaugagaugaucgcccaguacacaucugcccugcuggccggcacaaucacaagcggcuggacauuuggagcuggcgccgcucugcagauccccuuugcuaugcagauggccuaccgguucaacggcaucggagugacccagaaugugcuguacgagaaccagaagcugaucgccaaccaguucaacagcgccaucggcaagauccaggacagccugagcagcacagcaagcgcccugggaaagcugcaggacguggucaaccagaaugcccaggcacugaacacccuggucaagcagcuguccuccaacuucggcgccaucagcucugugcugaacgauauccugagcagacuggacccuccugaggccgaggugcagaucgacagacugaucacaggcagacugcagagccuccagacauacgugacccagcagcugaucagagccgccgagauuagagccucugccaaucuggccgccaccaagaugucugagugugugcugggccagagcaagagaguggacuuuugcggcaagggcuaccaccugaugagcuucccucagucugccccucacggcgugguguuucugcacgugacauaugugcccgcucaagagaagaauuucaccaccgcuccagccaucugccacgacggcaaagcccacuuuccuagagaaggcguguucguguccaacggcacccauugguucgugacacagcggaacuucuacgagccccagaucaucaccaccgacaacaccuucgugucuggcaacugcgacguugugaucggcauugugaacaauaccguguacgacccucugcagcccgagcuggacagcuucaaagaggaacuggacaaguacuuuaagaaccacacaagccccgacguggaccugggcgauaucagcggaaucaaugccagcgucgugaacauccagaaagagaucgaccggcugaacgagguggccaagaaucugaacgagagccugaucgaccugcaagaacuggggaaguacgagcaguacaucaagggcggaggaucuggcggaggacagaucuacgagggcaagcugacagccgagggccugagauuuggaaucguggccagccgguucaaucacgcccugguggauagacugguggaaggcgccaucgaugccauugucagacacggcggcagagaagaggacaucacccucguuagagugcccggcucuugggagauuccuguggcugcuggcgagcuggcccggaaagaagauaucgacgccguuaucgccaucggcgugcugaucagaggcgccacaccucacuucgacuauaucgccagcgagguguccaaaggccuggccgaucugagccuggaacugagaaagcccaucaccuucggcgugaucaccgcugacacacuggaacaggccauugagagagccggcaccaagcacggcaacaaaggaugggaagccgcucuguccgccaucgagauggccaaccuguucaagagccugcgguga

SEQ ID NO: 12086 - RNA, 4116 nt, Artificial Sequence
  SARS-CoV-2/Wuhan/WIV05/2019__EPI_ISL_402128 spike protein CDS gc mod (1-1211)(K986P_V987P_T887WN_A1020W) LumSynth construct
auguucguguuucuggugcugcugccccugguguccagccagugugugaaccugaccaccagaacacagcugccuccagccuacaccaacagcuucaccagaggcguguacuaccccgacaagguguucagauccagcgugcugcacucuacccaggaccuguuccugccuuucuucagcaacgugaccugguuccacgccauccacguguccggcaccaauggcaccaagagauucgacaaccccgugcugcccuucaacgacgggguguacuuugccagcaccgagaaguccaacaucaucagaggcuggaucuucggcaccacacuggacagcaagacccagagccugcugaucgugaacaacgccaccaacguggucaucaaagugugcgaguuccaguucugcaacgaccccuuccugggcgucuacuaccacaagaacaacaagagcuggauggaaagcgaguuccggguguacagcagcgccaacaacugcaccuucgaguacgugucccagccuuuccugauggaccuggaaggcaagcagggcaacuucaagaaccugcgcgaguucguguucaagaacaucgacggcuacuucaaaaucuacagcaagcacaccccuaucaaccucgugcgggaucugccucagggcuucucugcucuggaaccccugguggaucugcccaucggcaucaacaucacccgguuucagacacugcuggcccugcacagaagcuaccugacaccuggcgauagcagcagcggauggacagcuggugccgccgcuuacuaugugggcuaccugcagccuagaaccuuccugcugaaguacaacgagaacggcaccaucaccgacgccguggauugugcucuggauccucugagcgagacaaagugcacccugaaguccuucaccguggaaaagggcaucuaccagaccagcaacuuccgggugcagcccaccgaauccaucgugcgguuccccaauaucaccaaucugugccccuucggcgagguguucaaugccaccagauucgccucuguguacgccuggaaccggaagcggaucagcaauugcguggccgacuacuccgugcuguacaacuccgccagcuucagcaccuucaagugcuacggcguguccccuaccaagcugaacgaccugugcuucacaaacguguacgccgacagcuucgugauccggggagaugaagugcggcagauugccccuggacagacaggcaagaucgccgacuacaacuacaagcugcccgacgacuucaccggcugugugauugccuggaacagcaacaaccuggacuccaaagucggcggcaacuacaauuaccuguaccggcuguuccggaaguccaaucugaagcccuucgagcgggacaucagcaccgaaaucuaucaggccggcagcaccccuugcaacggcguggaaggcuucaacugcuacuucccacugcaguccuacggcuuucagcccacaaauggcgugggcuaucagcccuacagagugguggugcugagcuucgaacugcugcaugcuccugccacagugugcggcccuaagaaaagcaccaaucucgugaagaacaaaugcgugaacuucaacuucaacggccugaccggcaccggcgugcugacagagagcaacaagaaguuccugccauuccagcaguuuggccgggauaucgccgauaccacagacgccguuagagauccccagacacuggaaauccuggacaucaccccaugcagcuucggcggagugucugugaucaccccuggcaccaacaccagcaaucagguggcagugcuguaccaggacgugaacuguaccgaagugcccguggccauucacgccgaucagcugacaccuacauggcggguguacuccaccggcagcaauguguuucagaccagagccggcugucugaucggagccgagcacgugaacaauagcuacgagugcgacauccccaucggcgcuggcaucugugccagcuaccagacacagacaaacagccccagacgggcuagaagcguggccagccagagcaucauugccuacacaaugucucugggcgccgagaacagcguggccuacuccaacaacucuaucgcuauccccaccaacuucaccaucagcgugaccaccgagauccugccuguguccaugaccaagaccagcguggacugcaccauguacaucugcggcgauuccaccgagugcuccaaccugcugcugcaguacggcagcuucugcacccagcugaauagagcccugacagggaucgccguggaacaggacaagaacacccaagagguguucgcccaagugaagcaaaucuacaagaccccuccuaucaaggacuucggcggcuucaauuucagccagauucugcccgauccuagcaagcccagcaagcggagcuucaucgaggaccugcuguucaacaaagugacacuggccgacgccggcuucaucaagcaguauggcgauugucugggcgacauugccgccagggaucugauuugcgcccagaaguuuaacggacugacagugcugccuccucugcugaccgaugagaugaucgcccaguacacaucugcccugcuggccggcacaaucacaagcggcuggugguuuggagcuggcgccgcucugcagauccccuuugcuaugcagauggccuaccgguucaacggcaucggagugacccagaaugugcuguacgagaaccagaagcugaucgccaaccaguucaacagcgccaucggcaagauccaggacagccugagcagcacagcaagcgcccugggaaagcugcaggacguggucaaccagaaugcccaggcacugaacacccuggucaagcagcuguccuccaacuucggcgccaucagcucugugcugaacgauauccugagcagacuggacccuccugaggccgaggugcagaucgacagacugaucacaggcagacugcagagccuccagacauacgugacccagcagcugaucagagccgccgagauuagauggucugccaaucuggccgccaccaagaugucugagugugugcugggccagagcaagagaguggacuuuugcggcaagggcuaccaccugaugagcuucccucagucugccccucacggcgugguguuucugcacgugacauaugugcccgcucaagagaagaauuucaccaccgcuccagccaucugccacgacggcaaagcccacuuuccuagagaaggcguguucguguccaacggcacccauugguucgugacacagcggaacuucuacgagccccagaucaucaccaccgacaacaccuucgugucuggcaacugcgacguugugaucggcauugugaacaauaccguguacgacccucugcagcccgagcuggacagcuucaaagaggaacuggacaaguacuuuaagaaccacacaagccccgacguggaccugggcgauaucagcggaaucaaugccagcgucgugaacauccagaaagagaucgaccggcugaacgagguggccaagaaucugaacgagagccugaucgaccugcaagaacuggggaaguacgagcaguacaucaagggcggaggaucuggcggaggacagaucuacgagggcaagcugacagccgagggccugagauuuggaaucguggccagccgguucaaucacgcccugguggauagacugguggaaggcgccaucgaugccauugucagacacggcggcagagaagaggacaucacccucguuagagugcccggcucuugggagauuccuguggcugcuggcgagcuggcccggaaagaagauaucgacgccguuaucgccaucggcgugcugaucagaggcgccacaccucacuucgacuauaucgccagcgagguguccaaaggccuggccgaucugagccuggaacugagaaagcccaucaccuucggcgugaucaccgcugacacacuggaacaggccauugagagagccggcaccaagcacggcaacaaaggaugggaagccgcucuguccgccaucgagauggccaaccuguucaagagccugcgguga

SEQ ID NO: 12087 - RNA, 4116 nt, Artificial Sequence
  SARS-CoV-2/Wuhan/WIV05/2019__EPI_ISL_402128 spike protein CDS gc mod (1-1211)(K986P_V987P_P1069F) LumSynth construct
auguucguguuucuggugcugcugccccugguguccagccagugugugaaccugaccaccagaacacagcugccuccagccuacaccaacagcuucaccagaggcguguacuaccccgacaagguguucagauccagcgugcugcacucuacccaggaccuguuccugccuuucuucagcaacgugaccugguuccacgccauccacguguccggcaccaauggcaccaagagauucgacaaccccgugcugcccuucaacgacgggguguacuuugccagcaccgagaaguccaacaucaucagaggcuggaucuucggcaccacacuggacagcaagacccagagccugcugaucgugaacaacgccaccaacguggucaucaaagugugcgaguuccaguucugcaacgaccccuuccugggcgucuacuaccacaagaacaacaagagcuggauggaaagcgaguuccggguguacagcagcgccaacaacugcaccuucgaguacgugucccagccuuuccugauggaccuggaaggcaagcagggcaacuucaagaaccugcgcgaguucguguucaagaacaucgacggcuacuucaaaaucuacagcaagcacaccccuaucaaccucgugcgggaucugccucagggcuucucugcucuggaaccccugguggaucugcccaucggcaucaacaucacccgguuucagacacugcuggcccugcacagaagcuaccugacaccuggcgauagcagcagcggauggacagcuggugccgccgcuuacuaugugggcuaccugcagccuagaaccuuccugcugaaguacaacgagaacggcaccaucaccgacgccguggauugugcucuggauccucugagcgagacaaagugcacccugaaguccuucaccguggaaaagggcaucuaccagaccagcaacuuccgggugcagcccaccgaauccaucgugcgguuccccaauaucaccaaucugugccccuucggcgagguguucaaugccaccagauucgccucuguguacgccuggaaccggaagcggaucagcaauugcguggccgacuacuccgugcuguacaacuccgccagcuucagcaccuucaagugcuacggcguguccccuaccaagcugaacgaccugugcuucacaaacguguacgccgacagcuucgugauccggggagaugaagugcggcagauugccccuggacagacaggcaagaucgccgacuacaacuacaagcugcccgacgacuucaccggcugugugauugccuggaacagcaacaaccuggacuccaaagucggcggcaacuacaauuaccuguaccggcuguuccggaaguccaaucugaagcccuucgagcgggacaucagcaccgaaaucuaucaggccggcagcaccccuugcaacggcguggaaggcuucaacugcuacuucccacugcaguccuacggcuuucagcccacaaauggcgugggcuaucagcccuacagagugguggugcugagcuucgaacugcugcaugcuccugccacagugugcggcccuaagaaaagcaccaaucucgugaagaacaaaugcgugaacuucaacuucaacggccugaccggcaccggcgugcugacagagagcaacaagaaguuccugccauuccagcaguuuggccgggauaucgccgauaccacagacgccguuagagauccccagacacuggaaauccuggacaucaccccaugcagcuucggcggagugucugugaucaccccuggcaccaacaccagcaaucagguggcagugcuguaccaggacgugaacuguaccgaagugcccguggccauucacgccgaucagcugacaccuacauggcggguguacuccaccggcagcaauguguuucagaccagagccggcugucugaucggagccgagcacgugaacaauagcuacgagugcgacauccccaucggcgcuggcaucugugccagcuaccagacacagacaaacagccccagacgggcuagaagcguggccagccagagcaucauugccuacacaaugucucugggcgccgagaacagcguggccuacuccaacaacucuaucgcuauccccaccaacuucaccaucagcgugaccaccgagauccugccuguguccaugaccaagaccagcguggacugcaccauguacaucugcggcgauuccaccgagugcuccaaccugcugcugcaguacggcagcuucugcacccagcugaauagagcccugacagggaucgccguggaacaggacaagaacacccaagagguguucgcccaagugaagcaaaucuacaagaccccuccuaucaaggacuucggcggcuucaauuucagccagauucugcccgauccuagcaagcccagcaagcggagcuucaucgaggaccugcuguucaacaaagugacacuggccgacgccggcuucaucaagcaguauggcgauugucugggcgacauugccgccagggaucugauuugcgcccagaaguuuaacggacugacagugcugccuccucugcugaccgaugagaugaucgcccaguacacaucugcccugcuggccggcacaaucacaagcggcuggacauuuggagcuggcgccgcucugcagauccccuuugcuaugcagauggccuaccgguucaacggcaucggagugacccagaaugugcuguacgagaaccagaagcugaucgccaaccaguucaacagcgccaucggcaagauccaggacagccugagcagcacagcaagcgcccugggaaagcugcaggacguggucaaccagaaugcccaggcacugaacacccuggucaagcagcuguccuccaacuucggcgccaucagcucugugcugaacgauauccugagcagacuggacccuccugaggccgaggugcagaucgacagacugaucacaggcagacugcagagccuccagacauacgugacccagcagcugaucagagccgccgagauuagagccucugccaaucuggccgccaccaagaugucugagugugugcugggccagagcaagagaguggacuuuugcggcaagggcuaccaccugaugagcuucccucagucugccccucacggcgugguguuucugcacgugacauauguguucgcucaagagaagaauuucaccaccgcuccagccaucugccacgacggcaaagcccacuuuccuagagaaggcguguucguguccaacggcacccauugguucgugacacagcggaacuucuacgagccccagaucaucaccaccgacaacaccuucgugucuggcaacugcgacguugugaucggcauugugaacaauaccguguacgacccucugcagcccgagcuggacagcuucaaagaggaacuggacaaguacuuuaagaaccacacaagccccgacguggaccugggcgauaucagcggaaucaaugccagcgucgugaacauccagaaagagaucgaccggcugaacgagguggccaagaaucugaacgagagccugaucgaccugcaagaacuggggaaguacgagcaguacaucaagggcggaggaucuggcggaggacagaucuacgagggcaagcugacagccgagggccugagauuuggaaucguggccagccgguucaaucacgcccugguggauagacugguggaaggcgccaucgaugccauugucagacacggcggcagagaagaggacaucacccucguuagagugcccggcucuugggagauuccuguggcugcuggcgagcuggcccggaaagaagauaucgacgccguuaucgccaucggcgugcugaucagaggcgccacaccucacuucgacuauaucgccagcgagguguccaaaggccuggccgaucugagccuggaacugagaaagcccaucaccuucggcgugaucaccgcugacacacuggaacaggccauugagagagccggcaccaagcacggcaacaaaggaugggaagccgcucuguccgccaucgagauggccaaccuguucaagagccugcgguga

SEQ ID NO: 12088 - RNA, 4116 nt, Artificial Sequence
  SARS-CoV-2/Wuhan/WIV05/2019__EPI_ISL_402128 spike protein CDS gc mod (1-1211)(K986P_V987P_ H1048Q_H1064N_ H1083N_H1101N) LumSynth construct
auguucguguuucuggugcugcugccccugguguccagccagugugugaaccugaccaccagaacacagcugccuccagccuacaccaacagcuucaccagaggcguguacuaccccgacaagguguucagauccagcgugcugcacucuacccaggaccuguuccugccuuucuucagcaacgugaccugguuccacgccauccacguguccggcaccaauggcaccaagagauucgacaaccccgugcugcccuucaacgacgggguguacuuugccagcaccgagaaguccaacaucaucagaggcuggaucuucggcaccacacuggacagcaagacccagagccugcugaucgugaacaacgccaccaacguggucaucaaagugugcgaguuccaguucugcaacgaccccuuccugggcgucuacuaccacaagaacaacaagagcuggauggaaagcgaguuccggguguacagcagcgccaacaacugcaccuucgaguacgugucccagccuuuccugauggaccuggaaggcaagcagggcaacuucaagaaccugcgcgaguucguguucaagaacaucgacggcuacuucaaaaucuacagcaagcacaccccuaucaaccucgugcgggaucugccucagggcuucucugcucuggaaccccugguggaucugcccaucggcaucaacaucacccgguuucagacacugcuggcccugcacagaagcuaccugacaccuggcgauagcagcagcggauggacagcuggugccgccgcuuacuaugugggcuaccugcagccuagaaccuuccugcugaaguacaacgagaacggcaccaucaccgacgccguggauugugcucuggauccucugagcgagacaaagugcacccugaaguccuucaccguggaaaagggcaucuaccagaccagcaacuuccgggugcagcccaccgaauccaucgugcgguuccccaauaucaccaaucugugccccuucggcgagguguucaaugccaccagauucgccucuguguacgccuggaaccggaagcggaucagcaauugcguggccgacuacuccgugcuguacaacuccgccagcuucagcaccuucaagugcuacggcguguccccuaccaagcugaacgaccugugcuucacaaacguguacgccgacagcuucgugauccggggagaugaagugcggcagauugccccuggacagacaggcaagaucgccgacuacaacuacaagcugcccgacgacuucaccggcugugugauugccuggaacagcaacaaccuggacuccaaagucggcggcaacuacaauuaccuguaccggcuguuccggaaguccaaucugaagcccuucgagcgggacaucagcaccgaaaucuaucaggccggcagcaccccuugcaacggcguggaaggcuucaacugcuacuucccacugcaguccuacggcuuucagcccacaaauggcgugggcuaucagcccuacagagugguggugcugagcuucgaacugcugcaugcuccugccacagugugcggcccuaagaaaagcaccaaucucgugaagaacaaaugcgugaacuucaacuucaacggccugaccggcaccggcgugcugacagagagcaacaagaaguuccugccauuccagcaguuuggccgggauaucgccgauaccacagacgccguuagagauccccagacacuggaaauccuggacaucaccccaugcagcuucggcggagugucugugaucaccccuggcaccaacaccagcaaucagguggcagugcuguaccaggacgugaacuguaccgaagugcccguggccauucacgccgaucagcugacaccuacauggcggguguacuccaccggcagcaauguguuucagaccagagccggcugucugaucggagccgagcacgugaacaauagcuacgagugcgacauccccaucggcgcuggcaucugugccagcuaccagacacagacaaacagccccagacgggcuagaagcguggccagccagagcaucauugccuacacaaugucucugggcgccgagaacagcguggccuacuccaacaacucuaucgcuauccccaccaacuucaccaucagcgugaccaccgagauccugccuguguccaugaccaagaccagcguggacugcaccauguacaucugcggcgauuccaccgagugcuccaaccugcugcugcaguacggcagcuucugcacccagcugaauagagcccugacagggaucgccguggaacaggacaagaacacccaagagguguucgcccaagugaagcaaaucuacaagaccccuccuaucaaggacuucggcggcuucaauuucagccagauucugcccgauccuagcaagcccagcaagcggagcuucaucgaggaccugcuguucaacaaagugacacuggccgacgccggcuucaucaagcaguauggcgauugucugggcgacauugccgccagggaucugauuugcgcccagaaguuuaacggacugacagugcugccuccucugcugaccgaugagaugaucgcccaguacacaucugcccugcuggccggcacaaucacaagcggcuggacauuuggagcuggcgccgcucugcagauccccuuugcuaugcagauggccuaccgguucaacggcaucggagugacccagaaugugcuguacgagaaccagaagcugaucgccaaccaguucaacagcgccaucggcaagauccaggacagccugagcagcacagcaagcgcccugggaaagcugcaggacguggucaaccagaaugcccaggcacugaacacccuggucaagcagcuguccuccaacuucggcgccaucagcucugugcugaacgauauccugagcagacuggacccuccugaggccgaggugcagaucgacagacugaucacaggcagacugcagagccuccagacauacgugacccagcagcugaucagagccgccgagauuagagccucugccaaucuggccgccaccaagaugucugagugugugcugggccagagcaagagaguggacuuuugcggcaagggcuaccagcugaugagcuucccucagucugccccucacggcgugguguuucugaacgugacauaugugcccgcucaagagaagaauuucaccaccgcuccagccaucugcaacgacggcaaagcccacuuuccuagagaaggcguguucguguccaacggcaccaacugguucgugacacagcggaacuucuacgagccccagaucaucaccaccgacaacaccuucgugucuggcaacugcgacguugugaucggcauugugaacaauaccguguacgacccucugcagcccgagcuggacagcuucaaagaggaacuggacaaguacuuuaagaaccacacaagccccgacguggaccugggcgauaucagcggaaucaaugccagcgucgugaacauccagaaagagaucgaccggcugaacgagguggccaagaaucugaacgagagccugaucgaccugcaagaacuggggaaguacgagcaguacaucaagggcggaggaucuggcggaggacagaucuacgagggcaagcugacagccgagggccugagauuuggaaucguggccagccgguucaaucacgcccugguggauagacugguggaaggcgccaucgaugccauugucagacacggcggcagagaagaggacaucacccucguuagagugcccggcucuugggagauuccuguggcugcuggcgagcuggcccggaaagaagauaucgacgccguuaucgccaucggcgugcugaucagaggcgccacaccucacuucgacuauaucgccagcgagguguccaaaggccuggccgaucugagccuggaacugagaaagcccaucaccuucggcgugaucaccgcugacacacuggaacaggccauugagagagccggcaccaagcacggcaacaaaggaugggaagccgcucuguccgccaucgagauggccaaccuguucaagagccugcgguga

SEQ ID NO: 12089 - RNA, 4116 nt, Artificial Sequence
  SARS-CoV-2/Wuhan/WIV05/2019__EPI_ISL_402128 spike protein CDS gc mod (1-1211)(I712C_T1077C) LumSynth construct
auguucguguuucuggugcugcugccccugguguccagccagugugugaaccugaccaccagaacacagcugccuccagccuacaccaacagcuucaccagaggcguguacuaccccgacaagguguucagauccagcgugcugcacucuacccaggaccuguuccugccuuucuucagcaacgugaccugguuccacgccauccacguguccggcaccaauggcaccaagagauucgacaaccccgugcugcccuucaacgacgggguguacuuugccagcaccgagaaguccaacaucaucagaggcuggaucuucggcaccacacuggacagcaagacccagagccugcugaucgugaacaacgccaccaacguggucaucaaagugugcgaguuccaguucugcaacgaccccuuccugggcgucuacuaccacaagaacaacaagagcuggauggaaagcgaguuccggguguacagcagcgccaacaacugcaccuucgaguacgugucccagccuuuccugauggaccuggaaggcaagcagggcaacuucaagaaccugcgcgaguucguguucaagaacaucgacggcuacuucaaaaucuacagcaagcacaccccuaucaaccucgugcgggaucugccucagggcuucucugcucuggaaccccugguggaucugcccaucggcaucaacaucacccgguuucagacacugcuggcccugcacagaagcuaccugacaccuggcgauagcagcagcggauggacagcuggugccgccgcuuacuaugugggcuaccugcagccuagaaccuuccugcugaaguacaacgagaacggcaccaucaccgacgccguggauugugcucuggauccucugagcgagacaaagugcacccugaaguccuucaccguggaaaagggcaucuaccagaccagcaacuuccgggugcagcccaccgaauccaucgugcgguuccccaauaucaccaaucugugccccuucggcgagguguucaaugccaccagauucgccucuguguacgccuggaaccggaagcggaucagcaauugcguggccgacuacuccgugcuguacaacuccgccagcuucagcaccuucaagugcuacggcguguccccuaccaagcugaacgaccugugcuucacaaacguguacgccgacagcuucgugauccggggagaugaagugcggcagauugccccuggacagacaggcaagaucgccgacuacaacuacaagcugcccgacgacuucaccggcugugugauugccuggaacagcaacaaccuggacuccaaagucggcggcaacuacaauuaccuguaccggcuguuccggaaguccaaucugaagcccuucgagcgggacaucagcaccgaaaucuaucaggccggcagcaccccuugcaacggcguggaaggcuucaacugcuacuucccacugcaguccuacggcuuucagcccacaaauggcgugggcuaucagcccuacagagugguggugcugagcuucgaacugcugcaugcuccugccacagugugcggcccuaagaaaagcaccaaucucgugaagaacaaaugcgugaacuucaacuucaacggccugaccggcaccggcgugcugacagagagcaacaagaaguuccugccauuccagcaguuuggccgggauaucgccgauaccacagacgccguuagagauccccagacacuggaaauccuggacaucaccccaugcagcuucggcggagugucugugaucaccccuggcaccaacaccagcaaucagguggcagugcuguaccaggacgugaacuguaccgaagugcccguggccauucacgccgaucagcugacaccuacauggcggguguacuccaccggcagcaauguguuucagaccagagccggcugucugaucggagccgagcacgugaacaauagcuacgagugcgacauccccaucggcgcuggcaucugugccagcuaccagacacagacaaacagccccagacgggcuagaagcguggccagccagagcaucauugccuacacaaugucucugggcgccgagaacagcguggccuacuccaacaacucuugcgcuauccccaccaacuucaccaucagcgugaccaccgagauccugccuguguccaugaccaagaccagcguggacugcaccauguacaucugcggcgauuccaccgagugcuccaaccugcugcugcaguacggcagcuucugcacccagcugaauagagcccugacagggaucgccguggaacaggacaagaacacccaagagguguucgcccaagugaagcaaaucuacaagaccccuccuaucaaggacuucggcggcuucaauuucagccagauucugcccgauccuagcaagcccagcaagcggagcuucaucgaggaccugcuguucaacaaagugacacuggccgacgccggcuucaucaagcaguauggcgauugucugggcgacauugccgccagggaucugauuugcgcccagaaguuuaacggacugacagugcugccuccucugcugaccgaugagaugaucgcccaguacacaucugcccugcuggccggcacaaucacaagcggcuggacauuuggagcuggcgccgcucugcagauccccuuugcuaugcagauggccuaccgguucaacggcaucggagugacccagaaugugcuguacgagaaccagaagcugaucgccaaccaguucaacagcgccaucggcaagauccaggacagccugagcagcacagcaagcgcccugggaaagcugcaggacguggucaaccagaaugcccaggcacugaacacccuggucaagcagcuguccuccaacuucggcgccaucagcucugugcugaacgauauccugagcagacuggacaaggucgaggccgaggugcagaucgacagacugaucacaggcagacugcagagccuccagacauacgugacccagcagcugaucagagccgccgagauuagagccucugccaaucuggccgccaccaagaugucugagugugugcugggccagagcaagagaguggacuuuugcggcaagggcuaccaccugaugagcuucccucagucugccccucacggcgugguguuucugcacgugacauaugugcccgcucaagagaagaauuucaccugugcuccagccaucugccacgacggcaaagcccacuuuccuagagaaggcguguucguguccaacggcacccauugguucgugacacagcggaacuucuacgagccccagaucaucaccaccgacaacaccuucgugucuggcaacugcgacguugugaucggcauugugaacaauaccguguacgacccucugcagcccgagcuggacagcuucaaagaggaacuggacaaguacuuuaagaaccacacaagccccgacguggaccugggcgauaucagcggaaucaaugccagcgucgugaacauccagaaagagaucgaccggcugaacgagguggccaagaaucugaacgagagccugaucgaccugcaagaacuggggaaguacgagcaguacaucaagggcggaggaucuggcggaggacagaucuacgagggcaagcugacagccgagggccugagauuuggaaucguggccagccgguucaaucacgcccugguggauagacugguggaaggcgccaucgaugccauugucagacacggcggcagagaagaggacaucacccucguuagagugcccggcucuugggagauuccuguggcugcuggcgagcuggcccggaaagaagauaucgacgccguuaucgccaucggcgugcugaucagaggcgccacaccucacuucgacuauaucgccagcgagguguccaaaggccuggccgaucugagccuggaacugagaaagcccaucaccuucggcgugaucaccgcugacacacuggaacaggccauugagagagccggcaccaagcacggcaacaaaggaugggaagccgcucuguccgccaucgagauggccaaccuguucaagagccugcgguga

SEQ ID NO: 12090 - RNA, 4116 nt, Artificial Sequence
  SARS-CoV-2/Wuhan/WIV05/2019__EPI_ISL_402128 spike protein CDS gc mod (1-1211)(I714C_Y1110C) LumSynth construct
auguucguguuucuggugcugcugccccugguguccagccagugugugaaccugaccaccagaacacagcugccuccagccuacaccaacagcuucaccagaggcguguacuaccccgacaagguguucagauccagcgugcugcacucuacccaggaccuguuccugccuuucuucagcaacgugaccugguuccacgccauccacguguccggcaccaauggcaccaagagauucgacaaccccgugcugcccuucaacgacgggguguacuuugccagcaccgagaaguccaacaucaucagaggcuggaucuucggcaccacacuggacagcaagacccagagccugcugaucgugaacaacgccaccaacguggucaucaaagugugcgaguuccaguucugcaacgaccccuuccugggcgucuacuaccacaagaacaacaagagcuggauggaaagcgaguuccggguguacagcagcgccaacaacugcaccuucgaguacgugucccagccuuuccugauggaccuggaaggcaagcagggcaacuucaagaaccugcgcgaguucguguucaagaacaucgacggcuacuucaaaaucuacagcaagcacaccccuaucaaccucgugcgggaucugccucagggcuucucugcucuggaaccccugguggaucugcccaucggcaucaacaucacccgguuucagacacugcuggcccugcacagaagcuaccugacaccuggcgauagcagcagcggauggacagcuggugccgccgcuuacuaugugggcuaccugcagccuagaaccuuccugcugaaguacaacgagaacggcaccaucaccgacgccguggauugugcucuggauccucugagcgagacaaagugcacccugaaguccuucaccguggaaaagggcaucuaccagaccagcaacuuccgggugcagcccaccgaauccaucgugcgguuccccaauaucaccaaucugugccccuucggcgagguguucaaugccaccagauucgccucuguguacgccuggaaccggaagcggaucagcaauugcguggccgacuacuccgugcuguacaacuccgccagcuucagcaccuucaagugcuacggcguguccccuaccaagcugaacgaccugugcuucacaaacguguacgccgacagcuucgugauccggggagaugaagugcggcagauugccccuggacagacaggcaagaucgccgacuacaacuacaagcugcccgacgacuucaccggcugugugauugccuggaacagcaacaaccuggacuccaaagucggcggcaacuacaauuaccuguaccggcuguuccggaaguccaaucugaagcccuucgagcgggacaucagcaccgaaaucuaucaggccggcagcaccccuugcaacggcguggaaggcuucaacugcuacuucccacugcaguccuacggcuuucagcccacaaauggcgugggcuaucagcccuacagagugguggugcugagcuucgaacugcugcaugcuccugccacagugugcggcccuaagaaaagcaccaaucucgugaagaacaaaugcgugaacuucaacuucaacggccugaccggcaccggcgugcugacagagagcaacaagaaguuccugccauuccagcaguuuggccgggauaucgccgauaccacagacgccguuagagauccccagacacuggaaauccuggacaucaccccaugcagcuucggcggagugucugugaucaccccuggcaccaacaccagcaaucagguggcagugcuguaccaggacgugaacuguaccgaagugcccguggccauucacgccgaucagcugacaccuacauggcggguguacuccaccggcagcaauguguuucagaccagagccggcugucugaucggagccgagcacgugaacaauagcuacgagugcgacauccccaucggcgcuggcaucugugccagcuaccagacacagacaaacagccccagacgggcuagaagcguggccagccagagcaucauugccuacacaaugucucugggcgccgagaacagcguggccuacuccaacaacucuaucgcuugccccaccaacuucaccaucagcgugaccaccgagauccugccuguguccaugaccaagaccagcguggacugcaccauguacaucugcggcgauuccaccgagugcuccaaccugcugcugcaguacggcagcuucugcacccagcugaauagagcccugacagggaucgccguggaacaggacaagaacacccaagagguguucgcccaagugaagcaaaucuacaagaccccuccuaucaaggacuucggcggcuucaauuucagccagauucugcccgauccuagcaagcccagcaagcggagcuucaucgaggaccugcuguucaacaaagugacacuggccgacgccggcuucaucaagcaguauggcgauugucugggcgacauugccgccagggaucugauuugcgcccagaaguuuaacggacugacagugcugccuccucugcugaccgaugagaugaucgcccaguacacaucugcccugcuggccggcacaaucacaagcggcuggacauuuggagcuggcgccgcucugcagauccccuuugcuaugcagauggccuaccgguucaacggcaucggagugacccagaaugugcuguacgagaaccagaagcugaucgccaaccaguucaacagcgccaucggcaagauccaggacagccugagcagcacagcaagcgcccugggaaagcugcaggacguggucaaccagaaugcccaggcacugaacacccuggucaagcagcuguccuccaacuucggcgccaucagcucugugcugaacgauauccugagcagacuggacaaggucgaggccgaggugcagaucgacagacugaucacaggcagacugcagagccuccagacauacgugacccagcagcugaucagagccgccgagauuagagccucugccaaucuggccgccaccaagaugucugagugugugcugggccagagcaagagaguggacuuuugcggcaagggcuaccaccugaugagcuucccucagucugccccucacggcgugguguuucugcacgugacauaugugcccgcucaagagaagaauuucaccaccgcuccagccaucugccacgacggcaaagcccacuuuccuagagaaggcguguucguguccaacggcacccauugguucgugacacagcggaacuucugugagccccagaucaucaccaccgacaacaccuucgugucuggcaacugcgacguugugaucggcauugugaacaauaccguguacgacccucugcagcccgagcuggacagcuucaaagaggaacuggacaaguacuuuaagaaccacacaagccccgacguggaccugggcgauaucagcggaaucaaugccagcgucgugaacauccagaaagagaucgaccggcugaacgagguggccaagaaucugaacgagagccugaucgaccugcaagaacuggggaaguacgagcaguacaucaagggcggaggaucuggcggaggacagaucuacgagggcaagcugacagccgagggccugagauuuggaaucguggccagccgguucaaucacgcccugguggauagacugguggaaggcgccaucgaugccauugucagacacggcggcagagaagaggacaucacccucguuagagugcccggcucuugggagauuccuguggcugcuggcgagcuggcccggaaagaagauaucgacgccguuaucgccaucggcgugcugaucagaggcgccacaccucacuucgacuauaucgccagcgagguguccaaaggccuggccgaucugagccuggaacugagaaagcccaucaccuucggcgugaucaccgcugacacacuggaacaggccauugagagagccggcaccaagcacggcaacaaaggaugggaagccgcucuguccgccaucgagauggccaaccuguucaagagccugcgguga

SEQ ID NO: 12091 - RNA, 4116 nt, Artificial Sequence
  SARS-CoV-2/Wuhan/WIV05/2019__EPI_ISL_402128 spike protein CDS gc mod (1-1211)(P715C_P1069C) LumSynth construct
auguucguguuucuggugcugcugccccugguguccagccagugugugaaccugaccaccagaacacagcugccuccagccuacaccaacagcuucaccagaggcguguacuaccccgacaagguguucagauccagcgugcugcacucuacccaggaccuguuccugccuuucuucagcaacgugaccugguuccacgccauccacguguccggcaccaauggcaccaagagauucgacaaccccgugcugcccuucaacgacgggguguacuuugccagcaccgagaaguccaacaucaucagaggcuggaucuucggcaccacacuggacagcaagacccagagccugcugaucgugaacaacgccaccaacguggucaucaaagugugcgaguuccaguucugcaacgaccccuuccugggcgucuacuaccacaagaacaacaagagcuggauggaaagcgaguuccggguguacagcagcgccaacaacugcaccuucgaguacgugucccagccuuuccugauggaccuggaaggcaagcagggcaacuucaagaaccugcgcgaguucguguucaagaacaucgacggcuacuucaaaaucuacagcaagcacaccccuaucaaccucgugcgggaucugccucagggcuucucugcucuggaaccccugguggaucugcccaucggcaucaacaucacccgguuucagacacugcuggcccugcacagaagcuaccugacaccuggcgauagcagcagcggauggacagcuggugccgccgcuuacuaugugggcuaccugcagccuagaaccuuccugcugaaguacaacgagaacggcaccaucaccgacgccguggauugugcucuggauccucugagcgagacaaagugcacccugaaguccuucaccguggaaaagggcaucuaccagaccagcaacuuccgggugcagcccaccgaauccaucgugcgguuccccaauaucaccaaucugugccccuucggcgagguguucaaugccaccagauucgccucuguguacgccuggaaccggaagcggaucagcaauugcguggccgacuacuccgugcuguacaacuccgccagcuucagcaccuucaagugcuacggcguguccccuaccaagcugaacgaccugugcuucacaaacguguacgccgacagcuucgugauccggggagaugaagugcggcagauugccccuggacagacaggcaagaucgccgacuacaacuacaagcugcccgacgacuucaccggcugugugauugccuggaacagcaacaaccuggacuccaaagucggcggcaacuacaauuaccuguaccggcuguuccggaaguccaaucugaagcccuucgagcgggacaucagcaccgaaaucuaucaggccggcagcaccccuugcaacggcguggaaggcuucaacugcuacuucccacugcaguccuacggcuuucagcccacaaauggcgugggcuaucagcccuacagagugguggugcugagcuucgaacugcugcaugcuccugccacagugugcggcccuaagaaaagcaccaaucucgugaagaacaaaugcgugaacuucaacuucaacggccugaccggcaccggcgugcugacagagagcaacaagaaguuccugccauuccagcaguuuggccgggauaucgccgauaccacagacgccguuagagauccccagacacuggaaauccuggacaucaccccaugcagcuucggcggagugucugugaucaccccuggcaccaacaccagcaaucagguggcagugcuguaccaggacgugaacuguaccgaagugcccguggccauucacgccgaucagcugacaccuacauggcggguguacuccaccggcagcaauguguuucagaccagagccggcugucugaucggagccgagcacgugaacaauagcuacgagugcgacauccccaucggcgcuggcaucugugccagcuaccagacacagacaaacagccccagacgggcuagaagcguggccagccagagcaucauugccuacacaaugucucugggcgccgagaacagcguggccuacuccaacaacucuaucgcuaucugcaccaacuucaccaucagcgugaccaccgagauccugccuguguccaugaccaagaccagcguggacugcaccauguacaucugcggcgauuccaccgagugcuccaaccugcugcugcaguacggcagcuucugcacccagcugaauagagcccugacagggaucgccguggaacaggacaagaacacccaagagguguucgcccaagugaagcaaaucuacaagaccccuccuaucaaggacuucggcggcuucaauuucagccagauucugcccgauccuagcaagcccagcaagcggagcuucaucgaggaccugcuguucaacaaagugacacuggccgacgccggcuucaucaagcaguauggcgauugucugggcgacauugccgccagggaucugauuugcgcccagaaguuuaacggacugacagugcugccuccucugcugaccgaugagaugaucgcccaguacacaucugcccugcuggccggcacaaucacaagcggcuggacauuuggagcuggcgccgcucugcagauccccuuugcuaugcagauggccuaccgguucaacggcaucggagugacccagaaugugcuguacgagaaccagaagcugaucgccaaccaguucaacagcgccaucggcaagauccaggacagccugagcagcacagcaagcgcccugggaaagcugcaggacguggucaaccagaaugcccaggcacugaacacccuggucaagcagcuguccuccaacuucggcgccaucagcucugugcugaacgauauccugagcagacuggacaaggucgaggccgaggugcagaucgacagacugaucacaggcagacugcagagccuccagacauacgugacccagcagcugaucagagccgccgagauuagagccucugccaaucuggccgccaccaagaugucugagugugugcugggccagagcaagagaguggacuuuugcggcaagggcuaccaccugaugagcuucccucagucugccccucacggcgugguguuucugcacgugacauaugugugugcucaagagaagaauuucaccaccgcuccagccaucugccacgacggcaaagcccacuuuccuagagaaggcguguucguguccaacggcacccauugguucgugacacagcggaacuucuacgagccccagaucaucaccaccgacaacaccuucgugucuggcaacugcgacguugugaucggcauugugaacaauaccguguacgacccucugcagcccgagcuggacagcuucaaagaggaacuggacaaguacuuuaagaaccacacaagccccgacguggaccugggcgauaucagcggaaucaaugccagcgucgugaacauccagaaagagaucgaccggcugaacgagguggccaagaaucugaacgagagccugaucgaccugcaagaacuggggaaguacgagcaguacaucaagggcggaggaucuggcggaggacagaucuacgagggcaagcugacagccgagggccugagauuuggaaucguggccagccgguucaaucacgcccugguggauagacugguggaaggcgccaucgaugccauugucagacacggcggcagagaagaggacaucacccucguuagagugcccggcucuugggagauuccuguggcugcuggcgagcuggcccggaaagaagauaucgacgccguuaucgccaucggcgugcugaucagaggcgccacaccucacuucgacuauaucgccagcgagguguccaaaggccuggccgaucugagccuggaacugagaaagcccaucaccuucggcgugaucaccgcugacacacuggaacaggccauugagagagccggcaccaagcacggcaacaaaggaugggaagccgcucuguccgccaucgagauggccaaccuguucaagagccugcgguga

SEQ ID NO: 12092 - RNA, 4116 nt, Artificial Sequence
  SARS-CoV-2/Wuhan/WIV05/2019__EPI_ISL_402128 spike protein CDS gc mod (1-1211)(G889C_L1034C) LumSynth construct
auguucguguuucuggugcugcugccccugguguccagccagugugugaaccugaccaccagaacacagcugccuccagccuacaccaacagcuucaccagaggcguguacuaccccgacaagguguucagauccagcgugcugcacucuacccaggaccuguuccugccuuucuucagcaacgugaccugguuccacgccauccacguguccggcaccaauggcaccaagagauucgacaaccccgugcugcccuucaacgacgggguguacuuugccagcaccgagaaguccaacaucaucagaggcuggaucuucggcaccacacuggacagcaagacccagagccugcugaucgugaacaacgccaccaacguggucaucaaagugugcgaguuccaguucugcaacgaccccuuccugggcgucuacuaccacaagaacaacaagagcuggauggaaagcgaguuccggguguacagcagcgccaacaacugcaccuucgaguacgugucccagccuuuccugauggaccuggaaggcaagcagggcaacuucaagaaccugcgcgaguucguguucaagaacaucgacggcuacuucaaaaucuacagcaagcacaccccuaucaaccucgugcgggaucugccucagggcuucucugcucuggaaccccugguggaucugcccaucggcaucaacaucacccgguuucagacacugcuggcccugcacagaagcuaccugacaccuggcgauagcagcagcggauggacagcuggugccgccgcuuacuaugugggcuaccugcagccuagaaccuuccugcugaaguacaacgagaacggcaccaucaccgacgccguggauugugcucuggauccucugagcgagacaaagugcacccugaaguccuucaccguggaaaagggcaucuaccagaccagcaacuuccgggugcagcccaccgaauccaucgugcgguuccccaauaucaccaaucugugccccuucggcgagguguucaaugccaccagauucgccucuguguacgccuggaaccggaagcggaucagcaauugcguggccgacuacuccgugcuguacaacuccgccagcuucagcaccuucaagugcuacggcguguccccuaccaagcugaacgaccugugcuucacaaacguguacgccgacagcuucgugauccggggagaugaagugcggcagauugccccuggacagacaggcaagaucgccgacuacaacuacaagcugcccgacgacuucaccggcugugugauugccuggaacagcaacaaccuggacuccaaagucggcggcaacuacaauuaccuguaccggcuguuccggaaguccaaucugaagcccuucgagcgggacaucagcaccgaaaucuaucaggccggcagcaccccuugcaacggcguggaaggcuucaacugcuacuucccacugcaguccuacggcuuucagcccacaaauggcgugggcuaucagcccuacagagugguggugcugagcuucgaacugcugcaugcuccugccacagugugcggcccuaagaaaagcaccaaucucgugaagaacaaaugcgugaacuucaacuucaacggccugaccggcaccggcgugcugacagagagcaacaagaaguuccugccauuccagcaguuuggccgggauaucgccgauaccacagacgccguuagagauccccagacacuggaaauccuggacaucaccccaugcagcuucggcggagugucugugaucaccccuggcaccaacaccagcaaucagguggcagugcuguaccaggacgugaacuguaccgaagugcccguggccauucacgccgaucagcugacaccuacauggcggguguacuccaccggcagcaauguguuucagaccagagccggcugucugaucggagccgagcacgugaacaauagcuacgagugcgacauccccaucggcgcuggcaucugugccagcuaccagacacagacaaacagccccagacgggcuagaagcguggccagccagagcaucauugccuacacaaugucucugggcgccgagaacagcguggccuacuccaacaacucuaucgcuauccccaccaacuucaccaucagcgugaccaccgagauccugccuguguccaugaccaagaccagcguggacugcaccauguacaucugcggcgauuccaccgagugcuccaaccugcugcugcaguacggcagcuucugcacccagcugaauagagcccugacagggaucgccguggaacaggacaagaacacccaagagguguucgcccaagugaagcaaaucuacaagaccccuccuaucaaggacuucggcggcuucaauuucagccagauucugcccgauccuagcaagcccagcaagcggagcuucaucgaggaccugcuguucaacaaagugacacuggccgacgccggcuucaucaagcaguauggcgauugucugggcgacauugccgccagggaucugauuugcgcccagaaguuuaacggacugacagugcugccuccucugcugaccgaugagaugaucgcccaguacacaucugcccugcuggccggcacaaucacaagcggcuggacauuuugcgcuggcgccgcucugcagauccccuuugcuaugcagauggccuaccgguucaacggcaucggagugacccagaaugugcuguacgagaaccagaagcugaucgccaaccaguucaacagcgccaucggcaagauccaggacagccugagcagcacagcaagcgcccugggaaagcugcaggacguggucaaccagaaugcccaggcacugaacacccuggucaagcagcuguccuccaacuucggcgccaucagcucugugcugaacgauauccugagcagacuggacaaggucgaggccgaggugcagaucgacagacugaucacaggcagacugcagagccuccagacauacgugacccagcagcugaucagagccgccgagauuagagccucugccaaucuggccgccaccaagaugucugaguguguguguggccagagcaagagaguggacuuuugcggcaagggcuaccaccugaugagcuucccucagucugccccucacggcgugguguuucugcacgugacauaugugcccgcucaagagaagaauuucaccaccgcuccagccaucugccacgacggcaaagcccacuuuccuagagaaggcguguucguguccaacggcacccauugguucgugacacagcggaacuucuacgagccccagaucaucaccaccgacaacaccuucgugucuggcaacugcgacguugugaucggcauugugaacaauaccguguacgacccucugcagcccgagcuggacagcuucaaagaggaacuggacaaguacuuuaagaaccacacaagccccgacguggaccugggcgauaucagcggaaucaaugccagcgucgugaacauccagaaagagaucgaccggcugaacgagguggccaagaaucugaacgagagccugaucgaccugcaagaacuggggaaguacgagcaguacaucaagggcggaggaucuggcggaggacagaucuacgagggcaagcugacagccgagggccugagauuuggaaucguggccagccgguucaaucacgcccugguggauagacugguggaaggcgccaucgaugccauugucagacacggcggcagagaagaggacaucacccucguuagagugcccggcucuugggagauuccuguggcugcuggcgagcuggcccggaaagaagauaucgacgccguuaucgccaucggcgugcugaucagaggcgccacaccucacuucgacuauaucgccagcgagguguccaaaggccuggccgaucugagccuggaacugagaaagcccaucaccuucggcgugaucaccgcugacacacuggaacaggccauugagagagccggcaccaagcacggcaacaaaggaugggaagccgcucuguccgccaucgagauggccaaccuguucaagagccugcgguga

SEQ ID NO: 12093 - RNA, 4116 nt, Artificial Sequence
  SARS-CoV-2/Wuhan/WIV05/2019__EPI_ISL_402128 spike protein CDS gc mod (1-1211)(I909C_Y1047C) LumSynth construct
auguucguguuucuggugcugcugccccugguguccagccagugugugaaccugaccaccagaacacagcugccuccagccuacaccaacagcuucaccagaggcguguacuaccccgacaagguguucagauccagcgugcugcacucuacccaggaccuguuccugccuuucuucagcaacgugaccugguuccacgccauccacguguccggcaccaauggcaccaagagauucgacaaccccgugcugcccuucaacgacgggguguacuuugccagcaccgagaaguccaacaucaucagaggcuggaucuucggcaccacacuggacagcaagacccagagccugcugaucgugaacaacgccaccaacguggucaucaaagugugcgaguuccaguucugcaacgaccccuuccugggcgucuacuaccacaagaacaacaagagcuggauggaaagcgaguuccggguguacagcagcgccaacaacugcaccuucgaguacgugucccagccuuuccugauggaccuggaaggcaagcagggcaacuucaagaaccugcgcgaguucguguucaagaacaucgacggcuacuucaaaaucuacagcaagcacaccccuaucaaccucgugcgggaucugccucagggcuucucugcucuggaaccccugguggaucugcccaucggcaucaacaucacccgguuucagacacugcuggcccugcacagaagcuaccugacaccuggcgauagcagcagcggauggacagcuggugccgccgcuuacuaugugggcuaccugcagccuagaaccuuccugcugaaguacaacgagaacggcaccaucaccgacgccguggauugugcucuggauccucugagcgagacaaagugcacccugaaguccuucaccguggaaaagggcaucuaccagaccagcaacuuccgggugcagcccaccgaauccaucgugcgguuccccaauaucaccaaucugugccccuucggcgagguguucaaugccaccagauucgccucuguguacgccuggaaccggaagcggaucagcaauugcguggccgacuacuccgugcuguacaacuccgccagcuucagcaccuucaagugcuacggcguguccccuaccaagcugaacgaccugugcuucacaaacguguacgccgacagcuucgugauccggggagaugaagugcggcagauugccccuggacagacaggcaagaucgccgacuacaacuacaagcugcccgacgacuucaccggcugugugauugccuggaacagcaacaaccuggacuccaaagucggcggcaacuacaauuaccuguaccggcuguuccggaaguccaaucugaagcccuucgagcgggacaucagcaccgaaaucuaucaggccggcagcaccccuugcaacggcguggaaggcuucaacugcuacuucccacugcaguccuacggcuuucagcccacaaauggcgugggcuaucagcccuacagagugguggugcugagcuucgaacugcugcaugcuccugccacagugugcggcccuaagaaaagcaccaaucucgugaagaacaaaugcgugaacuucaacuucaacggccugaccggcaccggcgugcugacagagagcaacaagaaguuccugccauuccagcaguuuggccgggauaucgccgauaccacagacgccguuagagauccccagacacuggaaauccuggacaucaccccaugcagcuucggcggagugucugugaucaccccuggcaccaacaccagcaaucagguggcagugcuguaccaggacgugaacuguaccgaagugcccguggccauucacgccgaucagcugacaccuacauggcggguguacuccaccggcagcaauguguuucagaccagagccggcugucugaucggagccgagcacgugaacaauagcuacgagugcgacauccccaucggcgcuggcaucugugccagcuaccagacacagacaaacagccccagacgggcuagaagcguggccagccagagcaucauugccuacacaaugucucugggcgccgagaacagcguggccuacuccaacaacucuaucgcuauccccaccaacuucaccaucagcgugaccaccgagauccugccuguguccaugaccaagaccagcguggacugcaccauguacaucugcggcgauuccaccgagugcuccaaccugcugcugcaguacggcagcuucugcacccagcugaauagagcccugacagggaucgccguggaacaggacaagaacacccaagagguguucgcccaagugaagcaaaucuacaagaccccuccuaucaaggacuucggcggcuucaauuucagccagauucugcccgauccuagcaagcccagcaagcggagcuucaucgaggaccugcuguucaacaaagugacacuggccgacgccggcuucaucaagcaguauggcgauugucugggcgacauugccgccagggaucugauuugcgcccagaaguuuaacggacugacagugcugccuccucugcugaccgaugagaugaucgcccaguacacaucugcccugcuggccggcacaaucacaagcggcuggacauuuggagcuggcgccgcucugcagauccccuuugcuaugcagauggccuaccgguucaacggcugcggagugacccagaaugugcuguacgagaaccagaagcugaucgccaaccaguucaacagcgccaucggcaagauccaggacagccugagcagcacagcaagcgcccugggaaagcugcaggacguggucaaccagaaugcccaggcacugaacacccuggucaagcagcuguccuccaacuucggcgccaucagcucugugcugaacgauauccugagcagacuggacaaggucgaggccgaggugcagaucgacagacugaucacaggcagacugcagagccuccagacauacgugacccagcagcugaucagagccgccgagauuagagccucugccaaucuggccgccaccaagaugucugagugugugcugggccagagcaagagaguggacuuuugcggcaagggcugucaccugaugagcuucccucagucugccccucacggcgugguguuucugcacgugacauaugugcccgcucaagagaagaauuucaccaccgcuccagccaucugccacgacggcaaagcccacuuuccuagagaaggcguguucguguccaacggcacccauugguucgugacacagcggaacuucuacgagccccagaucaucaccaccgacaacaccuucgugucuggcaacugcgacguugugaucggcauugugaacaauaccguguacgacccucugcagcccgagcuggacagcuucaaagaggaacuggacaaguacuuuaagaaccacacaagccccgacguggaccugggcgauaucagcggaaucaaugccagcgucgugaacauccagaaagagaucgaccggcugaacgagguggccaagaaucugaacgagagccugaucgaccugcaagaacuggggaaguacgagcaguacaucaagggcggaggaucuggcggaggacagaucuacgagggcaagcugacagccgagggccugagauuuggaaucguggccagccgguucaaucacgcccugguggauagacugguggaaggcgccaucgaugccauugucagacacggcggcagagaagaggacaucacccucguuagagugcccggcucuugggagauuccuguggcugcuggcgagcuggcccggaaagaagauaucgacgccguuaucgccaucggcgugcugaucagaggcgccacaccucacuucgacuauaucgccagcgagguguccaaaggccuggccgaucugagccuggaacugagaaagcccaucaccuucggcgugaucaccgcugacacacuggaacaggccauugagagagccggcaccaagcacggcaacaaaggaugggaagccgcucuguccgccaucgagauggccaaccuguucaagagccugcgguga

SEQ ID NO: 12094 - RNA, 4116 nt, Artificial Sequence
  SARS-CoV-2/Wuhan/WIV05/2019__EPI_ISL_402128 spike protein CDS gc mod (1-1211)(Q965C_S1003C) LumSynth construct
auguucguguuucuggugcugcugccccugguguccagccagugugugaaccugaccaccagaacacagcugccuccagccuacaccaacagcuucaccagaggcguguacuaccccgacaagguguucagauccagcgugcugcacucuacccaggaccuguuccugccuuucuucagcaacgugaccugguuccacgccauccacguguccggcaccaauggcaccaagagauucgacaaccccgugcugcccuucaacgacgggguguacuuugccagcaccgagaaguccaacaucaucagaggcuggaucuucggcaccacacuggacagcaagacccagagccugcugaucgugaacaacgccaccaacguggucaucaaagugugcgaguuccaguucugcaacgaccccuuccugggcgucuacuaccacaagaacaacaagagcuggauggaaagcgaguuccggguguacagcagcgccaacaacugcaccuucgaguacgugucccagccuuuccugauggaccuggaaggcaagcagggcaacuucaagaaccugcgcgaguucguguucaagaacaucgacggcuacuucaaaaucuacagcaagcacaccccuaucaaccucgugcgggaucugccucagggcuucucugcucuggaaccccugguggaucugcccaucggcaucaacaucacccgguuucagacacugcuggcccugcacagaagcuaccugacaccuggcgauagcagcagcggauggacagcuggugccgccgcuuacuaugugggcuaccugcagccuagaaccuuccugcugaaguacaacgagaacggcaccaucaccgacgccguggauugugcucuggauccucugagcgagacaaagugcacccugaaguccuucaccguggaaaagggcaucuaccagaccagcaacuuccgggugcagcccaccgaauccaucgugcgguuccccaauaucaccaaucugugccccuucggcgagguguucaaugccaccagauucgccucuguguacgccuggaaccggaagcggaucagcaauugcguggccgacuacuccgugcuguacaacuccgccagcuucagcaccuucaagugcuacggcguguccccuaccaagcugaacgaccugugcuucacaaacguguacgccgacagcuucgugauccggggagaugaagugcggcagauugccccuggacagacaggcaagaucgccgacuacaacuacaagcugcccgacgacuucaccggcugugugauugccuggaacagcaacaaccuggacuccaaagucggcggcaacuacaauuaccuguaccggcuguuccggaaguccaaucugaagcccuucgagcgggacaucagcaccgaaaucuaucaggccggcagcaccccuugcaacggcguggaaggcuucaacugcuacuucccacugcaguccuacggcuuucagcccacaaauggcgugggcuaucagcccuacagagugguggugcugagcuucgaacugcugcaugcuccugccacagugugcggcccuaagaaaagcaccaaucucgugaagaacaaaugcgugaacuucaacuucaacggccugaccggcaccggcgugcugacagagagcaacaagaaguuccugccauuccagcaguuuggccgggauaucgccgauaccacagacgccguuagagauccccagacacuggaaauccuggacaucaccccaugcagcuucggcggagugucugugaucaccccuggcaccaacaccagcaaucagguggcagugcuguaccaggacgugaacuguaccgaagugcccguggccauucacgccgaucagcugacaccuacauggcggguguacuccaccggcagcaauguguuucagaccagagccggcugucugaucggagccgagcacgugaacaauagcuacgagugcgacauccccaucggcgcuggcaucugugccagcuaccagacacagacaaacagccccagacgggcuagaagcguggccagccagagcaucauugccuacacaaugucucugggcgccgagaacagcguggccuacuccaacaacucuaucgcuauccccaccaacuucaccaucagcgugaccaccgagauccugccuguguccaugaccaagaccagcguggacugcaccauguacaucugcggcgauuccaccgagugcuccaaccugcugcugcaguacggcagcuucugcacccagcugaauagagcccugacagggaucgccguggaacaggacaagaacacccaagagguguucgcccaagugaagcaaaucuacaagaccccuccuaucaaggacuucggcggcuucaauuucagccagauucugcccgauccuagcaagcccagcaagcggagcuucaucgaggaccugcuguucaacaaagugacacuggccgacgccggcuucaucaagcaguauggcgauugucugggcgacauugccgccagggaucugauuugcgcccagaaguuuaacggacugacagugcugccuccucugcugaccgaugagaugaucgcccaguacacaucugcccugcuggccggcacaaucacaagcggcuggacauuuggagcuggcgccgcucugcagauccccuuugcuaugcagauggccuaccgguucaacggcaucggagugacccagaaugugcuguacgagaaccagaagcugaucgccaaccaguucaacagcgccaucggcaagauccaggacagccugagcagcacagcaagcgcccugggaaagcugcaggacguggucaaccagaaugcccaggcacugaacacccuggucaagugccuguccuccaacuucggcgccaucagcucugugcugaacgauauccugagcagacuggacaaggucgaggccgaggugcagaucgacagacugaucacaggcagacugcagugucuccagacauacgugacccagcagcugaucagagccgccgagauuagagccucugccaaucuggccgccaccaagaugucugagugugugcugggccagagcaagagaguggacuuuugcggcaagggcuaccaccugaugagcuucccucagucugccccucacggcgugguguuucugcacgugacauaugugcccgcucaagagaagaauuucaccaccgcuccagccaucugccacgacggcaaagcccacuuuccuagagaaggcguguucguguccaacggcacccauugguucgugacacagcggaacuucuacgagccccagaucaucaccaccgacaacaccuucgugucuggcaacugcgacguugugaucggcauugugaacaauaccguguacgacccucugcagcccgagcuggacagcuucaaagaggaacuggacaaguacuuuaagaaccacacaagccccgacguggaccugggcgauaucagcggaaucaaugccagcgucgugaacauccagaaagagaucgaccggcugaacgagguggccaagaaucugaacgagagccugaucgaccugcaagaacuggggaaguacgagcaguacaucaagggcggaggaucuggcggaggacagaucuacgagggcaagcugacagccgagggccugagauuuggaaucguggccagccgguucaaucacgcccugguggauagacugguggaaggcgccaucgaugccauugucagacacggcggcagagaagaggacaucacccucguuagagugcccggcucuugggagauuccuguggcugcuggcgagcuggcccggaaagaagauaucgacgccguuaucgccaucggcgugcugaucagaggcgccacaccucacuucgacuauaucgccagcgagguguccaaaggccuggccgaucugagccuggaacugagaaagcccaucaccuucggcgugaucaccgcugacacacuggaacaggccauugagagagccggcaccaagcacggcaacaaaggaugggaagccgcucuguccgccaucgagauggccaaccuguucaagagccugcgguga

SEQ ID NO: 12095 - RNA, 4116 nt, Artificial Sequence
  SARS-CoV-2/Wuhan/WIV05/2019__EPI_ISL_402128 spike protein CDS gc mod (1-1211)(F970C_G999C) LumSynth construct
auguucguguuucuggugcugcugccccugguguccagccagugugugaaccugaccaccagaacacagcugccuccagccuacaccaacagcuucaccagaggcguguacuaccccgacaagguguucagauccagcgugcugcacucuacccaggaccuguuccugccuuucuucagcaacgugaccugguuccacgccauccacguguccggcaccaauggcaccaagagauucgacaaccccgugcugcccuucaacgacgggguguacuuugccagcaccgagaaguccaacaucaucagaggcuggaucuucggcaccacacuggacagcaagacccagagccugcugaucgugaacaacgccaccaacguggucaucaaagugugcgaguuccaguucugcaacgaccccuuccugggcgucuacuaccacaagaacaacaagagcuggauggaaagcgaguuccggguguacagcagcgccaacaacugcaccuucgaguacgugucccagccuuuccugauggaccuggaaggcaagcagggcaacuucaagaaccugcgcgaguucguguucaagaacaucgacggcuacuucaaaaucuacagcaagcacaccccuaucaaccucgugcgggaucugccucagggcuucucugcucuggaaccccugguggaucugcccaucggcaucaacaucacccgguuucagacacugcuggcccugcacagaagcuaccugacaccuggcgauagcagcagcggauggacagcuggugccgccgcuuacuaugugggcuaccugcagccuagaaccuuccugcugaaguacaacgagaacggcaccaucaccgacgccguggauugugcucuggauccucugagcgagacaaagugcacccugaaguccuucaccguggaaaagggcaucuaccagaccagcaacuuccgggugcagcccaccgaauccaucgugcgguuccccaauaucaccaaucugugccccuucggcgagguguucaaugccaccagauucgccucuguguacgccuggaaccggaagcggaucagcaauugcguggccgacuacuccgugcuguacaacuccgccagcuucagcaccuucaagugcuacggcguguccccuaccaagcugaacgaccugugcuucacaaacguguacgccgacagcuucgugauccggggagaugaagugcggcagauugccccuggacagacaggcaagaucgccgacuacaacuacaagcugcccgacgacuucaccggcugugugauugccuggaacagcaacaaccuggacuccaaagucggcggcaacuacaauuaccuguaccggcuguuccggaaguccaaucugaagcccuucgagcgggacaucagcaccgaaaucuaucaggccggcagcaccccuugcaacggcguggaaggcuucaacugcuacuucccacugcaguccuacggcuuucagcccacaaauggcgugggcuaucagcccuacagagugguggugcugagcuucgaacugcugcaugcuccugccacagugugcggcccuaagaaaagcaccaaucucgugaagaacaaaugcgugaacuucaacuucaacggccugaccggcaccggcgugcugacagagagcaacaagaaguuccugccauuccagcaguuuggccgggauaucgccgauaccacagacgccguuagagauccccagacacuggaaauccuggacaucaccccaugcagcuucggcggagugucugugaucaccccuggcaccaacaccagcaaucagguggcagugcuguaccaggacgugaacuguaccgaagugcccguggccauucacgccgaucagcugacaccuacauggcggguguacuccaccggcagcaauguguuucagaccagagccggcugucugaucggagccgagcacgugaacaauagcuacgagugcgacauccccaucggcgcuggcaucugugccagcuaccagacacagacaaacagccccagacgggcuagaagcguggccagccagagcaucauugccuacacaaugucucugggcgccgagaacagcguggccuacuccaacaacucuaucgcuauccccaccaacuucaccaucagcgugaccaccgagauccugccuguguccaugaccaagaccagcguggacugcaccauguacaucugcggcgauuccaccgagugcuccaaccugcugcugcaguacggcagcuucugcacccagcugaauagagcccugacagggaucgccguggaacaggacaagaacacccaagagguguucgcccaagugaagcaaaucuacaagaccccuccuaucaaggacuucggcggcuucaauuucagccagauucugcccgauccuagcaagcccagcaagcggagcuucaucgaggaccugcuguucaacaaagugacacuggccgacgccggcuucaucaagcaguauggcgauugucugggcgacauugccgccagggaucugauuugcgcccagaaguuuaacggacugacagugcugccuccucugcugaccgaugagaugaucgcccaguacacaucugcccugcuggccggcacaaucacaagcggcuggacauuuggagcuggcgccgcucugcagauccccuuugcuaugcagauggccuaccgguucaacggcaucggagugacccagaaugugcuguacgagaaccagaagcugaucgccaaccaguucaacagcgccaucggcaagauccaggacagccugagcagcacagcaagcgcccugggaaagcugcaggacguggucaaccagaaugcccaggcacugaacacccuggucaagcagcuguccuccaacugcggcgccaucagcucugugcugaacgauauccugagcagacuggacaaggucgaggccgaggugcagaucgacagacugaucacauguagacugcagagccuccagacauacgugacccagcagcugaucagagccgccgagauuagagccucugccaaucuggccgccaccaagaugucugagugugugcugggccagagcaagagaguggacuuuugcggcaagggcuaccaccugaugagcuucccucagucugccccucacggcgugguguuucugcacgugacauaugugcccgcucaagagaagaauuucaccaccgcuccagccaucugccacgacggcaaagcccacuuuccuagagaaggcguguucguguccaacggcacccauugguucgugacacagcggaacuucuacgagccccagaucaucaccaccgacaacaccuucgugucuggcaacugcgacguugugaucggcauugugaacaauaccguguacgacccucugcagcccgagcuggacagcuucaaagaggaacuggacaaguacuuuaagaaccacacaagccccgacguggaccugggcgauaucagcggaaucaaugccagcgucgugaacauccagaaagagaucgaccggcugaacgagguggccaagaaucugaacgagagccugaucgaccugcaagaacuggggaaguacgagcaguacaucaagggcggaggaucuggcggaggacagaucuacgagggcaagcugacagccgagggccugagauuuggaaucguggccagccgguucaaucacgcccugguggauagacugguggaaggcgccaucgaugccauugucagacacggcggcagagaagaggacaucacccucguuagagugcccggcucuugggagauuccuguggcugcuggcgagcuggcccggaaagaagauaucgacgccguuaucgccaucggcgugcugaucagaggcgccacaccucacuucgacuauaucgccagcgagguguccaaaggccuggccgaucugagccuggaacugagaaagcccaucaccuucggcgugaucaccgcugacacacuggaacaggccauugagagagccggcaccaagcacggcaacaaaggaugggaagccgcucuguccgccaucgagauggccaaccuguucaagagccugcgguga

SEQ ID NO: 12096 - RNA, 4116 nt, Artificial Sequence
  SARS-CoV-2/Wuhan/WIV05/2019__EPI_ISL_402128 spike protein CDS gc mod (1-1211)(A972C_R995C) LumSynth construct
auguucguguuucuggugcugcugccccugguguccagccagugugugaaccugaccaccagaacacagcugccuccagccuacaccaacagcuucaccagaggcguguacuaccccgacaagguguucagauccagcgugcugcacucuacccaggaccuguuccugccuuucuucagcaacgugaccugguuccacgccauccacguguccggcaccaauggcaccaagagauucgacaaccccgugcugcccuucaacgacgggguguacuuugccagcaccgagaaguccaacaucaucagaggcuggaucuucggcaccacacuggacagcaagacccagagccugcugaucgugaacaacgccaccaacguggucaucaaagugugcgaguuccaguucugcaacgaccccuuccugggcgucuacuaccacaagaacaacaagagcuggauggaaagcgaguuccggguguacagcagcgccaacaacugcaccuucgaguacgugucccagccuuuccugauggaccuggaaggcaagcagggcaacuucaagaaccugcgcgaguucguguucaagaacaucgacggcuacuucaaaaucuacagcaagcacaccccuaucaaccucgugcgggaucugccucagggcuucucugcucuggaaccccugguggaucugcccaucggcaucaacaucacccgguuucagacacugcuggcccugcacagaagcuaccugacaccuggcgauagcagcagcggauggacagcuggugccgccgcuuacuaugugggcuaccugcagccuagaaccuuccugcugaaguacaacgagaacggcaccaucaccgacgccguggauugugcucuggauccucugagcgagacaaagugcacccugaaguccuucaccguggaaaagggcaucuaccagaccagcaacuuccgggugcagcccaccgaauccaucgugcgguuccccaauaucaccaaucugugccccuucggcgagguguucaaugccaccagauucgccucuguguacgccuggaaccggaagcggaucagcaauugcguggccgacuacuccgugcuguacaacuccgccagcuucagcaccuucaagugcuacggcguguccccuaccaagcugaacgaccugugcuucacaaacguguacgccgacagcuucgugauccggggagaugaagugcggcagauugccccuggacagacaggcaagaucgccgacuacaacuacaagcugcccgacgacuucaccggcugugugauugccuggaacagcaacaaccuggacuccaaagucggcggcaacuacaauuaccuguaccggcuguuccggaaguccaaucugaagcccuucgagcgggacaucagcaccgaaaucuaucaggccggcagcaccccuugcaacggcguggaaggcuucaacugcuacuucccacugcaguccuacggcuuucagcccacaaauggcgugggcuaucagcccuacagagugguggugcugagcuucgaacugcugcaugcuccugccacagugugcggcccuaagaaaagcaccaaucucgugaagaacaaaugcgugaacuucaacuucaacggccugaccggcaccggcgugcugacagagagcaacaagaaguuccugccauuccagcaguuuggccgggauaucgccgauaccacagacgccguuagagauccccagacacuggaaauccuggacaucaccccaugcagcuucggcggagugucugugaucaccccuggcaccaacaccagcaaucagguggcagugcuguaccaggacgugaacuguaccgaagugcccguggccauucacgccgaucagcugacaccuacauggcggguguacuccaccggcagcaauguguuucagaccagagccggcugucugaucggagccgagcacgugaacaauagcuacgagugcgacauccccaucggcgcuggcaucugugccagcuaccagacacagacaaacagccccagacgggcuagaagcguggccagccagagcaucauugccuacacaaugucucugggcgccgagaacagcguggccuacuccaacaacucuaucgcuauccccaccaacuucaccaucagcgugaccaccgagauccugccuguguccaugaccaagaccagcguggacugcaccauguacaucugcggcgauuccaccgagugcuccaaccugcugcugcaguacggcagcuucugcacccagcugaauagagcccugacagggaucgccguggaacaggacaagaacacccaagagguguucgcccaagugaagcaaaucuacaagaccccuccuaucaaggacuucggcggcuucaauuucagccagauucugcccgauccuagcaagcccagcaagcggagcuucaucgaggaccugcuguucaacaaagugacacuggccgacgccggcuucaucaagcaguauggcgauugucugggcgacauugccgccagggaucugauuugcgcccagaaguuuaacggacugacagugcugccuccucugcugaccgaugagaugaucgcccaguacacaucugcccugcuggccggcacaaucacaagcggcuggacauuuggagcuggcgccgcucugcagauccccuuugcuaugcagauggccuaccgguucaacggcaucggagugacccagaaugugcuguacgagaaccagaagcugaucgccaaccaguucaacagcgccaucggcaagauccaggacagccugagcagcacagcaagcgcccugggaaagcugcaggacguggucaaccagaaugcccaggcacugaacacccuggucaagcagcuguccuccaacuucggcugcaucagcucugugcugaacgauauccugagcagacuggacaaggucgaggccgaggugcagaucgacugucugaucacaggcagacugcagagccuccagacauacgugacccagcagcugaucagagccgccgagauuagagccucugccaaucuggccgccaccaagaugucugagugugugcugggccagagcaagagaguggacuuuugcggcaagggcuaccaccugaugagcuucccucagucugccccucacggcgugguguuucugcacgugacauaugugcccgcucaagagaagaauuucaccaccgcuccagccaucugccacgacggcaaagcccacuuuccuagagaaggcguguucguguccaacggcacccauugguucgugacacagcggaacuucuacgagccccagaucaucaccaccgacaacaccuucgugucuggcaacugcgacguugugaucggcauugugaacaauaccguguacgacccucugcagcccgagcuggacagcuucaaagaggaacuggacaaguacuuuaagaaccacacaagccccgacguggaccugggcgauaucagcggaaucaaugccagcgucgugaacauccagaaagagaucgaccggcugaacgagguggccaagaaucugaacgagagccugaucgaccugcaagaacuggggaaguacgagcaguacaucaagggcggaggaucuggcggaggacagaucuacgagggcaagcugacagccgagggccugagauuuggaaucguggccagccgguucaaucacgcccugguggauagacugguggaaggcgccaucgaugccauugucagacacggcggcagagaagaggacaucacccucguuagagugcccggcucuugggagauuccuguggcugcuggcgagcuggcccggaaagaagauaucgacgccguuaucgccaucggcgugcugaucagaggcgccacaccucacuucgacuauaucgccagcgagguguccaaaggccuggccgaucugagccuggaacugagaaagcccaucaccuucggcgugaucaccgcugacacacuggaacaggccauugagagagccggcaccaagcacggcaacaaaggaugggaagccgcucuguccgccaucgagauggccaaccuguucaagagccugcgguga

SEQ ID NO: 12097 - RNA, 4116 nt, Artificial Sequence
  SARS-CoV-2/Wuhan/WIV05/2019__EPI_ISL_402128 spike protein CDS gc mod (1-1211)(A890C_V1040C) LumSynth construct
auguucguguuucuggugcugcugccccugguguccagccagugugugaaccugaccaccagaacacagcugccuccagccuacaccaacagcuucaccagaggcguguacuaccccgacaagguguucagauccagcgugcugcacucuacccaggaccuguuccugccuuucuucagcaacgugaccugguuccacgccauccacguguccggcaccaauggcaccaagagauucgacaaccccgugcugcccuucaacgacgggguguacuuugccagcaccgagaaguccaacaucaucagaggcuggaucuucggcaccacacuggacagcaagacccagagccugcugaucgugaacaacgccaccaacguggucaucaaagugugcgaguuccaguucugcaacgaccccuuccugggcgucuacuaccacaagaacaacaagagcuggauggaaagcgaguuccggguguacagcagcgccaacaacugcaccuucgaguacgugucccagccuuuccugauggaccuggaaggcaagcagggcaacuucaagaaccugcgcgaguucguguucaagaacaucgacggcuacuucaaaaucuacagcaagcacaccccuaucaaccucgugcgggaucugccucagggcuucucugcucuggaaccccugguggaucugcccaucggcaucaacaucacccgguuucagacacugcuggcccugcacagaagcuaccugacaccuggcgauagcagcagcggauggacagcuggugccgccgcuuacuaugugggcuaccugcagccuagaaccuuccugcugaaguacaacgagaacggcaccaucaccgacgccguggauugugcucuggauccucugagcgagacaaagugcacccugaaguccuucaccguggaaaagggcaucuaccagaccagcaacuuccgggugcagcccaccgaauccaucgugcgguuccccaauaucaccaaucugugccccuucggcgagguguucaaugccaccagauucgccucuguguacgccuggaaccggaagcggaucagcaauugcguggccgacuacuccgugcuguacaacuccgccagcuucagcaccuucaagugcuacggcguguccccuaccaagcugaacgaccugugcuucacaaacguguacgccgacagcuucgugauccggggagaugaagugcggcagauugccccuggacagacaggcaagaucgccgacuacaacuacaagcugcccgacgacuucaccggcugugugauugccuggaacagcaacaaccuggacuccaaagucggcggcaacuacaauuaccuguaccggcuguuccggaaguccaaucugaagcccuucgagcgggacaucagcaccgaaaucuaucaggccggcagcaccccuugcaacggcguggaaggcuucaacugcuacuucccacugcaguccuacggcuuucagcccacaaauggcgugggcuaucagcccuacagagugguggugcugagcuucgaacugcugcaugcuccugccacagugugcggcccuaagaaaagcaccaaucucgugaagaacaaaugcgugaacuucaacuucaacggccugaccggcaccggcgugcugacagagagcaacaagaaguuccugccauuccagcaguuuggccgggauaucgccgauaccacagacgccguuagagauccccagacacuggaaauccuggacaucaccccaugcagcuucggcggagugucugugaucaccccuggcaccaacaccagcaaucagguggcagugcuguaccaggacgugaacuguaccgaagugcccguggccauucacgccgaucagcugacaccuacauggcggguguacuccaccggcagcaauguguuucagaccagagccggcugucugaucggagccgagcacgugaacaauagcuacgagugcgacauccccaucggcgcuggcaucugugccagcuaccagacacagacaaacagccccagacgggcuagaagcguggccagccagagcaucauugccuacacaaugucucugggcgccgagaacagcguggccuacuccaacaacucuaucgcuauccccaccaacuucaccaucagcgugaccaccgagauccugccuguguccaugaccaagaccagcguggacugcaccauguacaucugcggcgauuccaccgagugcuccaaccugcugcugcaguacggcagcuucugcacccagcugaauagagcccugacagggaucgccguggaacaggacaagaacacccaagagguguucgcccaagugaagcaaaucuacaagaccccuccuaucaaggacuucggcggcuucaauuucagccagauucugcccgauccuagcaagcccagcaagcggagcuucaucgaggaccugcuguucaacaaagugacacuggccgacgccggcuucaucaagcaguauggcgauugucugggcgacauugccgccagggaucugauuugcgcccagaaguuuaacggacugacagugcugccuccucugcugaccgaugagaugaucgcccaguacacaucugcccugcuggccggcacaaucacaagcggcuggacauuuggaugcggcgccgcucugcagauccccuuugcuaugcagauggccuaccgguucaacggcaucggagugacccagaaugugcuguacgagaaccagaagcugaucgccaaccaguucaacagcgccaucggcaagauccaggacagccugagcagcacagcaagcgcccugggaaagcugcaggacguggucaaccagaaugcccaggcacugaacacccuggucaagcagcuguccuccaacuucggcgccaucagcucugugcugaacgauauccugagcagacuggacaaggucgaggccgaggugcagaucgacagacugaucacaggcagacugcagagccuccagacauacgugacccagcagcugaucagagccgccgagauuagagccucugccaaucuggccgccaccaagaugucugagugugugcugggccagagcaagagaugugacuuuugcggcaagggcuaccaccugaugagcuucccucagucugccccucacggcgugguguuucugcacgugacauaugugcccgcucaagagaagaauuucaccaccgcuccagccaucugccacgacggcaaagcccacuuuccuagagaaggcguguucguguccaacggcacccauugguucgugacacagcggaacuucuacgagccccagaucaucaccaccgacaacaccuucgugucuggcaacugcgacguugugaucggcauugugaacaauaccguguacgacccucugcagcccgagcuggacagcuucaaagaggaacuggacaaguacuuuaagaaccacacaagccccgacguggaccugggcgauaucagcggaaucaaugccagcgucgugaacauccagaaagagaucgaccggcugaacgagguggccaagaaucugaacgagagccugaucgaccugcaagaacuggggaaguacgagcaguacaucaagggcggaggaucuggcggaggacagaucuacgagggcaagcugacagccgagggccugagauuuggaaucguggccagccgguucaaucacgcccugguggauagacugguggaaggcgccaucgaugccauugucagacacggcggcagagaagaggacaucacccucguuagagugcccggcucuugggagauuccuguggcugcuggcgagcuggcccggaaagaagauaucgacgccguuaucgccaucggcgugcugaucagaggcgccacaccucacuucgacuauaucgccagcgagguguccaaaggccuggccgaucugagccuggaacugagaaagcccaucaccuucggcgugaucaccgcugacacacuggaacaggccauugagagagccggcaccaagcacggcaacaaaggaugggaagccgcucuguccgccaucgagauggccaaccuguucaagagccugcgguga

SEQ ID NO: 12098 - RNA, 4116 nt, Artificial Sequence
  SARS-CoV-2/Wuhan/WIV05/2019__EPI_ISL_402128 spike protein CDS gc mod (1-1211)(T874C_S1055C) LumSynth construct
auguucguguuucuggugcugcugccccugguguccagccagugugugaaccugaccaccagaacacagcugccuccagccuacaccaacagcuucaccagaggcguguacuaccccgacaagguguucagauccagcgugcugcacucuacccaggaccuguuccugccuuucuucagcaacgugaccugguuccacgccauccacguguccggcaccaauggcaccaagagauucgacaaccccgugcugcccuucaacgacgggguguacuuugccagcaccgagaaguccaacaucaucagaggcuggaucuucggcaccacacuggacagcaagacccagagccugcugaucgugaacaacgccaccaacguggucaucaaagugugcgaguuccaguucugcaacgaccccuuccugggcgucuacuaccacaagaacaacaagagcuggauggaaagcgaguuccggguguacagcagcgccaacaacugcaccuucgaguacgugucccagccuuuccugauggaccuggaaggcaagcagggcaacuucaagaaccugcgcgaguucguguucaagaacaucgacggcuacuucaaaaucuacagcaagcacaccccuaucaaccucgugcgggaucugccucagggcuucucugcucuggaaccccugguggaucugcccaucggcaucaacaucacccgguuucagacacugcuggcccugcacagaagcuaccugacaccuggcgauagcagcagcggauggacagcuggugccgccgcuuacuaugugggcuaccugcagccuagaaccuuccugcugaaguacaacgagaacggcaccaucaccgacgccguggauugugcucuggauccucugagcgagacaaagugcacccugaaguccuucaccguggaaaagggcaucuaccagaccagcaacuuccgggugcagcccaccgaauccaucgugcgguuccccaauaucaccaaucugugccccuucggcgagguguucaaugccaccagauucgccucuguguacgccuggaaccggaagcggaucagcaauugcguggccgacuacuccgugcuguacaacuccgccagcuucagcaccuucaagugcuacggcguguccccuaccaagcugaacgaccugugcuucacaaacguguacgccgacagcuucgugauccggggagaugaagugcggcagauugccccuggacagacaggcaagaucgccgacuacaacuacaagcugcccgacgacuucaccggcugugugauugccuggaacagcaacaaccuggacuccaaagucggcggcaacuacaauuaccuguaccggcuguuccggaaguccaaucugaagcccuucgagcgggacaucagcaccgaaaucuaucaggccggcagcaccccuugcaacggcguggaaggcuucaacugcuacuucccacugcaguccuacggcuuucagcccacaaauggcgugggcuaucagcccuacagagugguggugcugagcuucgaacugcugcaugcuccugccacagugugcggcccuaagaaaagcaccaaucucgugaagaacaaaugcgugaacuucaacuucaacggccugaccggcaccggcgugcugacagagagcaacaagaaguuccugccauuccagcaguuuggccgggauaucgccgauaccacagacgccguuagagauccccagacacuggaaauccuggacaucaccccaugcagcuucggcggagugucugugaucaccccuggcaccaacaccagcaaucagguggcagugcuguaccaggacgugaacuguaccgaagugcccguggccauucacgccgaucagcugacaccuacauggcggguguacuccaccggcagcaauguguuucagaccagagccggcugucugaucggagccgagcacgugaacaauagcuacgagugcgacauccccaucggcgcuggcaucugugccagcuaccagacacagacaaacagccccagacgggcuagaagcguggccagccagagcaucauugccuacacaaugucucugggcgccgagaacagcguggccuacuccaacaacucuaucgcuauccccaccaacuucaccaucagcgugaccaccgagauccugccuguguccaugaccaagaccagcguggacugcaccauguacaucugcggcgauuccaccgagugcuccaaccugcugcugcaguacggcagcuucugcacccagcugaauagagcccugacagggaucgccguggaacaggacaagaacacccaagagguguucgcccaagugaagcaaaucuacaagaccccuccuaucaaggacuucggcggcuucaauuucagccagauucugcccgauccuagcaagcccagcaagcggagcuucaucgaggaccugcuguucaacaaagugacacuggccgacgccggcuucaucaagcaguauggcgauugucugggcgacauugccgccagggaucugauuugcgcccagaaguuuaacggacugacagugcugccuccucugcugaccgaugagaugaucgcccaguacugcucugcccugcuggccggcacaaucacaagcggcuggacauuuggagcuggcgccgcucugcagauccccuuugcuaugcagauggccuaccgguucaacggcaucggagugacccagaaugugcuguacgagaaccagaagcugaucgccaaccaguucaacagcgccaucggcaagauccaggacagccugagcagcacagcaagcgcccugggaaagcugcaggacguggucaaccagaaugcccaggcacugaacacccuggucaagcagcuguccuccaacuucggcgccaucagcucugugcugaacgauauccugagcagacuggacaaggucgaggccgaggugcagaucgacagacugaucacaggcagacugcagagccuccagacauacgugacccagcagcugaucagagccgccgagauuagagccucugccaaucuggccgccaccaagaugucugagugugugcugggccagagcaagagaguggacuuuugcggcaagggcuaccaccugaugagcuucccucagugcgccccucacggcgugguguuucugcacgugacauaugugcccgcucaagagaagaauuucaccaccgcuccagccaucugccacgacggcaaagcccacuuuccuagagaaggcguguucguguccaacggcacccauugguucgugacacagcggaacuucuacgagccccagaucaucaccaccgacaacaccuucgugucuggcaacugcgacguugugaucggcauugugaacaauaccguguacgacccucugcagcccgagcuggacagcuucaaagaggaacuggacaaguacuuuaagaaccacacaagccccgacguggaccugggcgauaucagcggaaucaaugccagcgucgugaacauccagaaagagaucgaccggcugaacgagguggccaagaaucugaacgagagccugaucgaccugcaagaacuggggaaguacgagcaguacaucaagggcggaggaucuggcggaggacagaucuacgagggcaagcugacagccgagggccugagauuuggaaucguggccagccgguucaaucacgcccugguggauagacugguggaaggcgccaucgaugccauugucagacacggcggcagagaagaggacaucacccucguuagagugcccggcucuugggagauuccuguggcugcuggcgagcuggcccggaaagaagauaucgacgccguuaucgccaucggcgugcugaucagaggcgccacaccucacuucgacuauaucgccagcgagguguccaaaggccuggccgaucugagccuggaacugagaaagcccaucaccuucggcgugaucaccgcugacacacuggaacaggccauugagagagccggcaccaagcacggcaacaaaggaugggaagccgcucuguccgccaucgagauggccaaccuguucaagagccugcgguga

SEQ ID NO: 12099 - RNA, 4140 nt, Artificial Sequence
  SARS-CoV-2/Wuhan/WIV05/2019__EPI_ISL_402128 spike protein CDS gc mod (1-1211) Ferritin construct
auguucguguuucuggugcugcugccccugguguccagccagugugugaaccugaccaccagaacacagcugccuccagccuacaccaacagcuucaccagaggcguguacuaccccgacaagguguucagauccagcgugcugcacucuacccaggaccuguuccugccuuucuucagcaacgugaccugguuccacgccauccacguguccggcaccaauggcaccaagagauucgacaaccccgugcugcccuucaacgacgggguguacuuugccagcaccgagaaguccaacaucaucagaggcuggaucuucggcaccacacuggacagcaagacccagagccugcugaucgugaacaacgccaccaacguggucaucaaagugugcgaguuccaguucugcaacgaccccuuccugggcgucuacuaccacaagaacaacaagagcuggauggaaagcgaguuccggguguacagcagcgccaacaacugcaccuucgaguacgugucccagccuuuccugauggaccuggaaggcaagcagggcaacuucaagaaccugcgcgaguucguguucaagaacaucgacggcuacuucaaaaucuacagcaagcacaccccuaucaaccucgugcgggaucugccucagggcuucucugcucuggaaccccugguggaucugcccaucggcaucaacaucacccgguuucagacacugcuggcccugcacagaagcuaccugacaccuggcgauagcagcagcggauggacagcuggugccgccgcuuacuaugugggcuaccugcagccuagaaccuuccugcugaaguacaacgagaacggcaccaucaccgacgccguggauugugcucuggauccucugagcgagacaaagugcacccugaaguccuucaccguggaaaagggcaucuaccagaccagcaacuuccgggugcagcccaccgaauccaucgugcgguuccccaauaucaccaaucugugccccuucggcgagguguucaaugccaccagauucgccucuguguacgccuggaaccggaagcggaucagcaauugcguggccgacuacuccgugcuguacaacuccgccagcuucagcaccuucaagugcuacggcguguccccuaccaagcugaacgaccugugcuucacaaacguguacgccgacagcuucgugauccggggagaugaagugcggcagauugccccuggacagacaggcaagaucgccgacuacaacuacaagcugcccgacgacuucaccggcugugugauugccuggaacagcaacaaccuggacuccaaagucggcggcaacuacaauuaccuguaccggcuguuccggaaguccaaucugaagcccuucgagcgggacaucagcaccgaaaucuaucaggccggcagcaccccuugcaacggcguggaaggcuucaacugcuacuucccacugcaguccuacggcuuucagcccacaaauggcgugggcuaucagcccuacagagugguggugcugagcuucgaacugcugcaugcuccugccacagugugcggcccuaagaaaagcaccaaucucgugaagaacaaaugcgugaacuucaacuucaacggccugaccggcaccggcgugcugacagagagcaacaagaaguuccugccauuccagcaguuuggccgggauaucgccgauaccacagacgccguuagagauccccagacacuggaaauccuggacaucaccccaugcagcuucggcggagugucugugaucaccccuggcaccaacaccagcaaucagguggcagugcuguaccaggacgugaacuguaccgaagugcccguggccauucacgccgaucagcugacaccuacauggcggguguacuccaccggcagcaauguguuucagaccagagccggcugucugaucggagccgagcacgugaacaauagcuacgagugcgacauccccaucggcgcuggcaucugugccagcuaccagacacagacaaacagccccagacgggcuagaagcguggccagccagagcaucauugccuacacaaugucucugggcgccgagaacagcguggccuacuccaacaacucuaucgcuauccccaccaacuucaccaucagcgugaccaccgagauccugccuguguccaugaccaagaccagcguggacugcaccauguacaucugcggcgauuccaccgagugcuccaaccugcugcugcaguacggcagcuucugcacccagcugaauagagcccugacagggaucgccguggaacaggacaagaacacccaagagguguucgcccaagugaagcaaaucuacaagaccccuccuaucaaggacuucggcggcuucaauuucagccagauucugcccgauccuagcaagcccagcaagcggagcuucaucgaggaccugcuguucaacaaagugacacuggccgacgccggcuucaucaagcaguauggcgauugucugggcgacauugccgccagggaucugauuugcgcccagaaguuuaacggacugacagugcugccuccucugcugaccgaugagaugaucgcccaguacacaucugcccugcuggccggcacaaucacaagcggcuggacauuuggagcuggcgccgcucugcagauccccuuugcuaugcagauggccuaccgguucaacggcaucggagugacccagaaugugcuguacgagaaccagaagcugaucgccaaccaguucaacagcgccaucggcaagauccaggacagccugagcagcacagcaagcgcccugggaaagcugcaggacguggucaaccagaaugcccaggcacugaacacccuggucaagcagcuguccuccaacuucggcgccaucagcucugugcugaacgauauccugagcagacuggacaaggucgaggccgaggugcagaucgacagacugaucacaggcagacugcagagccuccagacauacgugacccagcagcugaucagagccgccgagauuagagccucugccaaucuggccgccaccaagaugucugagugugugcugggccagagcaagagaguggacuuuugcggcaagggcuaccaccugaugagcuucccucagucugccccucacggcgugguguuucugcacgugacauaugugcccgcucaagagaagaauuucaccaccgcuccagccaucugccacgacggcaaagcccacuuuccuagagaaggcguguucguguccaacggcacccauugguucgugacacagcggaacuucuacgagccccagaucaucaccaccgacaacaccuucgugucuggcaacugcgacguugugaucggcauugugaacaauaccguguacgacccucugcagcccgagcuggacagcuucaaagaggaacuggacaaguacuuuaagaaccacacaagccccgacguggaccugggcgauaucagcggaaucaaugccagcgucgugaacauccagaaagagaucgaccggcugaacgagguggccaagaaucugaacgagagccugaucgaccugcaagaacuggggaaguacgagcaguacaucaagggaggcggaggaucugacaucaucaagcugcugaacgagcaagugaacaaagagaugcagagcagcaaccuguacaugagcaugagcagcuggugcuacacccacagccuugauggcgccggacuguuccuguuugaucacgccgccgaggaauacgagcacgccaagaagcugaucaucuuccugaacgagaacaacgugcccgugcagcugaccagcauuucugccccugagcacaaguucgagggccugacacagaucuuccagaaggccuacgaacacgagcagcacaucagcgagagcaucaacaacaucguggaccacgccauuaagagcaaggaucacgccaccuucaacuuucugcagugguacguggccgaacagcacgaggaagaggugcuguucaaggacauccuggacaagaucgagcugaucggcaacgagaaccacggccuguaucuggccgaccaguacgugaagggaaucgccaagagcagaaagagcuga

SEQ ID NO: 12100 - RNA, 4140 nt, Artificial Sequence
  SARS-CoV-2/Wuhan/WIV05/2019__EPI_ISL_402128 spike protein CDS gc mod (1-1211)(K986P_V987P) Ferritin construct
auguucguguuucuggugcugcugccccugguguccagccagugugugaaccugaccaccagaacacagcugccuccagccuacaccaacagcuucaccagaggcguguacuaccccgacaagguguucagauccagcgugcugcacucuacccaggaccuguuccugccuuucuucagcaacgugaccugguuccacgccauccacguguccggcaccaauggcaccaagagauucgacaaccccgugcugcccuucaacgacgggguguacuuugccagcaccgagaaguccaacaucaucagaggcuggaucuucggcaccacacuggacagcaagacccagagccugcugaucgugaacaacgccaccaacguggucaucaaagugugcgaguuccaguucugcaacgaccccuuccugggcgucuacuaccacaagaacaacaagagcuggauggaaagcgaguuccggguguacagcagcgccaacaacugcaccuucgaguacgugucccagccuuuccugauggaccuggaaggcaagcagggcaacuucaagaaccugcgcgaguucguguucaagaacaucgacggcuacuucaaaaucuacagcaagcacaccccuaucaaccucgugcgggaucugccucagggcuucucugcucuggaaccccugguggaucugcccaucggcaucaacaucacccgguuucagacacugcuggcccugcacagaagcuaccugacaccuggcgauagcagcagcggauggacagcuggugccgccgcuuacuaugugggcuaccugcagccuagaaccuuccugcugaaguacaacgagaacggcaccaucaccgacgccguggauugugcucuggauccucugagcgagacaaagugcacccugaaguccuucaccguggaaaagggcaucuaccagaccagcaacuuccgggugcagcccaccgaauccaucgugcgguuccccaauaucaccaaucugugccccuucggcgagguguucaaugccaccagauucgccucuguguacgccuggaaccggaagcggaucagcaauugcguggccgacuacuccgugcuguacaacuccgccagcuucagcaccuucaagugcuacggcguguccccuaccaagcugaacgaccugugcuucacaaacguguacgccgacagcuucgugauccggggagaugaagugcggcagauugccccuggacagacaggcaagaucgccgacuacaacuacaagcugcccgacgacuucaccggcugugugauugccuggaacagcaacaaccuggacuccaaagucggcggcaacuacaauuaccuguaccggcuguuccggaaguccaaucugaagcccuucgagcgggacaucagcaccgaaaucuaucaggccggcagcaccccuugcaacggcguggaaggcuucaacugcuacuucccacugcaguccuacggcuuucagcccacaaauggcgugggcuaucagcccuacagagugguggugcugagcuucgaacugcugcaugcuccugccacagugugcggcccuaagaaaagcaccaaucucgugaagaacaaaugcgugaacuucaacuucaacggccugaccggcaccggcgugcugacagagagcaacaagaaguuccugccauuccagcaguuuggccgggauaucgccgauaccacagacgccguuagagauccccagacacuggaaauccuggacaucaccccaugcagcuucggcggagugucugugaucaccccuggcaccaacaccagcaaucagguggcagugcuguaccaggacgugaacuguaccgaagugcccguggccauucacgccgaucagcugacaccuacauggcggguguacuccaccggcagcaauguguuucagaccagagccggcugucugaucggagccgagcacgugaacaauagcuacgagugcgacauccccaucggcgcuggcaucugugccagcuaccagacacagacaaacagccccagacgggcuagaagcguggccagccagagcaucauugccuacacaaugucucugggcgccgagaacagcguggccuacuccaacaacucuaucgcuauccccaccaacuucaccaucagcgugaccaccgagauccugccuguguccaugaccaagaccagcguggacugcaccauguacaucugcggcgauuccaccgagugcuccaaccugcugcugcaguacggcagcuucugcacccagcugaauagagcccugacagggaucgccguggaacaggacaagaacacccaagagguguucgcccaagugaagcaaaucuacaagaccccuccuaucaaggacuucggcggcuucaauuucagccagauucugcccgauccuagcaagcccagcaagcggagcuucaucgaggaccugcuguucaacaaagugacacuggccgacgccggcuucaucaagcaguauggcgauugucugggcgacauugccgccagggaucugauuugcgcccagaaguuuaacggacugacagugcugccuccucugcugaccgaugagaugaucgcccaguacacaucugcccugcuggccggcacaaucacaagcggcuggacauuuggagcuggcgccgcucugcagauccccuuugcuaugcagauggccuaccgguucaacggcaucggagugacccagaaugugcuguacgagaaccagaagcugaucgccaaccaguucaacagcgccaucggcaagauccaggacagccugagcagcacagcaagcgcccugggaaagcugcaggacguggucaaccagaaugcccaggcacugaacacccuggucaagcagcuguccuccaacuucggcgccaucagcucugugcugaacgauauccugagcagacuggacccuccugaggccgaggugcagaucgacagacugaucacaggcagacugcagagccuccagacauacgugacccagcagcugaucagagccgccgagauuagagccucugccaaucuggccgccaccaagaugucugagugugugcugggccagagcaagagaguggacuuuugcggcaagggcuaccaccugaugagcuucccucagucugccccucacggcgugguguuucugcacgugacauaugugcccgcucaagagaagaauuucaccaccgcuccagccaucugccacgacggcaaagcccacuuuccuagagaaggcguguucguguccaacggcacccauugguucgugacacagcggaacuucuacgagccccagaucaucaccaccgacaacaccuucgugucuggcaacugcgacguugugaucggcauugugaacaauaccguguacgacccucugcagcccgagcuggacagcuucaaagaggaacuggacaaguacuuuaagaaccacacaagccccgacguggaccugggcgauaucagcggaaucaaugccagcgucgugaacauccagaaagagaucgaccggcugaacgagguggccaagaaucugaacgagagccugaucgaccugcaagaacuggggaaguacgagcaguacaucaagggaggcggaggaucugacaucaucaagcugcugaacgagcaagugaacaaagagaugcagagcagcaaccuguacaugagcaugagcagcuggugcuacacccacagccuugauggcgccggacuguuccuguuugaucacgccgccgaggaauacgagcacgccaagaagcugaucaucuuccugaacgagaacaacgugcccgugcagcugaccagcauuucugccccugagcacaaguucgagggccugacacagaucuuccagaaggccuacgaacacgagcagcacaucagcgagagcaucaacaacaucguggaccacgccauuaagagcaaggaucacgccaccuucaacuuucugcagugguacguggccgaacagcacgaggaagaggugcuguucaaggacauccuggacaagaucgagcugaucggcaacgagaaccacggccuguaucuggccgaccaguacgugaagggaaucgccaagagcagaaagagcuga

SEQ ID NO: 12101 - RNA, 4140 nt, Artificial Sequence
  SARS-CoV-2/Wuhan/WIV05/2019__EPI_ISL_402128 spike protein CDS gc mod (1-1211)(K986P_V987P_T887WN_A1020W) Ferritin construct
auguucguguuucuggugcugcugccccugguguccagccagugugugaaccugaccaccagaacacagcugccuccagccuacaccaacagcuucaccagaggcguguacuaccccgacaagguguucagauccagcgugcugcacucuacccaggaccuguuccugccuuucuucagcaacgugaccugguuccacgccauccacguguccggcaccaauggcaccaagagauucgacaaccccgugcugcccuucaacgacgggguguacuuugccagcaccgagaaguccaacaucaucagaggcuggaucuucggcaccacacuggacagcaagacccagagccugcugaucgugaacaacgccaccaacguggucaucaaagugugcgaguuccaguucugcaacgaccccuuccugggcgucuacuaccacaagaacaacaagagcuggauggaaagcgaguuccggguguacagcagcgccaacaacugcaccuucgaguacgugucccagccuuuccugauggaccuggaaggcaagcagggcaacuucaagaaccugcgcgaguucguguucaagaacaucgacggcuacuucaaaaucuacagcaagcacaccccuaucaaccucgugcgggaucugccucagggcuucucugcucuggaaccccugguggaucugcccaucggcaucaacaucacccgguuucagacacugcuggcccugcacagaagcuaccugacaccuggcgauagcagcagcggauggacagcuggugccgccgcuuacuaugugggcuaccugcagccuagaaccuuccugcugaaguacaacgagaacggcaccaucaccgacgccguggauugugcucuggauccucugagcgagacaaagugcacccugaaguccuucaccguggaaaagggcaucuaccagaccagcaacuuccgggugcagcccaccgaauccaucgugcgguuccccaauaucaccaaucugugccccuucggcgagguguucaaugccaccagauucgccucuguguacgccuggaaccggaagcggaucagcaauugcguggccgacuacuccgugcuguacaacuccgccagcuucagcaccuucaagugcuacggcguguccccuaccaagcugaacgaccugugcuucacaaacguguacgccgacagcuucgugauccggggagaugaagugcggcagauugccccuggacagacaggcaagaucgccgacuacaacuacaagcugcccgacgacuucaccggcugugugauugccuggaacagcaacaaccuggacuccaaagucggcggcaacuacaauuaccuguaccggcuguuccggaaguccaaucugaagcccuucgagcgggacaucagcaccgaaaucuaucaggccggcagcaccccuugcaacggcguggaaggcuucaacugcuacuucccacugcaguccuacggcuuucagcccacaaauggcgugggcuaucagcccuacagagugguggugcugagcuucgaacugcugcaugcuccugccacagugugcggcccuaagaaaagcaccaaucucgugaagaacaaaugcgugaacuucaacuucaacggccugaccggcaccggcgugcugacagagagcaacaagaaguuccugccauuccagcaguuuggccgggauaucgccgauaccacagacgccguuagagauccccagacacuggaaauccuggacaucaccccaugcagcuucggcggagugucugugaucaccccuggcaccaacaccagcaaucagguggcagugcuguaccaggacgugaacuguaccgaagugcccguggccauucacgccgaucagcugacaccuacauggcggguguacuccaccggcagcaauguguuucagaccagagccggcugucugaucggagccgagcacgugaacaauagcuacgagugcgacauccccaucggcgcuggcaucugugccagcuaccagacacagacaaacagccccagacgggcuagaagcguggccagccagagcaucauugccuacacaaugucucugggcgccgagaacagcguggccuacuccaacaacucuaucgcuauccccaccaacuucaccaucagcgugaccaccgagauccugccuguguccaugaccaagaccagcguggacugcaccauguacaucugcggcgauuccaccgagugcuccaaccugcugcugcaguacggcagcuucugcacccagcugaauagagcccugacagggaucgccguggaacaggacaagaacacccaagagguguucgcccaagugaagcaaaucuacaagaccccuccuaucaaggacuucggcggcuucaauuucagccagauucugcccgauccuagcaagcccagcaagcggagcuucaucgaggaccugcuguucaacaaagugacacuggccgacgccggcuucaucaagcaguauggcgauugucugggcgacauugccgccagggaucugauuugcgcccagaaguuuaacggacugacagugcugccuccucugcugaccgaugagaugaucgcccaguacacaucugcccugcuggccggcacaaucacaagcggcuggugguuuggagcuggcgccgcucugcagauccccuuugcuaugcagauggccuaccgguucaacggcaucggagugacccagaaugugcuguacgagaaccagaagcugaucgccaaccaguucaacagcgccaucggcaagauccaggacagccugagcagcacagcaagcgcccugggaaagcugcaggacguggucaaccagaaugcccaggcacugaacacccuggucaagcagcuguccuccaacuucggcgccaucagcucugugcugaacgauauccugagcagacuggacccuccugaggccgaggugcagaucgacagacugaucacaggcagacugcagagccuccagacauacgugacccagcagcugaucagagccgccgagauuagauggucugccaaucuggccgccaccaagaugucugagugugugcugggccagagcaagagaguggacuuuugcggcaagggcuaccaccugaugagcuucccucagucugccccucacggcgugguguuucugcacgugacauaugugcccgcucaagagaagaauuucaccaccgcuccagccaucugccacgacggcaaagcccacuuuccuagagaaggcguguucguguccaacggcacccauugguucgugacacagcggaacuucuacgagccccagaucaucaccaccgacaacaccuucgugucuggcaacugcgacguugugaucggcauugugaacaauaccguguacgacccucugcagcccgagcuggacagcuucaaagaggaacuggacaaguacuuuaagaaccacacaagccccgacguggaccugggcgauaucagcggaaucaaugccagcgucgugaacauccagaaagagaucgaccggcugaacgagguggccaagaaucugaacgagagccugaucgaccugcaagaacuggggaaguacgagcaguacaucaagggaggcggaggaucugacaucaucaagcugcugaacgagcaagugaacaaagagaugcagagcagcaaccuguacaugagcaugagcagcuggugcuacacccacagccuugauggcgccggacuguuccuguuugaucacgccgccgaggaauacgagcacgccaagaagcugaucaucuuccugaacgagaacaacgugcccgugcagcugaccagcauuucugccccugagcacaaguucgagggccugacacagaucuuccagaaggccuacgaacacgagcagcacaucagcgagagcaucaacaacaucguggaccacgccauuaagagcaaggaucacgccaccuucaacuuucugcagugguacguggccgaacagcacgaggaagaggugcuguucaaggacauccuggacaagaucgagcugaucggcaacgagaaccacggccuguaucuggccgaccaguacgugaagggaaucgccaagagcagaaagagcuga

SEQ ID NO: 12102 - RNA, 4140 nt, Artificial Sequence
  SARS-CoV-2/Wuhan/WIV05/2019__EPI_ISL_402128 spike protein CDS gc mod (1-1211)(K986P_V987P_P1069F) Ferritin construct
auguucguguuucuggugcugcugccccugguguccagccagugugugaaccugaccaccagaacacagcugccuccagccuacaccaacagcuucaccagaggcguguacuaccccgacaagguguucagauccagcgugcugcacucuacccaggaccuguuccugccuuucuucagcaacgugaccugguuccacgccauccacguguccggcaccaauggcaccaagagauucgacaaccccgugcugcccuucaacgacgggguguacuuugccagcaccgagaaguccaacaucaucagaggcuggaucuucggcaccacacuggacagcaagacccagagccugcugaucgugaacaacgccaccaacguggucaucaaagugugcgaguuccaguucugcaacgaccccuuccugggcgucuacuaccacaagaacaacaagagcuggauggaaagcgaguuccggguguacagcagcgccaacaacugcaccuucgaguacgugucccagccuuuccugauggaccuggaaggcaagcagggcaacuucaagaaccugcgcgaguucguguucaagaacaucgacggcuacuucaaaaucuacagcaagcacaccccuaucaaccucgugcgggaucugccucagggcuucucugcucuggaaccccugguggaucugcccaucggcaucaacaucacccgguuucagacacugcuggcccugcacagaagcuaccugacaccuggcgauagcagcagcggauggacagcuggugccgccgcuuacuaugugggcuaccugcagccuagaaccuuccugcugaaguacaacgagaacggcaccaucaccgacgccguggauugugcucuggauccucugagcgagacaaagugcacccugaaguccuucaccguggaaaagggcaucuaccagaccagcaacuuccgggugcagcccaccgaauccaucgugcgguuccccaauaucaccaaucugugccccuucggcgagguguucaaugccaccagauucgccucuguguacgccuggaaccggaagcggaucagcaauugcguggccgacuacuccgugcuguacaacuccgccagcuucagcaccuucaagugcuacggcguguccccuaccaagcugaacgaccugugcuucacaaacguguacgccgacagcuucgugauccggggagaugaagugcggcagauugccccuggacagacaggcaagaucgccgacuacaacuacaagcugcccgacgacuucaccggcugugugauugccuggaacagcaacaaccuggacuccaaagucggcggcaacuacaauuaccuguaccggcuguuccggaaguccaaucugaagcccuucgagcgggacaucagcaccgaaaucuaucaggccggcagcaccccuugcaacggcguggaaggcuucaacugcuacuucccacugcaguccuacggcuuucagcccacaaauggcgugggcuaucagcccuacagagugguggugcugagcuucgaacugcugcaugcuccugccacagugugcggcccuaagaaaagcaccaaucucgugaagaacaaaugcgugaacuucaacuucaacggccugaccggcaccggcgugcugacagagagcaacaagaaguuccugccauuccagcaguuuggccgggauaucgccgauaccacagacgccguuagagauccccagacacuggaaauccuggacaucaccccaugcagcuucggcggagugucugugaucaccccuggcaccaacaccagcaaucagguggcagugcuguaccaggacgugaacuguaccgaagugcccguggccauucacgccgaucagcugacaccuacauggcggguguacuccaccggcagcaauguguuucagaccagagccggcugucugaucggagccgagcacgugaacaauagcuacgagugcgacauccccaucggcgcuggcaucugugccagcuaccagacacagacaaacagccccagacgggcuagaagcguggccagccagagcaucauugccuacacaaugucucugggcgccgagaacagcguggccuacuccaacaacucuaucgcuauccccaccaacuucaccaucagcgugaccaccgagauccugccuguguccaugaccaagaccagcguggacugcaccauguacaucugcggcgauuccaccgagugcuccaaccugcugcugcaguacggcagcuucugcacccagcugaauagagcccugacagggaucgccguggaacaggacaagaacacccaagagguguucgcccaagugaagcaaaucuacaagaccccuccuaucaaggacuucggcggcuucaauuucagccagauucugcccgauccuagcaagcccagcaagcggagcuucaucgaggaccugcuguucaacaaagugacacuggccgacgccggcuucaucaagcaguauggcgauugucugggcgacauugccgccagggaucugauuugcgcccagaaguuuaacggacugacagugcugccuccucugcugaccgaugagaugaucgcccaguacacaucugcccugcuggccggcacaaucacaagcggcuggacauuuggagcuggcgccgcucugcagauccccuuugcuaugcagauggccuaccgguucaacggcaucggagugacccagaaugugcuguacgagaaccagaagcugaucgccaaccaguucaacagcgccaucggcaagauccaggacagccugagcagcacagcaagcgcccugggaaagcugcaggacguggucaaccagaaugcccaggcacugaacacccuggucaagcagcuguccuccaacuucggcgccaucagcucugugcugaacgauauccugagcagacuggacccuccugaggccgaggugcagaucgacagacugaucacaggcagacugcagagccuccagacauacgugacccagcagcugaucagagccgccgagauuagagccucugccaaucuggccgccaccaagaugucugagugugugcugggccagagcaagagaguggacuuuugcggcaagggcuaccaccugaugagcuucccucagucugccccucacggcgugguguuucugcacgugacauauguguucgcucaagagaagaauuucaccaccgcuccagccaucugccacgacggcaaagcccacuuuccuagagaaggcguguucguguccaacggcacccauugguucgugacacagcggaacuucuacgagccccagaucaucaccaccgacaacaccuucgugucuggcaacugcgacguugugaucggcauugugaacaauaccguguacgacccucugcagcccgagcuggacagcuucaaagaggaacuggacaaguacuuuaagaaccacacaagccccgacguggaccugggcgauaucagcggaaucaaugccagcgucgugaacauccagaaagagaucgaccggcugaacgagguggccaagaaucugaacgagagccugaucgaccugcaagaacuggggaaguacgagcaguacaucaagggaggcggaggaucugacaucaucaagcugcugaacgagcaagugaacaaagagaugcagagcagcaaccuguacaugagcaugagcagcuggugcuacacccacagccuugauggcgccggacuguuccuguuugaucacgccgccgaggaauacgagcacgccaagaagcugaucaucuuccugaacgagaacaacgugcccgugcagcugaccagcauuucugccccugagcacaaguucgagggccugacacagaucuuccagaaggccuacgaacacgagcagcacaucagcgagagcaucaacaacaucguggaccacgccauuaagagcaaggaucacgccaccuucaacuuucugcagugguacguggccgaacagcacgaggaagaggugcuguucaaggacauccuggacaagaucgagcugaucggcaacgagaaccacggccuguaucuggccgaccaguacgugaagggaaucgccaagagcagaaagagcuga

SEQ ID NO: 12103 - RNA, 4140 nt, Artificial Sequence
  SARS-CoV-2/Wuhan/WIV05/2019__EPI_ISL_402128 spike protein CDS gc mod (1-1211)(K986P_V987P_ H1048Q_H1064N_ H1083N_H1101N) Ferritin construct
auguucguguuucuggugcugcugccccugguguccagccagugugugaaccugaccaccagaacacagcugccuccagccuacaccaacagcuucaccagaggcguguacuaccccgacaagguguucagauccagcgugcugcacucuacccaggaccuguuccugccuuucuucagcaacgugaccugguuccacgccauccacguguccggcaccaauggcaccaagagauucgacaaccccgugcugcccuucaacgacgggguguacuuugccagcaccgagaaguccaacaucaucagaggcuggaucuucggcaccacacuggacagcaagacccagagccugcugaucgugaacaacgccaccaacguggucaucaaagugugcgaguuccaguucugcaacgaccccuuccugggcgucuacuaccacaagaacaacaagagcuggauggaaagcgaguuccggguguacagcagcgccaacaacugcaccuucgaguacgugucccagccuuuccugauggaccuggaaggcaagcagggcaacuucaagaaccugcgcgaguucguguucaagaacaucgacggcuacuucaaaaucuacagcaagcacaccccuaucaaccucgugcgggaucugccucagggcuucucugcucuggaaccccugguggaucugcccaucggcaucaacaucacccgguuucagacacugcuggcccugcacagaagcuaccugacaccuggcgauagcagcagcggauggacagcuggugccgccgcuuacuaugugggcuaccugcagccuagaaccuuccugcugaaguacaacgagaacggcaccaucaccgacgccguggauugugcucuggauccucugagcgagacaaagugcacccugaaguccuucaccguggaaaagggcaucuaccagaccagcaacuuccgggugcagcccaccgaauccaucgugcgguuccccaauaucaccaaucugugccccuucggcgagguguucaaugccaccagauucgccucuguguacgccuggaaccggaagcggaucagcaauugcguggccgacuacuccgugcuguacaacuccgccagcuucagcaccuucaagugcuacggcguguccccuaccaagcugaacgaccugugcuucacaaacguguacgccgacagcuucgugauccggggagaugaagugcggcagauugccccuggacagacaggcaagaucgccgacuacaacuacaagcugcccgacgacuucaccggcugugugauugccuggaacagcaacaaccuggacuccaaagucggcggcaacuacaauuaccuguaccggcuguuccggaaguccaaucugaagcccuucgagcgggacaucagcaccgaaaucuaucaggccggcagcaccccuugcaacggcguggaaggcuucaacugcuacuucccacugcaguccuacggcuuucagcccacaaauggcgugggcuaucagcccuacagagugguggugcugagcuucgaacugcugcaugcuccugccacagugugcggcccuaagaaaagcaccaaucucgugaagaacaaaugcgugaacuucaacuucaacggccugaccggcaccggcgugcugacagagagcaacaagaaguuccugccauuccagcaguuuggccgggauaucgccgauaccacagacgccguuagagauccccagacacuggaaauccuggacaucaccccaugcagcuucggcggagugucugugaucaccccuggcaccaacaccagcaaucagguggcagugcuguaccaggacgugaacuguaccgaagugcccguggccauucacgccgaucagcugacaccuacauggcggguguacuccaccggcagcaauguguuucagaccagagccggcugucugaucggagccgagcacgugaacaauagcuacgagugcgacauccccaucggcgcuggcaucugugccagcuaccagacacagacaaacagccccagacgggcuagaagcguggccagccagagcaucauugccuacacaaugucucugggcgccgagaacagcguggccuacuccaacaacucuaucgcuauccccaccaacuucaccaucagcgugaccaccgagauccugccuguguccaugaccaagaccagcguggacugcaccauguacaucugcggcgauuccaccgagugcuccaaccugcugcugcaguacggcagcuucugcacccagcugaauagagcccugacagggaucgccguggaacaggacaagaacacccaagagguguucgcccaagugaagcaaaucuacaagaccccuccuaucaaggacuucggcggcuucaauuucagccagauucugcccgauccuagcaagcccagcaagcggagcuucaucgaggaccugcuguucaacaaagugacacuggccgacgccggcuucaucaagcaguauggcgauugucugggcgacauugccgccagggaucugauuugcgcccagaaguuuaacggacugacagugcugccuccucugcugaccgaugagaugaucgcccaguacacaucugcccugcuggccggcacaaucacaagcggcuggacauuuggagcuggcgccgcucugcagauccccuuugcuaugcagauggccuaccgguucaacggcaucggagugacccagaaugugcuguacgagaaccagaagcugaucgccaaccaguucaacagcgccaucggcaagauccaggacagccugagcagcacagcaagcgcccugggaaagcugcaggacguggucaaccagaaugcccaggcacugaacacccuggucaagcagcuguccuccaacuucggcgccaucagcucugugcugaacgauauccugagcagacuggacccuccugaggccgaggugcagaucgacagacugaucacaggcagacugcagagccuccagacauacgugacccagcagcugaucagagccgccgagauuagagccucugccaaucuggccgccaccaagaugucugagugugugcugggccagagcaagagaguggacuuuugcggcaagggcuaccagcugaugagcuucccucagucugccccucacggcgugguguuucugaacgugacauaugugcccgcucaagagaagaauuucaccaccgcuccagccaucugcaacgacggcaaagcccacuuuccuagagaaggcguguucguguccaacggcaccaacugguucgugacacagcggaacuucuacgagccccagaucaucaccaccgacaacaccuucgugucuggcaacugcgacguugugaucggcauugugaacaauaccguguacgacccucugcagcccgagcuggacagcuucaaagaggaacuggacaaguacuuuaagaaccacacaagccccgacguggaccugggcgauaucagcggaaucaaugccagcgucgugaacauccagaaagagaucgaccggcugaacgagguggccaagaaucugaacgagagccugaucgaccugcaagaacuggggaaguacgagcaguacaucaagggaggcggaggaucugacaucaucaagcugcugaacgagcaagugaacaaagagaugcagagcagcaaccuguacaugagcaugagcagcuggugcuacacccacagccuugauggcgccggacuguuccuguuugaucacgccgccgaggaauacgagcacgccaagaagcugaucaucuuccugaacgagaacaacgugcccgugcagcugaccagcauuucugccccugagcacaaguucgagggccugacacagaucuuccagaaggccuacgaacacgagcagcacaucagcgagagcaucaacaacaucguggaccacgccauuaagagcaaggaucacgccaccuucaacuuucugcagugguacguggccgaacagcacgaggaagaggugcuguucaaggacauccuggacaagaucgagcugaucggcaacgagaaccacggccuguaucuggccgaccaguacgugaagggaaucgccaagagcagaaagagcuga

SEQ ID NO: 12104 - RNA, 4140 nt, Artificial Sequence
  SARS-CoV-2/Wuhan/WIV05/2019__EPI_ISL_402128 spike protein CDS gc mod (1-1211)(I712C_T1077C) Ferritin construct
auguucguguuucuggugcugcugccccugguguccagccagugugugaaccugaccaccagaacacagcugccuccagccuacaccaacagcuucaccagaggcguguacuaccccgacaagguguucagauccagcgugcugcacucuacccaggaccuguuccugccuuucuucagcaacgugaccugguuccacgccauccacguguccggcaccaauggcaccaagagauucgacaaccccgugcugcccuucaacgacgggguguacuuugccagcaccgagaaguccaacaucaucagaggcuggaucuucggcaccacacuggacagcaagacccagagccugcugaucgugaacaacgccaccaacguggucaucaaagugugcgaguuccaguucugcaacgaccccuuccugggcgucuacuaccacaagaacaacaagagcuggauggaaagcgaguuccggguguacagcagcgccaacaacugcaccuucgaguacgugucccagccuuuccugauggaccuggaaggcaagcagggcaacuucaagaaccugcgcgaguucguguucaagaacaucgacggcuacuucaaaaucuacagcaagcacaccccuaucaaccucgugcgggaucugccucagggcuucucugcucuggaaccccugguggaucugcccaucggcaucaacaucacccgguuucagacacugcuggcccugcacagaagcuaccugacaccuggcgauagcagcagcggauggacagcuggugccgccgcuuacuaugugggcuaccugcagccuagaaccuuccugcugaaguacaacgagaacggcaccaucaccgacgccguggauugugcucuggauccucugagcgagacaaagugcacccugaaguccuucaccguggaaaagggcaucuaccagaccagcaacuuccgggugcagcccaccgaauccaucgugcgguuccccaauaucaccaaucugugccccuucggcgagguguucaaugccaccagauucgccucuguguacgccuggaaccggaagcggaucagcaauugcguggccgacuacuccgugcuguacaacuccgccagcuucagcaccuucaagugcuacggcguguccccuaccaagcugaacgaccugugcuucacaaacguguacgccgacagcuucgugauccggggagaugaagugcggcagauugccccuggacagacaggcaagaucgccgacuacaacuacaagcugcccgacgacuucaccggcugugugauugccuggaacagcaacaaccuggacuccaaagucggcggcaacuacaauuaccuguaccggcuguuccggaaguccaaucugaagcccuucgagcgggacaucagcaccgaaaucuaucaggccggcagcaccccuugcaacggcguggaaggcuucaacugcuacuucccacugcaguccuacggcuuucagcccacaaauggcgugggcuaucagcccuacagagugguggugcugagcuucgaacugcugcaugcuccugccacagugugcggcccuaagaaaagcaccaaucucgugaagaacaaaugcgugaacuucaacuucaacggccugaccggcaccggcgugcugacagagagcaacaagaaguuccugccauuccagcaguuuggccgggauaucgccgauaccacagacgccguuagagauccccagacacuggaaauccuggacaucaccccaugcagcuucggcggagugucugugaucaccccuggcaccaacaccagcaaucagguggcagugcuguaccaggacgugaacuguaccgaagugcccguggccauucacgccgaucagcugacaccuacauggcggguguacuccaccggcagcaauguguuucagaccagagccggcugucugaucggagccgagcacgugaacaauagcuacgagugcgacauccccaucggcgcuggcaucugugccagcuaccagacacagacaaacagccccagacgggcuagaagcguggccagccagagcaucauugccuacacaaugucucugggcgccgagaacagcguggccuacuccaacaacucuugcgcuauccccaccaacuucaccaucagcgugaccaccgagauccugccuguguccaugaccaagaccagcguggacugcaccauguacaucugcggcgauuccaccgagugcuccaaccugcugcugcaguacggcagcuucugcacccagcugaauagagcccugacagggaucgccguggaacaggacaagaacacccaagagguguucgcccaagugaagcaaaucuacaagaccccuccuaucaaggacuucggcggcuucaauuucagccagauucugcccgauccuagcaagcccagcaagcggagcuucaucgaggaccugcuguucaacaaagugacacuggccgacgccggcuucaucaagcaguauggcgauugucugggcgacauugccgccagggaucugauuugcgcccagaaguuuaacggacugacagugcugccuccucugcugaccgaugagaugaucgcccaguacacaucugcccugcuggccggcacaaucacaagcggcuggacauuuggagcuggcgccgcucugcagauccccuuugcuaugcagauggccuaccgguucaacggcaucggagugacccagaaugugcuguacgagaaccagaagcugaucgccaaccaguucaacagcgccaucggcaagauccaggacagccugagcagcacagcaagcgcccugggaaagcugcaggacguggucaaccagaaugcccaggcacugaacacccuggucaagcagcuguccuccaacuucggcgccaucagcucugugcugaacgauauccugagcagacuggacaaggucgaggccgaggugcagaucgacagacugaucacaggcagacugcagagccuccagacauacgugacccagcagcugaucagagccgccgagauuagagccucugccaaucuggccgccaccaagaugucugagugugugcugggccagagcaagagaguggacuuuugcggcaagggcuaccaccugaugagcuucccucagucugccccucacggcgugguguuucugcacgugacauaugugcccgcucaagagaagaauuucaccugugcuccagccaucugccacgacggcaaagcccacuuuccuagagaaggcguguucguguccaacggcacccauugguucgugacacagcggaacuucuacgagccccagaucaucaccaccgacaacaccuucgugucuggcaacugcgacguugugaucggcauugugaacaauaccguguacgacccucugcagcccgagcuggacagcuucaaagaggaacuggacaaguacuuuaagaaccacacaagccccgacguggaccugggcgauaucagcggaaucaaugccagcgucgugaacauccagaaagagaucgaccggcugaacgagguggccaagaaucugaacgagagccugaucgaccugcaagaacuggggaaguacgagcaguacaucaagggaggcggaggaucugacaucaucaagcugcugaacgagcaagugaacaaagagaugcagagcagcaaccuguacaugagcaugagcagcuggugcuacacccacagccuugauggcgccggacuguuccuguuugaucacgccgccgaggaauacgagcacgccaagaagcugaucaucuuccugaacgagaacaacgugcccgugcagcugaccagcauuucugccccugagcacaaguucgagggccugacacagaucuuccagaaggccuacgaacacgagcagcacaucagcgagagcaucaacaacaucguggaccacgccauuaagagcaaggaucacgccaccuucaacuuucugcagugguacguggccgaacagcacgaggaagaggugcuguucaaggacauccuggacaagaucgagcugaucggcaacgagaaccacggccuguaucuggccgaccaguacgugaagggaaucgccaagagcagaaagagcuga

SEQ ID NO: 12105 - RNA, 4140 nt, Artificial Sequence
  SARS-CoV-2/Wuhan/WIV05/2019__EPI_ISL_402128 spike protein CDS gc mod (1-1211)(I714C_Y1110C) Ferritin construct
auguucguguuucuggugcugcugccccugguguccagccagugugugaaccugaccaccagaacacagcugccuccagccuacaccaacagcuucaccagaggcguguacuaccccgacaagguguucagauccagcgugcugcacucuacccaggaccuguuccugccuuucuucagcaacgugaccugguuccacgccauccacguguccggcaccaauggcaccaagagauucgacaaccccgugcugcccuucaacgacgggguguacuuugccagcaccgagaaguccaacaucaucagaggcuggaucuucggcaccacacuggacagcaagacccagagccugcugaucgugaacaacgccaccaacguggucaucaaagugugcgaguuccaguucugcaacgaccccuuccugggcgucuacuaccacaagaacaacaagagcuggauggaaagcgaguuccggguguacagcagcgccaacaacugcaccuucgaguacgugucccagccuuuccugauggaccuggaaggcaagcagggcaacuucaagaaccugcgcgaguucguguucaagaacaucgacggcuacuucaaaaucuacagcaagcacaccccuaucaaccucgugcgggaucugccucagggcuucucugcucuggaaccccugguggaucugcccaucggcaucaacaucacccgguuucagacacugcuggcccugcacagaagcuaccugacaccuggcgauagcagcagcggauggacagcuggugccgccgcuuacuaugugggcuaccugcagccuagaaccuuccugcugaaguacaacgagaacggcaccaucaccgacgccguggauugugcucuggauccucugagcgagacaaagugcacccugaaguccuucaccguggaaaagggcaucuaccagaccagcaacuuccgggugcagcccaccgaauccaucgugcgguuccccaauaucaccaaucugugccccuucggcgagguguucaaugccaccagauucgccucuguguacgccuggaaccggaagcggaucagcaauugcguggccgacuacuccgugcuguacaacuccgccagcuucagcaccuucaagugcuacggcguguccccuaccaagcugaacgaccugugcuucacaaacguguacgccgacagcuucgugauccggggagaugaagugcggcagauugccccuggacagacaggcaagaucgccgacuacaacuacaagcugcccgacgacuucaccggcugugugauugccuggaacagcaacaaccuggacuccaaagucggcggcaacuacaauuaccuguaccggcuguuccggaaguccaaucugaagcccuucgagcgggacaucagcaccgaaaucuaucaggccggcagcaccccuugcaacggcguggaaggcuucaacugcuacuucccacugcaguccuacggcuuucagcccacaaauggcgugggcuaucagcccuacagagugguggugcugagcuucgaacugcugcaugcuccugccacagugugcggcccuaagaaaagcaccaaucucgugaagaacaaaugcgugaacuucaacuucaacggccugaccggcaccggcgugcugacagagagcaacaagaaguuccugccauuccagcaguuuggccgggauaucgccgauaccacagacgccguuagagauccccagacacuggaaauccuggacaucaccccaugcagcuucggcggagugucugugaucaccccuggcaccaacaccagcaaucagguggcagugcuguaccaggacgugaacuguaccgaagugcccguggccauucacgccgaucagcugacaccuacauggcggguguacuccaccggcagcaauguguuucagaccagagccggcugucugaucggagccgagcacgugaacaauagcuacgagugcgacauccccaucggcgcuggcaucugugccagcuaccagacacagacaaacagccccagacgggcuagaagcguggccagccagagcaucauugccuacacaaugucucugggcgccgagaacagcguggccuacuccaacaacucuaucgcuugccccaccaacuucaccaucagcgugaccaccgagauccugccuguguccaugaccaagaccagcguggacugcaccauguacaucugcggcgauuccaccgagugcuccaaccugcugcugcaguacggcagcuucugcacccagcugaauagagcccugacagggaucgccguggaacaggacaagaacacccaagagguguucgcccaagugaagcaaaucuacaagaccccuccuaucaaggacuucggcggcuucaauuucagccagauucugcccgauccuagcaagcccagcaagcggagcuucaucgaggaccugcuguucaacaaagugacacuggccgacgccggcuucaucaagcaguauggcgauugucugggcgacauugccgccagggaucugauuugcgcccagaaguuuaacggacugacagugcugccuccucugcugaccgaugagaugaucgcccaguacacaucugcccugcuggccggcacaaucacaagcggcuggacauuuggagcuggcgccgcucugcagauccccuuugcuaugcagauggccuaccgguucaacggcaucggagugacccagaaugugcuguacgagaaccagaagcugaucgccaaccaguucaacagcgccaucggcaagauccaggacagccugagcagcacagcaagcgcccugggaaagcugcaggacguggucaaccagaaugcccaggcacugaacacccuggucaagcagcuguccuccaacuucggcgccaucagcucugugcugaacgauauccugagcagacuggacaaggucgaggccgaggugcagaucgacagacugaucacaggcagacugcagagccuccagacauacgugacccagcagcugaucagagccgccgagauuagagccucugccaaucuggccgccaccaagaugucugagugugugcugggccagagcaagagaguggacuuuugcggcaagggcuaccaccugaugagcuucccucagucugccccucacggcgugguguuucugcacgugacauaugugcccgcucaagagaagaauuucaccaccgcuccagccaucugccacgacggcaaagcccacuuuccuagagaaggcguguucguguccaacggcacccauugguucgugacacagcggaacuucugugagccccagaucaucaccaccgacaacaccuucgugucuggcaacugcgacguugugaucggcauugugaacaauaccguguacgacccucugcagcccgagcuggacagcuucaaagaggaacuggacaaguacuuuaagaaccacacaagccccgacguggaccugggcgauaucagcggaaucaaugccagcgucgugaacauccagaaagagaucgaccggcugaacgagguggccaagaaucugaacgagagccugaucgaccugcaagaacuggggaaguacgagcaguacaucaagggaggcggaggaucugacaucaucaagcugcugaacgagcaagugaacaaagagaugcagagcagcaaccuguacaugagcaugagcagcuggugcuacacccacagccuugauggcgccggacuguuccuguuugaucacgccgccgaggaauacgagcacgccaagaagcugaucaucuuccugaacgagaacaacgugcccgugcagcugaccagcauuucugccccugagcacaaguucgagggccugacacagaucuuccagaaggccuacgaacacgagcagcacaucagcgagagcaucaacaacaucguggaccacgccauuaagagcaaggaucacgccaccuucaacuuucugcagugguacguggccgaacagcacgaggaagaggugcuguucaaggacauccuggacaagaucgagcugaucggcaacgagaaccacggccuguaucuggccgaccaguacgugaagggaaucgccaagagcagaaagagcuga

SEQ ID NO: 12106 - RNA, 4140 nt, Artificial Sequence
  SARS-CoV-2/Wuhan/WIV05/2019__EPI_ISL_402128 spike protein CDS gc mod (1-1211)(P715C_P1069C) Ferritin construct
auguucguguuucuggugcugcugccccugguguccagccagugugugaaccugaccaccagaacacagcugccuccagccuacaccaacagcuucaccagaggcguguacuaccccgacaagguguucagauccagcgugcugcacucuacccaggaccuguuccugccuuucuucagcaacgugaccugguuccacgccauccacguguccggcaccaauggcaccaagagauucgacaaccccgugcugcccuucaacgacgggguguacuuugccagcaccgagaaguccaacaucaucagaggcuggaucuucggcaccacacuggacagcaagacccagagccugcugaucgugaacaacgccaccaacguggucaucaaagugugcgaguuccaguucugcaacgaccccuuccugggcgucuacuaccacaagaacaacaagagcuggauggaaagcgaguuccggguguacagcagcgccaacaacugcaccuucgaguacgugucccagccuuuccugauggaccuggaaggcaagcagggcaacuucaagaaccugcgcgaguucguguucaagaacaucgacggcuacuucaaaaucuacagcaagcacaccccuaucaaccucgugcgggaucugccucagggcuucucugcucuggaaccccugguggaucugcccaucggcaucaacaucacccgguuucagacacugcuggcccugcacagaagcuaccugacaccuggcgauagcagcagcggauggacagcuggugccgccgcuuacuaugugggcuaccugcagccuagaaccuuccugcugaaguacaacgagaacggcaccaucaccgacgccguggauugugcucuggauccucugagcgagacaaagugcacccugaaguccuucaccguggaaaagggcaucuaccagaccagcaacuuccgggugcagcccaccgaauccaucgugcgguuccccaauaucaccaaucugugccccuucggcgagguguucaaugccaccagauucgccucuguguacgccuggaaccggaagcggaucagcaauugcguggccgacuacuccgugcuguacaacuccgccagcuucagcaccuucaagugcuacggcguguccccuaccaagcugaacgaccugugcuucacaaacguguacgccgacagcuucgugauccggggagaugaagugcggcagauugccccuggacagacaggcaagaucgccgacuacaacuacaagcugcccgacgacuucaccggcugugugauugccuggaacagcaacaaccuggacuccaaagucggcggcaacuacaauuaccuguaccggcuguuccggaaguccaaucugaagcccuucgagcgggacaucagcaccgaaaucuaucaggccggcagcaccccuugcaacggcguggaaggcuucaacugcuacuucccacugcaguccuacggcuuucagcccacaaauggcgugggcuaucagcccuacagagugguggugcugagcuucgaacugcugcaugcuccugccacagugugcggcccuaagaaaagcaccaaucucgugaagaacaaaugcgugaacuucaacuucaacggccugaccggcaccggcgugcugacagagagcaacaagaaguuccugccauuccagcaguuuggccgggauaucgccgauaccacagacgccguuagagauccccagacacuggaaauccuggacaucaccccaugcagcuucggcggagugucugugaucaccccuggcaccaacaccagcaaucagguggcagugcuguaccaggacgugaacuguaccgaagugcccguggccauucacgccgaucagcugacaccuacauggcggguguacuccaccggcagcaauguguuucagaccagagccggcugucugaucggagccgagcacgugaacaauagcuacgagugcgacauccccaucggcgcuggcaucugugccagcuaccagacacagacaaacagccccagacgggcuagaagcguggccagccagagcaucauugccuacacaaugucucugggcgccgagaacagcguggccuacuccaacaacucuaucgcuaucugcaccaacuucaccaucagcgugaccaccgagauccugccuguguccaugaccaagaccagcguggacugcaccauguacaucugcggcgauuccaccgagugcuccaaccugcugcugcaguacggcagcuucugcacccagcugaauagagcccugacagggaucgccguggaacaggacaagaacacccaagagguguucgcccaagugaagcaaaucuacaagaccccuccuaucaaggacuucggcggcuucaauuucagccagauucugcccgauccuagcaagcccagcaagcggagcuucaucgaggaccugcuguucaacaaagugacacuggccgacgccggcuucaucaagcaguauggcgauugucugggcgacauugccgccagggaucugauuugcgcccagaaguuuaacggacugacagugcugccuccucugcugaccgaugagaugaucgcccaguacacaucugcccugcuggccggcacaaucacaagcggcuggacauuuggagcuggcgccgcucugcagauccccuuugcuaugcagauggccuaccgguucaacggcaucggagugacccagaaugugcuguacgagaaccagaagcugaucgccaaccaguucaacagcgccaucggcaagauccaggacagccugagcagcacagcaagcgcccugggaaagcugcaggacguggucaaccagaaugcccaggcacugaacacccuggucaagcagcuguccuccaacuucggcgccaucagcucugugcugaacgauauccugagcagacuggacaaggucgaggccgaggugcagaucgacagacugaucacaggcagacugcagagccuccagacauacgugacccagcagcugaucagagccgccgagauuagagccucugccaaucuggccgccaccaagaugucugagugugugcugggccagagcaagagaguggacuuuugcggcaagggcuaccaccugaugagcuucccucagucugccccucacggcgugguguuucugcacgugacauaugugugugcucaagagaagaauuucaccaccgcuccagccaucugccacgacggcaaagcccacuuuccuagagaaggcguguucguguccaacggcacccauugguucgugacacagcggaacuucuacgagccccagaucaucaccaccgacaacaccuucgugucuggcaacugcgacguugugaucggcauugugaacaauaccguguacgacccucugcagcccgagcuggacagcuucaaagaggaacuggacaaguacuuuaagaaccacacaagccccgacguggaccugggcgauaucagcggaaucaaugccagcgucgugaacauccagaaagagaucgaccggcugaacgagguggccaagaaucugaacgagagccugaucgaccugcaagaacuggggaaguacgagcaguacaucaagggaggcggaggaucugacaucaucaagcugcugaacgagcaagugaacaaagagaugcagagcagcaaccuguacaugagcaugagcagcuggugcuacacccacagccuugauggcgccggacuguuccuguuugaucacgccgccgaggaauacgagcacgccaagaagcugaucaucuuccugaacgagaacaacgugcccgugcagcugaccagcauuucugccccugagcacaaguucgagggccugacacagaucuuccagaaggccuacgaacacgagcagcacaucagcgagagcaucaacaacaucguggaccacgccauuaagagcaaggaucacgccaccuucaacuuucugcagugguacguggccgaacagcacgaggaagaggugcuguucaaggacauccuggacaagaucgagcugaucggcaacgagaaccacggccuguaucuggccgaccaguacgugaagggaaucgccaagagcagaaagagcuga

SEQ ID NO: 12107 - RNA, 4140 nt, Artificial Sequence
  SARS-CoV-2/Wuhan/WIV05/2019__EPI_ISL_402128 spike protein CDS gc mod (1-1211)(G889C_L1034C) Ferritin construct
auguucguguuucuggugcugcugccccugguguccagccagugugugaaccugaccaccagaacacagcugccuccagccuacaccaacagcuucaccagaggcguguacuaccccgacaagguguucagauccagcgugcugcacucuacccaggaccuguuccugccuuucuucagcaacgugaccugguuccacgccauccacguguccggcaccaauggcaccaagagauucgacaaccccgugcugcccuucaacgacgggguguacuuugccagcaccgagaaguccaacaucaucagaggcuggaucuucggcaccacacuggacagcaagacccagagccugcugaucgugaacaacgccaccaacguggucaucaaagugugcgaguuccaguucugcaacgaccccuuccugggcgucuacuaccacaagaacaacaagagcuggauggaaagcgaguuccggguguacagcagcgccaacaacugcaccuucgaguacgugucccagccuuuccugauggaccuggaaggcaagcagggcaacuucaagaaccugcgcgaguucguguucaagaacaucgacggcuacuucaaaaucuacagcaagcacaccccuaucaaccucgugcgggaucugccucagggcuucucugcucuggaaccccugguggaucugcccaucggcaucaacaucacccgguuucagacacugcuggcccugcacagaagcuaccugacaccuggcgauagcagcagcggauggacagcuggugccgccgcuuacuaugugggcuaccugcagccuagaaccuuccugcugaaguacaacgagaacggcaccaucaccgacgccguggauugugcucuggauccucugagcgagacaaagugcacccugaaguccuucaccguggaaaagggcaucuaccagaccagcaacuuccgggugcagcccaccgaauccaucgugcgguuccccaauaucaccaaucugugccccuucggcgagguguucaaugccaccagauucgccucuguguacgccuggaaccggaagcggaucagcaauugcguggccgacuacuccgugcuguacaacuccgccagcuucagcaccuucaagugcuacggcguguccccuaccaagcugaacgaccugugcuucacaaacguguacgccgacagcuucgugauccggggagaugaagugcggcagauugccccuggacagacaggcaagaucgccgacuacaacuacaagcugcccgacgacuucaccggcugugugauugccuggaacagcaacaaccuggacuccaaagucggcggcaacuacaauuaccuguaccggcuguuccggaaguccaaucugaagcccuucgagcgggacaucagcaccgaaaucuaucaggccggcagcaccccuugcaacggcguggaaggcuucaacugcuacuucccacugcaguccuacggcuuucagcccacaaauggcgugggcuaucagcccuacagagugguggugcugagcuucgaacugcugcaugcuccugccacagugugcggcccuaagaaaagcaccaaucucgugaagaacaaaugcgugaacuucaacuucaacggccugaccggcaccggcgugcugacagagagcaacaagaaguuccugccauuccagcaguuuggccgggauaucgccgauaccacagacgccguuagagauccccagacacuggaaauccuggacaucaccccaugcagcuucggcggagugucugugaucaccccuggcaccaacaccagcaaucagguggcagugcuguaccaggacgugaacuguaccgaagugcccguggccauucacgccgaucagcugacaccuacauggcggguguacuccaccggcagcaauguguuucagaccagagccggcugucugaucggagccgagcacgugaacaauagcuacgagugcgacauccccaucggcgcuggcaucugugccagcuaccagacacagacaaacagccccagacgggcuagaagcguggccagccagagcaucauugccuacacaaugucucugggcgccgagaacagcguggccuacuccaacaacucuaucgcuauccccaccaacuucaccaucagcgugaccaccgagauccugccuguguccaugaccaagaccagcguggacugcaccauguacaucugcggcgauuccaccgagugcuccaaccugcugcugcaguacggcagcuucugcacccagcugaauagagcccugacagggaucgccguggaacaggacaagaacacccaagagguguucgcccaagugaagcaaaucuacaagaccccuccuaucaaggacuucggcggcuucaauuucagccagauucugcccgauccuagcaagcccagcaagcggagcuucaucgaggaccugcuguucaacaaagugacacuggccgacgccggcuucaucaagcaguauggcgauugucugggcgacauugccgccagggaucugauuugcgcccagaaguuuaacggacugacagugcugccuccucugcugaccgaugagaugaucgcccaguacacaucugcccugcuggccggcacaaucacaagcggcuggacauuuugcgcuggcgccgcucugcagauccccuuugcuaugcagauggccuaccgguucaacggcaucggagugacccagaaugugcuguacgagaaccagaagcugaucgccaaccaguucaacagcgccaucggcaagauccaggacagccugagcagcacagcaagcgcccugggaaagcugcaggacguggucaaccagaaugcccaggcacugaacacccuggucaagcagcuguccuccaacuucggcgccaucagcucugugcugaacgauauccugagcagacuggacaaggucgaggccgaggugcagaucgacagacugaucacaggcagacugcagagccuccagacauacgugacccagcagcugaucagagccgccgagauuagagccucugccaaucuggccgccaccaagaugucugaguguguguguggccagagcaagagaguggacuuuugcggcaagggcuaccaccugaugagcuucccucagucugccccucacggcgugguguuucugcacgugacauaugugcccgcucaagagaagaauuucaccaccgcuccagccaucugccacgacggcaaagcccacuuuccuagagaaggcguguucguguccaacggcacccauugguucgugacacagcggaacuucuacgagccccagaucaucaccaccgacaacaccuucgugucuggcaacugcgacguugugaucggcauugugaacaauaccguguacgacccucugcagcccgagcuggacagcuucaaagaggaacuggacaaguacuuuaagaaccacacaagccccgacguggaccugggcgauaucagcggaaucaaugccagcgucgugaacauccagaaagagaucgaccggcugaacgagguggccaagaaucugaacgagagccugaucgaccugcaagaacuggggaaguacgagcaguacaucaagggaggcggaggaucugacaucaucaagcugcugaacgagcaagugaacaaagagaugcagagcagcaaccuguacaugagcaugagcagcuggugcuacacccacagccuugauggcgccggacuguuccuguuugaucacgccgccgaggaauacgagcacgccaagaagcugaucaucuuccugaacgagaacaacgugcccgugcagcugaccagcauuucugccccugagcacaaguucgagggccugacacagaucuuccagaaggccuacgaacacgagcagcacaucagcgagagcaucaacaacaucguggaccacgccauuaagagcaaggaucacgccaccuucaacuuucugcagugguacguggccgaacagcacgaggaagaggugcuguucaaggacauccuggacaagaucgagcugaucggcaacgagaaccacggccuguaucuggccgaccaguacgugaagggaaucgccaagagcagaaagagcuga

SEQ ID NO: 12108 - RNA, 4140 nt, Artificial Sequence
  SARS-CoV-2/Wuhan/WIV05/2019__EPI_ISL_402128 spike protein CDS gc mod (1-1211)(I909C_Y1047C) Ferritin construct
auguucguguuucuggugcugcugccccugguguccagccagugugugaaccugaccaccagaacacagcugccuccagccuacaccaacagcuucaccagaggcguguacuaccccgacaagguguucagauccagcgugcugcacucuacccaggaccuguuccugccuuucuucagcaacgugaccugguuccacgccauccacguguccggcaccaauggcaccaagagauucgacaaccccgugcugcccuucaacgacgggguguacuuugccagcaccgagaaguccaacaucaucagaggcuggaucuucggcaccacacuggacagcaagacccagagccugcugaucgugaacaacgccaccaacguggucaucaaagugugcgaguuccaguucugcaacgaccccuuccugggcgucuacuaccacaagaacaacaagagcuggauggaaagcgaguuccggguguacagcagcgccaacaacugcaccuucgaguacgugucccagccuuuccugauggaccuggaaggcaagcagggcaacuucaagaaccugcgcgaguucguguucaagaacaucgacggcuacuucaaaaucuacagcaagcacaccccuaucaaccucgugcgggaucugccucagggcuucucugcucuggaaccccugguggaucugcccaucggcaucaacaucacccgguuucagacacugcuggcccugcacagaagcuaccugacaccuggcgauagcagcagcggauggacagcuggugccgccgcuuacuaugugggcuaccugcagccuagaaccuuccugcugaaguacaacgagaacggcaccaucaccgacgccguggauugugcucuggauccucugagcgagacaaagugcacccugaaguccuucaccguggaaaagggcaucuaccagaccagcaacuuccgggugcagcccaccgaauccaucgugcgguuccccaauaucaccaaucugugccccuucggcgagguguucaaugccaccagauucgccucuguguacgccuggaaccggaagcggaucagcaauugcguggccgacuacuccgugcuguacaacuccgccagcuucagcaccuucaagugcuacggcguguccccuaccaagcugaacgaccugugcuucacaaacguguacgccgacagcuucgugauccggggagaugaagugcggcagauugccccuggacagacaggcaagaucgccgacuacaacuacaagcugcccgacgacuucaccggcugugugauugccuggaacagcaacaaccuggacuccaaagucggcggcaacuacaauuaccuguaccggcuguuccggaaguccaaucugaagcccuucgagcgggacaucagcaccgaaaucuaucaggccggcagcaccccuugcaacggcguggaaggcuucaacugcuacuucccacugcaguccuacggcuuucagcccacaaauggcgugggcuaucagcccuacagagugguggugcugagcuucgaacugcugcaugcuccugccacagugugcggcccuaagaaaagcaccaaucucgugaagaacaaaugcgugaacuucaacuucaacggccugaccggcaccggcgugcugacagagagcaacaagaaguuccugccauuccagcaguuuggccgggauaucgccgauaccacagacgccguuagagauccccagacacuggaaauccuggacaucaccccaugcagcuucggcggagugucugugaucaccccuggcaccaacaccagcaaucagguggcagugcuguaccaggacgugaacuguaccgaagugcccguggccauucacgccgaucagcugacaccuacauggcggguguacuccaccggcagcaauguguuucagaccagagccggcugucugaucggagccgagcacgugaacaauagcuacgagugcgacauccccaucggcgcuggcaucugugccagcuaccagacacagacaaacagccccagacgggcuagaagcguggccagccagagcaucauugccuacacaaugucucugggcgccgagaacagcguggccuacuccaacaacucuaucgcuauccccaccaacuucaccaucagcgugaccaccgagauccugccuguguccaugaccaagaccagcguggacugcaccauguacaucugcggcgauuccaccgagugcuccaaccugcugcugcaguacggcagcuucugcacccagcugaauagagcccugacagggaucgccguggaacaggacaagaacacccaagagguguucgcccaagugaagcaaaucuacaagaccccuccuaucaaggacuucggcggcuucaauuucagccagauucugcccgauccuagcaagcccagcaagcggagcuucaucgaggaccugcuguucaacaaagugacacuggccgacgccggcuucaucaagcaguauggcgauugucugggcgacauugccgccagggaucugauuugcgcccagaaguuuaacggacugacagugcugccuccucugcugaccgaugagaugaucgcccaguacacaucugcccugcuggccggcacaaucacaagcggcuggacauuuggagcuggcgccgcucugcagauccccuuugcuaugcagauggccuaccgguucaacggcugcggagugacccagaaugugcuguacgagaaccagaagcugaucgccaaccaguucaacagcgccaucggcaagauccaggacagccugagcagcacagcaagcgcccugggaaagcugcaggacguggucaaccagaaugcccaggcacugaacacccuggucaagcagcuguccuccaacuucggcgccaucagcucugugcugaacgauauccugagcagacuggacaaggucgaggccgaggugcagaucgacagacugaucacaggcagacugcagagccuccagacauacgugacccagcagcugaucagagccgccgagauuagagccucugccaaucuggccgccaccaagaugucugagugugugcugggccagagcaagagaguggacuuuugcggcaagggcugucaccugaugagcuucccucagucugccccucacggcgugguguuucugcacgugacauaugugcccgcucaagagaagaauuucaccaccgcuccagccaucugccacgacggcaaagcccacuuuccuagagaaggcguguucguguccaacggcacccauugguucgugacacagcggaacuucuacgagccccagaucaucaccaccgacaacaccuucgugucuggcaacugcgacguugugaucggcauugugaacaauaccguguacgacccucugcagcccgagcuggacagcuucaaagaggaacuggacaaguacuuuaagaaccacacaagccccgacguggaccugggcgauaucagcggaaucaaugccagcgucgugaacauccagaaagagaucgaccggcugaacgagguggccaagaaucugaacgagagccugaucgaccugcaagaacuggggaaguacgagcaguacaucaagggaggcggaggaucugacaucaucaagcugcugaacgagcaagugaacaaagagaugcagagcagcaaccuguacaugagcaugagcagcuggugcuacacccacagccuugauggcgccggacuguuccuguuugaucacgccgccgaggaauacgagcacgccaagaagcugaucaucuuccugaacgagaacaacgugcccgugcagcugaccagcauuucugccccugagcacaaguucgagggccugacacagaucuuccagaaggccuacgaacacgagcagcacaucagcgagagcaucaacaacaucguggaccacgccauuaagagcaaggaucacgccaccuucaacuuucugcagugguacguggccgaacagcacgaggaagaggugcuguucaaggacauccuggacaagaucgagcugaucggcaacgagaaccacggccuguaucuggccgaccaguacgugaagggaaucgccaagagcagaaagagcuga

SEQ ID NO: 12109 - RNA, 4140 nt, Artificial Sequence
  SARS-CoV-2/Wuhan/WIV05/2019__EPI_ISL_402128 spike protein CDS gc mod (1-1211)(Q965C_S1003C) Ferritin construct
auguucguguuucuggugcugcugccccugguguccagccagugugugaaccugaccaccagaacacagcugccuccagccuacaccaacagcuucaccagaggcguguacuaccccgacaagguguucagauccagcgugcugcacucuacccaggaccuguuccugccuuucuucagcaacgugaccugguuccacgccauccacguguccggcaccaauggcaccaagagauucgacaaccccgugcugcccuucaacgacgggguguacuuugccagcaccgagaaguccaacaucaucagaggcuggaucuucggcaccacacuggacagcaagacccagagccugcugaucgugaacaacgccaccaacguggucaucaaagugugcgaguuccaguucugcaacgaccccuuccugggcgucuacuaccacaagaacaacaagagcuggauggaaagcgaguuccggguguacagcagcgccaacaacugcaccuucgaguacgugucccagccuuuccugauggaccuggaaggcaagcagggcaacuucaagaaccugcgcgaguucguguucaagaacaucgacggcuacuucaaaaucuacagcaagcacaccccuaucaaccucgugcgggaucugccucagggcuucucugcucuggaaccccugguggaucugcccaucggcaucaacaucacccgguuucagacacugcuggcccugcacagaagcuaccugacaccuggcgauagcagcagcggauggacagcuggugccgccgcuuacuaugugggcuaccugcagccuagaaccuuccugcugaaguacaacgagaacggcaccaucaccgacgccguggauugugcucuggauccucugagcgagacaaagugcacccugaaguccuucaccguggaaaagggcaucuaccagaccagcaacuuccgggugcagcccaccgaauccaucgugcgguuccccaauaucaccaaucugugccccuucggcgagguguucaaugccaccagauucgccucuguguacgccuggaaccggaagcggaucagcaauugcguggccgacuacuccgugcuguacaacuccgccagcuucagcaccuucaagugcuacggcguguccccuaccaagcugaacgaccugugcuucacaaacguguacgccgacagcuucgugauccggggagaugaagugcggcagauugccccuggacagacaggcaagaucgccgacuacaacuacaagcugcccgacgacuucaccggcugugugauugccuggaacagcaacaaccuggacuccaaagucggcggcaacuacaauuaccuguaccggcuguuccggaaguccaaucugaagcccuucgagcgggacaucagcaccgaaaucuaucaggccggcagcaccccuugcaacggcguggaaggcuucaacugcuacuucccacugcaguccuacggcuuucagcccacaaauggcgugggcuaucagcccuacagagugguggugcugagcuucgaacugcugcaugcuccugccacagugugcggcccuaagaaaagcaccaaucucgugaagaacaaaugcgugaacuucaacuucaacggccugaccggcaccggcgugcugacagagagcaacaagaaguuccugccauuccagcaguuuggccgggauaucgccgauaccacagacgccguuagagauccccagacacuggaaauccuggacaucaccccaugcagcuucggcggagugucugugaucaccccuggcaccaacaccagcaaucagguggcagugcuguaccaggacgugaacuguaccgaagugcccguggccauucacgccgaucagcugacaccuacauggcggguguacuccaccggcagcaauguguuucagaccagagccggcugucugaucggagccgagcacgugaacaauagcuacgagugcgacauccccaucggcgcuggcaucugugccagcuaccagacacagacaaacagccccagacgggcuagaagcguggccagccagagcaucauugccuacacaaugucucugggcgccgagaacagcguggccuacuccaacaacucuaucgcuauccccaccaacuucaccaucagcgugaccaccgagauccugccuguguccaugaccaagaccagcguggacugcaccauguacaucugcggcgauuccaccgagugcuccaaccugcugcugcaguacggcagcuucugcacccagcugaauagagcccugacagggaucgccguggaacaggacaagaacacccaagagguguucgcccaagugaagcaaaucuacaagaccccuccuaucaaggacuucggcggcuucaauuucagccagauucugcccgauccuagcaagcccagcaagcggagcuucaucgaggaccugcuguucaacaaagugacacuggccgacgccggcuucaucaagcaguauggcgauugucugggcgacauugccgccagggaucugauuugcgcccagaaguuuaacggacugacagugcugccuccucugcugaccgaugagaugaucgcccaguacacaucugcccugcuggccggcacaaucacaagcggcuggacauuuggagcuggcgccgcucugcagauccccuuugcuaugcagauggccuaccgguucaacggcaucggagugacccagaaugugcuguacgagaaccagaagcugaucgccaaccaguucaacagcgccaucggcaagauccaggacagccugagcagcacagcaagcgcccugggaaagcugcaggacguggucaaccagaaugcccaggcacugaacacccuggucaagugccuguccuccaacuucggcgccaucagcucugugcugaacgauauccugagcagacuggacaaggucgaggccgaggugcagaucgacagacugaucacaggcagacugcagugucuccagacauacgugacccagcagcugaucagagccgccgagauuagagccucugccaaucuggccgccaccaagaugucugagugugugcugggccagagcaagagaguggacuuuugcggcaagggcuaccaccugaugagcuucccucagucugccccucacggcgugguguuucugcacgugacauaugugcccgcucaagagaagaauuucaccaccgcuccagccaucugccacgacggcaaagcccacuuuccuagagaaggcguguucguguccaacggcacccauugguucgugacacagcggaacuucuacgagccccagaucaucaccaccgacaacaccuucgugucuggcaacugcgacguugugaucggcauugugaacaauaccguguacgacccucugcagcccgagcuggacagcuucaaagaggaacuggacaaguacuuuaagaaccacacaagccccgacguggaccugggcgauaucagcggaaucaaugccagcgucgugaacauccagaaagagaucgaccggcugaacgagguggccaagaaucugaacgagagccugaucgaccugcaagaacuggggaaguacgagcaguacaucaagggaggcggaggaucugacaucaucaagcugcugaacgagcaagugaacaaagagaugcagagcagcaaccuguacaugagcaugagcagcuggugcuacacccacagccuugauggcgccggacuguuccuguuugaucacgccgccgaggaauacgagcacgccaagaagcugaucaucuuccugaacgagaacaacgugcccgugcagcugaccagcauuucugccccugagcacaaguucgagggccugacacagaucuuccagaaggccuacgaacacgagcagcacaucagcgagagcaucaacaacaucguggaccacgccauuaagagcaaggaucacgccaccuucaacuuucugcagugguacguggccgaacagcacgaggaagaggugcuguucaaggacauccuggacaagaucgagcugaucggcaacgagaaccacggccuguaucuggccgaccaguacgugaagggaaucgccaagagcagaaagagcuga

SEQ ID NO: 12110 - RNA, 4140 nt, Artificial Sequence
  SARS-CoV-2/Wuhan/WIV05/2019__EPI_ISL_402128 spike protein CDS gc mod (1-1211)(F970C_G999C) Ferritin construct
auguucguguuucuggugcugcugccccugguguccagccagugugugaaccugaccaccagaacacagcugccuccagccuacaccaacagcuucaccagaggcguguacuaccccgacaagguguucagauccagcgugcugcacucuacccaggaccuguuccugccuuucuucagcaacgugaccugguuccacgccauccacguguccggcaccaauggcaccaagagauucgacaaccccgugcugcccuucaacgacgggguguacuuugccagcaccgagaaguccaacaucaucagaggcuggaucuucggcaccacacuggacagcaagacccagagccugcugaucgugaacaacgccaccaacguggucaucaaagugugcgaguuccaguucugcaacgaccccuuccugggcgucuacuaccacaagaacaacaagagcuggauggaaagcgaguuccggguguacagcagcgccaacaacugcaccuucgaguacgugucccagccuuuccugauggaccuggaaggcaagcagggcaacuucaagaaccugcgcgaguucguguucaagaacaucgacggcuacuucaaaaucuacagcaagcacaccccuaucaaccucgugcgggaucugccucagggcuucucugcucuggaaccccugguggaucugcccaucggcaucaacaucacccgguuucagacacugcuggcccugcacagaagcuaccugacaccuggcgauagcagcagcggauggacagcuggugccgccgcuuacuaugugggcuaccugcagccuagaaccuuccugcugaaguacaacgagaacggcaccaucaccgacgccguggauugugcucuggauccucugagcgagacaaagugcacccugaaguccuucaccguggaaaagggcaucuaccagaccagcaacuuccgggugcagcccaccgaauccaucgugcgguuccccaauaucaccaaucugugccccuucggcgagguguucaaugccaccagauucgccucuguguacgccuggaaccggaagcggaucagcaauugcguggccgacuacuccgugcuguacaacuccgccagcuucagcaccuucaagugcuacggcguguccccuaccaagcugaacgaccugugcuucacaaacguguacgccgacagcuucgugauccggggagaugaagugcggcagauugccccuggacagacaggcaagaucgccgacuacaacuacaagcugcccgacgacuucaccggcugugugauugccuggaacagcaacaaccuggacuccaaagucggcggcaacuacaauuaccuguaccggcuguuccggaaguccaaucugaagcccuucgagcgggacaucagcaccgaaaucuaucaggccggcagcaccccuugcaacggcguggaaggcuucaacugcuacuucccacugcaguccuacggcuuucagcccacaaauggcgugggcuaucagcccuacagagugguggugcugagcuucgaacugcugcaugcuccugccacagugugcggcccuaagaaaagcaccaaucucgugaagaacaaaugcgugaacuucaacuucaacggccugaccggcaccggcgugcugacagagagcaacaagaaguuccugccauuccagcaguuuggccgggauaucgccgauaccacagacgccguuagagauccccagacacuggaaauccuggacaucaccccaugcagcuucggcggagugucugugaucaccccuggcaccaacaccagcaaucagguggcagugcuguaccaggacgugaacuguaccgaagugcccguggccauucacgccgaucagcugacaccuacauggcggguguacuccaccggcagcaauguguuucagaccagagccggcugucugaucggagccgagcacgugaacaauagcuacgagugcgacauccccaucggcgcuggcaucugugccagcuaccagacacagacaaacagccccagacgggcuagaagcguggccagccagagcaucauugccuacacaaugucucugggcgccgagaacagcguggccuacuccaacaacucuaucgcuauccccaccaacuucaccaucagcgugaccaccgagauccugccuguguccaugaccaagaccagcguggacugcaccauguacaucugcggcgauuccaccgagugcuccaaccugcugcugcaguacggcagcuucugcacccagcugaauagagcccugacagggaucgccguggaacaggacaagaacacccaagagguguucgcccaagugaagcaaaucuacaagaccccuccuaucaaggacuucggcggcuucaauuucagccagauucugcccgauccuagcaagcccagcaagcggagcuucaucgaggaccugcuguucaacaaagugacacuggccgacgccggcuucaucaagcaguauggcgauugucugggcgacauugccgccagggaucugauuugcgcccagaaguuuaacggacugacagugcugccuccucugcugaccgaugagaugaucgcccaguacacaucugcccugcuggccggcacaaucacaagcggcuggacauuuggagcuggcgccgcucugcagauccccuuugcuaugcagauggccuaccgguucaacggcaucggagugacccagaaugugcuguacgagaaccagaagcugaucgccaaccaguucaacagcgccaucggcaagauccaggacagccugagcagcacagcaagcgcccugggaaagcugcaggacguggucaaccagaaugcccaggcacugaacacccuggucaagcagcuguccuccaacugcggcgccaucagcucugugcugaacgauauccugagcagacuggacaaggucgaggccgaggugcagaucgacagacugaucacauguagacugcagagccuccagacauacgugacccagcagcugaucagagccgccgagauuagagccucugccaaucuggccgccaccaagaugucugagugugugcugggccagagcaagagaguggacuuuugcggcaagggcuaccaccugaugagcuucccucagucugccccucacggcgugguguuucugcacgugacauaugugcccgcucaagagaagaauuucaccaccgcuccagccaucugccacgacggcaaagcccacuuuccuagagaaggcguguucguguccaacggcacccauugguucgugacacagcggaacuucuacgagccccagaucaucaccaccgacaacaccuucgugucuggcaacugcgacguugugaucggcauugugaacaauaccguguacgacccucugcagcccgagcuggacagcuucaaagaggaacuggacaaguacuuuaagaaccacacaagccccgacguggaccugggcgauaucagcggaaucaaugccagcgucgugaacauccagaaagagaucgaccggcugaacgagguggccaagaaucugaacgagagccugaucgaccugcaagaacuggggaaguacgagcaguacaucaagggaggcggaggaucugacaucaucaagcugcugaacgagcaagugaacaaagagaugcagagcagcaaccuguacaugagcaugagcagcuggugcuacacccacagccuugauggcgccggacuguuccuguuugaucacgccgccgaggaauacgagcacgccaagaagcugaucaucuuccugaacgagaacaacgugcccgugcagcugaccagcauuucugccccugagcacaaguucgagggccugacacagaucuuccagaaggccuacgaacacgagcagcacaucagcgagagcaucaacaacaucguggaccacgccauuaagagcaaggaucacgccaccuucaacuuucugcagugguacguggccgaacagcacgaggaagaggugcuguucaaggacauccuggacaagaucgagcugaucggcaacgagaaccacggccuguaucuggccgaccaguacgugaagggaaucgccaagagcagaaagagcuga

SEQ ID NO: 12111 - RNA, 4140 nt, Artificial Sequence
  SARS-CoV-2/Wuhan/WIV05/2019__EPI_ISL_402128 spike protein CDS gc mod (1-1211)(A972C_R995C) Ferritin construct
auguucguguuucuggugcugcugccccugguguccagccagugugugaaccugaccaccagaacacagcugccuccagccuacaccaacagcuucaccagaggcguguacuaccccgacaagguguucagauccagcgugcugcacucuacccaggaccuguuccugccuuucuucagcaacgugaccugguuccacgccauccacguguccggcaccaauggcaccaagagauucgacaaccccgugcugcccuucaacgacgggguguacuuugccagcaccgagaaguccaacaucaucagaggcuggaucuucggcaccacacuggacagcaagacccagagccugcugaucgugaacaacgccaccaacguggucaucaaagugugcgaguuccaguucugcaacgaccccuuccugggcgucuacuaccacaagaacaacaagagcuggauggaaagcgaguuccggguguacagcagcgccaacaacugcaccuucgaguacgugucccagccuuuccugauggaccuggaaggcaagcagggcaacuucaagaaccugcgcgaguucguguucaagaacaucgacggcuacuucaaaaucuacagcaagcacaccccuaucaaccucgugcgggaucugccucagggcuucucugcucuggaaccccugguggaucugcccaucggcaucaacaucacccgguuucagacacugcuggcccugcacagaagcuaccugacaccuggcgauagcagcagcggauggacagcuggugccgccgcuuacuaugugggcuaccugcagccuagaaccuuccugcugaaguacaacgagaacggcaccaucaccgacgccguggauugugcucuggauccucugagcgagacaaagugcacccugaaguccuucaccguggaaaagggcaucuaccagaccagcaacuuccgggugcagcccaccgaauccaucgugcgguuccccaauaucaccaaucugugccccuucggcgagguguucaaugccaccagauucgccucuguguacgccuggaaccggaagcggaucagcaauugcguggccgacuacuccgugcuguacaacuccgccagcuucagcaccuucaagugcuacggcguguccccuaccaagcugaacgaccugugcuucacaaacguguacgccgacagcuucgugauccggggagaugaagugcggcagauugccccuggacagacaggcaagaucgccgacuacaacuacaagcugcccgacgacuucaccggcugugugauugccuggaacagcaacaaccuggacuccaaagucggcggcaacuacaauuaccuguaccggcuguuccggaaguccaaucugaagcccuucgagcgggacaucagcaccgaaaucuaucaggccggcagcaccccuugcaacggcguggaaggcuucaacugcuacuucccacugcaguccuacggcuuucagcccacaaauggcgugggcuaucagcccuacagagugguggugcugagcuucgaacugcugcaugcuccugccacagugugcggcccuaagaaaagcaccaaucucgugaagaacaaaugcgugaacuucaacuucaacggccugaccggcaccggcgugcugacagagagcaacaagaaguuccugccauuccagcaguuuggccgggauaucgccgauaccacagacgccguuagagauccccagacacuggaaauccuggacaucaccccaugcagcuucggcggagugucugugaucaccccuggcaccaacaccagcaaucagguggcagugcuguaccaggacgugaacuguaccgaagugcccguggccauucacgccgaucagcugacaccuacauggcggguguacuccaccggcagcaauguguuucagaccagagccggcugucugaucggagccgagcacgugaacaauagcuacgagugcgacauccccaucggcgcuggcaucugugccagcuaccagacacagacaaacagccccagacgggcuagaagcguggccagccagagcaucauugccuacacaaugucucugggcgccgagaacagcguggccuacuccaacaacucuaucgcuauccccaccaacuucaccaucagcgugaccaccgagauccugccuguguccaugaccaagaccagcguggacugcaccauguacaucugcggcgauuccaccgagugcuccaaccugcugcugcaguacggcagcuucugcacccagcugaauagagcccugacagggaucgccguggaacaggacaagaacacccaagagguguucgcccaagugaagcaaaucuacaagaccccuccuaucaaggacuucggcggcuucaauuucagccagauucugcccgauccuagcaagcccagcaagcggagcuucaucgaggaccugcuguucaacaaagugacacuggccgacgccggcuucaucaagcaguauggcgauugucugggcgacauugccgccagggaucugauuugcgcccagaaguuuaacggacugacagugcugccuccucugcugaccgaugagaugaucgcccaguacacaucugcccugcuggccggcacaaucacaagcggcuggacauuuggagcuggcgccgcucugcagauccccuuugcuaugcagauggccuaccgguucaacggcaucggagugacccagaaugugcuguacgagaaccagaagcugaucgccaaccaguucaacagcgccaucggcaagauccaggacagccugagcagcacagcaagcgcccugggaaagcugcaggacguggucaaccagaaugcccaggcacugaacacccuggucaagcagcuguccuccaacuucggcugcaucagcucugugcugaacgauauccugagcagacuggacaaggucgaggccgaggugcagaucgacugucugaucacaggcagacugcagagccuccagacauacgugacccagcagcugaucagagccgccgagauuagagccucugccaaucuggccgccaccaagaugucugagugugugcugggccagagcaagagaguggacuuuugcggcaagggcuaccaccugaugagcuucccucagucugccccucacggcgugguguuucugcacgugacauaugugcccgcucaagagaagaauuucaccaccgcuccagccaucugccacgacggcaaagcccacuuuccuagagaaggcguguucguguccaacggcacccauugguucgugacacagcggaacuucuacgagccccagaucaucaccaccgacaacaccuucgugucuggcaacugcgacguugugaucggcauugugaacaauaccguguacgacccucugcagcccgagcuggacagcuucaaagaggaacuggacaaguacuuuaagaaccacacaagccccgacguggaccugggcgauaucagcggaaucaaugccagcgucgugaacauccagaaagagaucgaccggcugaacgagguggccaagaaucugaacgagagccugaucgaccugcaagaacuggggaaguacgagcaguacaucaagggaggcggaggaucugacaucaucaagcugcugaacgagcaagugaacaaagagaugcagagcagcaaccuguacaugagcaugagcagcuggugcuacacccacagccuugauggcgccggacuguuccuguuugaucacgccgccgaggaauacgagcacgccaagaagcugaucaucuuccugaacgagaacaacgugcccgugcagcugaccagcauuucugccccugagcacaaguucgagggccugacacagaucuuccagaaggccuacgaacacgagcagcacaucagcgagagcaucaacaacaucguggaccacgccauuaagagcaaggaucacgccaccuucaacuuucugcagugguacguggccgaacagcacgaggaagaggugcuguucaaggacauccuggacaagaucgagcugaucggcaacgagaaccacggccuguaucuggccgaccaguacgugaagggaaucgccaagagcagaaagagcuga

SEQ ID NO: 12112 - RNA, 4140 nt, Artificial Sequence
  SARS-CoV-2/Wuhan/WIV05/2019__EPI_ISL_402128 spike protein CDS gc mod (1-1211)(A890C_V1040C) Ferritin construct
auguucguguuucuggugcugcugccccugguguccagccagugugugaaccugaccaccagaacacagcugccuccagccuacaccaacagcuucaccagaggcguguacuaccccgacaagguguucagauccagcgugcugcacucuacccaggaccuguuccugccuuucuucagcaacgugaccugguuccacgccauccacguguccggcaccaauggcaccaagagauucgacaaccccgugcugcccuucaacgacgggguguacuuugccagcaccgagaaguccaacaucaucagaggcuggaucuucggcaccacacuggacagcaagacccagagccugcugaucgugaacaacgccaccaacguggucaucaaagugugcgaguuccaguucugcaacgaccccuuccugggcgucuacuaccacaagaacaacaagagcuggauggaaagcgaguuccggguguacagcagcgccaacaacugcaccuucgaguacgugucccagccuuuccugauggaccuggaaggcaagcagggcaacuucaagaaccugcgcgaguucguguucaagaacaucgacggcuacuucaaaaucuacagcaagcacaccccuaucaaccucgugcgggaucugccucagggcuucucugcucuggaaccccugguggaucugcccaucggcaucaacaucacccgguuucagacacugcuggcccugcacagaagcuaccugacaccuggcgauagcagcagcggauggacagcuggugccgccgcuuacuaugugggcuaccugcagccuagaaccuuccugcugaaguacaacgagaacggcaccaucaccgacgccguggauugugcucuggauccucugagcgagacaaagugcacccugaaguccuucaccguggaaaagggcaucuaccagaccagcaacuuccgggugcagcccaccgaauccaucgugcgguuccccaauaucaccaaucugugccccuucggcgagguguucaaugccaccagauucgccucuguguacgccuggaaccggaagcggaucagcaauugcguggccgacuacuccgugcuguacaacuccgccagcuucagcaccuucaagugcuacggcguguccccuaccaagcugaacgaccugugcuucacaaacguguacgccgacagcuucgugauccggggagaugaagugcggcagauugccccuggacagacaggcaagaucgccgacuacaacuacaagcugcccgacgacuucaccggcugugugauugccuggaacagcaacaaccuggacuccaaagucggcggcaacuacaauuaccuguaccggcuguuccggaaguccaaucugaagcccuucgagcgggacaucagcaccgaaaucuaucaggccggcagcaccccuugcaacggcguggaaggcuucaacugcuacuucccacugcaguccuacggcuuucagcccacaaauggcgugggcuaucagcccuacagagugguggugcugagcuucgaacugcugcaugcuccugccacagugugcggcccuaagaaaagcaccaaucucgugaagaacaaaugcgugaacuucaacuucaacggccugaccggcaccggcgugcugacagagagcaacaagaaguuccugccauuccagcaguuuggccgggauaucgccgauaccacagacgccguuagagauccccagacacuggaaauccuggacaucaccccaugcagcuucggcggagugucugugaucaccccuggcaccaacaccagcaaucagguggcagugcuguaccaggacgugaacuguaccgaagugcccguggccauucacgccgaucagcugacaccuacauggcggguguacuccaccggcagcaauguguuucagaccagagccggcugucugaucggagccgagcacgugaacaauagcuacgagugcgacauccccaucggcgcuggcaucugugccagcuaccagacacagacaaacagccccagacgggcuagaagcguggccagccagagcaucauugccuacacaaugucucugggcgccgagaacagcguggccuacuccaacaacucuaucgcuauccccaccaacuucaccaucagcgugaccaccgagauccugccuguguccaugaccaagaccagcguggacugcaccauguacaucugcggcgauuccaccgagugcuccaaccugcugcugcaguacggcagcuucugcacccagcugaauagagcccugacagggaucgccguggaacaggacaagaacacccaagagguguucgcccaagugaagcaaaucuacaagaccccuccuaucaaggacuucggcggcuucaauuucagccagauucugcccgauccuagcaagcccagcaagcggagcuucaucgaggaccugcuguucaacaaagugacacuggccgacgccggcuucaucaagcaguauggcgauugucugggcgacauugccgccagggaucugauuugcgcccagaaguuuaacggacugacagugcugccuccucugcugaccgaugagaugaucgcccaguacacaucugcccugcuggccggcacaaucacaagcggcuggacauuuggaugcggcgccgcucugcagauccccuuugcuaugcagauggccuaccgguucaacggcaucggagugacccagaaugugcuguacgagaaccagaagcugaucgccaaccaguucaacagcgccaucggcaagauccaggacagccugagcagcacagcaagcgcccugggaaagcugcaggacguggucaaccagaaugcccaggcacugaacacccuggucaagcagcuguccuccaacuucggcgccaucagcucugugcugaacgauauccugagcagacuggacaaggucgaggccgaggugcagaucgacagacugaucacaggcagacugcagagccuccagacauacgugacccagcagcugaucagagccgccgagauuagagccucugccaaucuggccgccaccaagaugucugagugugugcugggccagagcaagagaugugacuuuugcggcaagggcuaccaccugaugagcuucccucagucugccccucacggcgugguguuucugcacgugacauaugugcccgcucaagagaagaauuucaccaccgcuccagccaucugccacgacggcaaagcccacuuuccuagagaaggcguguucguguccaacggcacccauugguucgugacacagcggaacuucuacgagccccagaucaucaccaccgacaacaccuucgugucuggcaacugcgacguugugaucggcauugugaacaauaccguguacgacccucugcagcccgagcuggacagcuucaaagaggaacuggacaaguacuuuaagaaccacacaagccccgacguggaccugggcgauaucagcggaaucaaugccagcgucgugaacauccagaaagagaucgaccggcugaacgagguggccaagaaucugaacgagagccugaucgaccugcaagaacuggggaaguacgagcaguacaucaagggaggcggaggaucugacaucaucaagcugcugaacgagcaagugaacaaagagaugcagagcagcaaccuguacaugagcaugagcagcuggugcuacacccacagccuugauggcgccggacuguuccuguuugaucacgccgccgaggaauacgagcacgccaagaagcugaucaucuuccugaacgagaacaacgugcccgugcagcugaccagcauuucugccccugagcacaaguucgagggccugacacagaucuuccagaaggccuacgaacacgagcagcacaucagcgagagcaucaacaacaucguggaccacgccauuaagagcaaggaucacgccaccuucaacuuucugcagugguacguggccgaacagcacgaggaagaggugcuguucaaggacauccuggacaagaucgagcugaucggcaacgagaaccacggccuguaucuggccgaccaguacgugaagggaaucgccaagagcagaaagagcuga

SEQ ID NO: 12113 - RNA, 4140 nt, Artificial Sequence
  SARS-CoV-2/Wuhan/WIV05/2019__EPI_ISL_402128 spike protein CDS gc mod (1-1211)(T874C_S1055C) Ferritin construct
auguucguguuucuggugcugcugccccugguguccagccagugugugaaccugaccaccagaacacagcugccuccagccuacaccaacagcuucaccagaggcguguacuaccccgacaagguguucagauccagcgugcugcacucuacccaggaccuguuccugccuuucuucagcaacgugaccugguuccacgccauccacguguccggcaccaauggcaccaagagauucgacaaccccgugcugcccuucaacgacgggguguacuuugccagcaccgagaaguccaacaucaucagaggcuggaucuucggcaccacacuggacagcaagacccagagccugcugaucgugaacaacgccaccaacguggucaucaaagugugcgaguuccaguucugcaacgaccccuuccugggcgucuacuaccacaagaacaacaagagcuggauggaaagcgaguuccggguguacagcagcgccaacaacugcaccuucgaguacgugucccagccuuuccugauggaccuggaaggcaagcagggcaacuucaagaaccugcgcgaguucguguucaagaacaucgacggcuacuucaaaaucuacagcaagcacaccccuaucaaccucgugcgggaucugccucagggcuucucugcucuggaaccccugguggaucugcccaucggcaucaacaucacccgguuucagacacugcuggcccugcacagaagcuaccugacaccuggcgauagcagcagcggauggacagcuggugccgccgcuuacuaugugggcuaccugcagccuagaaccuuccugcugaaguacaacgagaacggcaccaucaccgacgccguggauugugcucuggauccucugagcgagacaaagugcacccugaaguccuucaccguggaaaagggcaucuaccagaccagcaacuuccgggugcagcccaccgaauccaucgugcgguuccccaauaucaccaaucugugccccuucggcgagguguucaaugccaccagauucgccucuguguacgccuggaaccggaagcggaucagcaauugcguggccgacuacuccgugcuguacaacuccgccagcuucagcaccuucaagugcuacggcguguccccuaccaagcugaacgaccugugcuucacaaacguguacgccgacagcuucgugauccggggagaugaagugcggcagauugccccuggacagacaggcaagaucgccgacuacaacuacaagcugcccgacgacuucaccggcugugugauugccuggaacagcaacaaccuggacuccaaagucggcggcaacuacaauuaccuguaccggcuguuccggaaguccaaucugaagcccuucgagcgggacaucagcaccgaaaucuaucaggccggcagcaccccuugcaacggcguggaaggcuucaacugcuacuucccacugcaguccuacggcuuucagcccacaaauggcgugggcuaucagcccuacagagugguggugcugagcuucgaacugcugcaugcuccugccacagugugcggcccuaagaaaagcaccaaucucgugaagaacaaaugcgugaacuucaacuucaacggccugaccggcaccggcgugcugacagagagcaacaagaaguuccugccauuccagcaguuuggccgggauaucgccgauaccacagacgccguuagagauccccagacacuggaaauccuggacaucaccccaugcagcuucggcggagugucugugaucaccccuggcaccaacaccagcaaucagguggcagugcuguaccaggacgugaacuguaccgaagugcccguggccauucacgccgaucagcugacaccuacauggcggguguacuccaccggcagcaauguguuucagaccagagccggcugucugaucggagccgagcacgugaacaauagcuacgagugcgacauccccaucggcgcuggcaucugugccagcuaccagacacagacaaacagccccagacgggcuagaagcguggccagccagagcaucauugccuacacaaugucucugggcgccgagaacagcguggccuacuccaacaacucuaucgcuauccccaccaacuucaccaucagcgugaccaccgagauccugccuguguccaugaccaagaccagcguggacugcaccauguacaucugcggcgauuccaccgagugcuccaaccugcugcugcaguacggcagcuucugcacccagcugaauagagcccugacagggaucgccguggaacaggacaagaacacccaagagguguucgcccaagugaagcaaaucuacaagaccccuccuaucaaggacuucggcggcuucaauuucagccagauucugcccgauccuagcaagcccagcaagcggagcuucaucgaggaccugcuguucaacaaagugacacuggccgacgccggcuucaucaagcaguauggcgauugucugggcgacauugccgccagggaucugauuugcgcccagaaguuuaacggacugacagugcugccuccucugcugaccgaugagaugaucgcccaguacugcucugcccugcuggccggcacaaucacaagcggcuggacauuuggagcuggcgccgcucugcagauccccuuugcuaugcagauggccuaccgguucaacggcaucggagugacccagaaugugcuguacgagaaccagaagcugaucgccaaccaguucaacagcgccaucggcaagauccaggacagccugagcagcacagcaagcgcccugggaaagcugcaggacguggucaaccagaaugcccaggcacugaacacccuggucaagcagcuguccuccaacuucggcgccaucagcucugugcugaacgauauccugagcagacuggacaaggucgaggccgaggugcagaucgacagacugaucacaggcagacugcagagccuccagacauacgugacccagcagcugaucagagccgccgagauuagagccucugccaaucuggccgccaccaagaugucugagugugugcugggccagagcaagagaguggacuuuugcggcaagggcuaccaccugaugagcuucccucagugcgccccucacggcgugguguuucugcacgugacauaugugcccgcucaagagaagaauuucaccaccgcuccagccaucugccacgacggcaaagcccacuuuccuagagaaggcguguucguguccaacggcacccauugguucgugacacagcggaacuucuacgagccccagaucaucaccaccgacaacaccuucgugucuggcaacugcgacguugugaucggcauugugaacaauaccguguacgacccucugcagcccgagcuggacagcuucaaagaggaacuggacaaguacuuuaagaaccacacaagccccgacguggaccugggcgauaucagcggaaucaaugccagcgucgugaacauccagaaagagaucgaccggcugaacgagguggccaagaaucugaacgagagccugaucgaccugcaagaacuggggaaguacgagcaguacaucaagggaggcggaggaucugacaucaucaagcugcugaacgagcaagugaacaaagagaugcagagcagcaaccuguacaugagcaugagcagcuggugcuacacccacagccuugauggcgccggacuguuccuguuugaucacgccgccgaggaauacgagcacgccaagaagcugaucaucuuccugaacgagaacaacgugcccgugcagcugaccagcauuucugccccugagcacaaguucgagggccugacacagaucuuccagaaggccuacgaacacgagcagcacaucagcgagagcaucaacaacaucguggaccacgccauuaagagcaaggaucacgccaccuucaacuuucugcagugguacguggccgaacagcacgaggaagaggugcuguucaaggacauccuggacaagaucgagcugaucggcaacgagaaccacggccuguaucuggccgaccaguacgugaagggaaucgccaagagcagaaagagcuga

SEQ ID NO: 12114 - RNA, 3726 nt, Artificial Sequence
  SARS-CoV-2/Wuhan/WIV05/2019__EPI_ISL_402128 spike protein CDS gc mod (1-1211) Foldon construct
auguucguguuucuggugcugcugccccugguguccagccagugugugaaccugaccaccagaacacagcugccuccagccuacaccaacagcuucaccagaggcguguacuaccccgacaagguguucagauccagcgugcugcacucuacccaggaccuguuccugccuuucuucagcaacgugaccugguuccacgccauccacguguccggcaccaauggcaccaagagauucgacaaccccgugcugcccuucaacgacgggguguacuuugccagcaccgagaaguccaacaucaucagaggcuggaucuucggcaccacacuggacagcaagacccagagccugcugaucgugaacaacgccaccaacguggucaucaaagugugcgaguuccaguucugcaacgaccccuuccugggcgucuacuaccacaagaacaacaagagcuggauggaaagcgaguuccggguguacagcagcgccaacaacugcaccuucgaguacgugucccagccuuuccugauggaccuggaaggcaagcagggcaacuucaagaaccugcgcgaguucguguucaagaacaucgacggcuacuucaaaaucuacagcaagcacaccccuaucaaccucgugcgggaucugccucagggcuucucugcucuggaaccccugguggaucugcccaucggcaucaacaucacccgguuucagacacugcuggcccugcacagaagcuaccugacaccuggcgauagcagcagcggauggacagcuggugccgccgcuuacuaugugggcuaccugcagccuagaaccuuccugcugaaguacaacgagaacggcaccaucaccgacgccguggauugugcucuggauccucugagcgagacaaagugcacccugaaguccuucaccguggaaaagggcaucuaccagaccagcaacuuccgggugcagcccaccgaauccaucgugcgguuccccaauaucaccaaucugugccccuucggcgagguguucaaugccaccagauucgccucuguguacgccuggaaccggaagcggaucagcaauugcguggccgacuacuccgugcuguacaacuccgccagcuucagcaccuucaagugcuacggcguguccccuaccaagcugaacgaccugugcuucacaaacguguacgccgacagcuucgugauccggggagaugaagugcggcagauugccccuggacagacaggcaagaucgccgacuacaacuacaagcugcccgacgacuucaccggcugugugauugccuggaacagcaacaaccuggacuccaaagucggcggcaacuacaauuaccuguaccggcuguuccggaaguccaaucugaagcccuucgagcgggacaucagcaccgaaaucuaucaggccggcagcaccccuugcaacggcguggaaggcuucaacugcuacuucccacugcaguccuacggcuuucagcccacaaauggcgugggcuaucagcccuacagagugguggugcugagcuucgaacugcugcaugcuccugccacagugugcggcccuaagaaaagcaccaaucucgugaagaacaaaugcgugaacuucaacuucaacggccugaccggcaccggcgugcugacagagagcaacaagaaguuccugccauuccagcaguuuggccgggauaucgccgauaccacagacgccguuagagauccccagacacuggaaauccuggacaucaccccaugcagcuucggcggagugucugugaucaccccuggcaccaacaccagcaaucagguggcagugcuguaccaggacgugaacuguaccgaagugcccguggccauucacgccgaucagcugacaccuacauggcggguguacuccaccggcagcaauguguuucagaccagagccggcugucugaucggagccgagcacgugaacaauagcuacgagugcgacauccccaucggcgcuggcaucugugccagcuaccagacacagacaaacagccccagacgggcuagaagcguggccagccagagcaucauugccuacacaaugucucugggcgccgagaacagcguggccuacuccaacaacucuaucgcuauccccaccaacuucaccaucagcgugaccaccgagauccugccuguguccaugaccaagaccagcguggacugcaccauguacaucugcggcgauuccaccgagugcuccaaccugcugcugcaguacggcagcuucugcacccagcugaauagagcccugacagggaucgccguggaacaggacaagaacacccaagagguguucgcccaagugaagcaaaucuacaagaccccuccuaucaaggacuucggcggcuucaauuucagccagauucugcccgauccuagcaagcccagcaagcggagcuucaucgaggaccugcuguucaacaaagugacacuggccgacgccggcuucaucaagcaguauggcgauugucugggcgacauugccgccagggaucugauuugcgcccagaaguuuaacggacugacagugcugccuccucugcugaccgaugagaugaucgcccaguacacaucugcccugcuggccggcacaaucacaagcggcuggacauuuggagcuggcgccgcucugcagauccccuuugcuaugcagauggccuaccgguucaacggcaucggagugacccagaaugugcuguacgagaaccagaagcugaucgccaaccaguucaacagcgccaucggcaagauccaggacagccugagcagcacagcaagcgcccugggaaagcugcaggacguggucaaccagaaugcccaggcacugaacacccuggucaagcagcuguccuccaacuucggcgccaucagcucugugcugaacgauauccugagcagacuggacaaggucgaggccgaggugcagaucgacagacugaucacaggcagacugcagagccuccagacauacgugacccagcagcugaucagagccgccgagauuagagccucugccaaucuggccgccaccaagaugucugagugugugcugggccagagcaagagaguggacuuuugcggcaagggcuaccaccugaugagcuucccucagucugccccucacggcgugguguuucugcacgugacauaugugcccgcucaagagaagaauuucaccaccgcuccagccaucugccacgacggcaaagcccacuuuccuagagaaggcguguucguguccaacggcacccauugguucgugacacagcggaacuucuacgagccccagaucaucaccaccgacaacaccuucgugucuggcaacugcgacguugugaucggcauugugaacaauaccguguacgacccucugcagcccgagcuggacagcuucaaagaggaacuggacaaguacuuuaagaaccacacaagccccgacguggaccugggcgauaucagcggaaucaaugccagcgucgugaacauccagaaagagaucgaccggcugaacgagguggccaagaaucugaacgagagccugaucgaccugcaagaacuggggaaguacgagcaguacaucaagggaggaucuggcuauauccccgaggcuccuagagauggccaggccuauguucggaaggauggcgaaugggugcugcugagcaccuuccuuuga

SEQ ID NO: 12115 - RNA, 3726 nt, Artificial Sequence
  SARS-CoV-2/Wuhan/WIV05/2019__EPI_ISL_402128 spike protein CDS gc mod (1-1211)(K986P_V987P) Foldon construct
auguucguguuucuggugcugcugccccugguguccagccagugugugaaccugaccaccagaacacagcugccuccagccuacaccaacagcuucaccagaggcguguacuaccccgacaagguguucagauccagcgugcugcacucuacccaggaccuguuccugccuuucuucagcaacgugaccugguuccacgccauccacguguccggcaccaauggcaccaagagauucgacaaccccgugcugcccuucaacgacgggguguacuuugccagcaccgagaaguccaacaucaucagaggcuggaucuucggcaccacacuggacagcaagacccagagccugcugaucgugaacaacgccaccaacguggucaucaaagugugcgaguuccaguucugcaacgaccccuuccugggcgucuacuaccacaagaacaacaagagcuggauggaaagcgaguuccggguguacagcagcgccaacaacugcaccuucgaguacgugucccagccuuuccugauggaccuggaaggcaagcagggcaacuucaagaaccugcgcgaguucguguucaagaacaucgacggcuacuucaaaaucuacagcaagcacaccccuaucaaccucgugcgggaucugccucagggcuucucugcucuggaaccccugguggaucugcccaucggcaucaacaucacccgguuucagacacugcuggcccugcacagaagcuaccugacaccuggcgauagcagcagcggauggacagcuggugccgccgcuuacuaugugggcuaccugcagccuagaaccuuccugcugaaguacaacgagaacggcaccaucaccgacgccguggauugugcucuggauccucugagcgagacaaagugcacccugaaguccuucaccguggaaaagggcaucuaccagaccagcaacuuccgggugcagcccaccgaauccaucgugcgguuccccaauaucaccaaucugugccccuucggcgagguguucaaugccaccagauucgccucuguguacgccuggaaccggaagcggaucagcaauugcguggccgacuacuccgugcuguacaacuccgccagcuucagcaccuucaagugcuacggcguguccccuaccaagcugaacgaccugugcuucacaaacguguacgccgacagcuucgugauccggggagaugaagugcggcagauugccccuggacagacaggcaagaucgccgacuacaacuacaagcugcccgacgacuucaccggcugugugauugccuggaacagcaacaaccuggacuccaaagucggcggcaacuacaauuaccuguaccggcuguuccggaaguccaaucugaagcccuucgagcgggacaucagcaccgaaaucuaucaggccggcagcaccccuugcaacggcguggaaggcuucaacugcuacuucccacugcaguccuacggcuuucagcccacaaauggcgugggcuaucagcccuacagagugguggugcugagcuucgaacugcugcaugcuccugccacagugugcggcccuaagaaaagcaccaaucucgugaagaacaaaugcgugaacuucaacuucaacggccugaccggcaccggcgugcugacagagagcaacaagaaguuccugccauuccagcaguuuggccgggauaucgccgauaccacagacgccguuagagauccccagacacuggaaauccuggacaucaccccaugcagcuucggcggagugucugugaucaccccuggcaccaacaccagcaaucagguggcagugcuguaccaggacgugaacuguaccgaagugcccguggccauucacgccgaucagcugacaccuacauggcggguguacuccaccggcagcaauguguuucagaccagagccggcugucugaucggagccgagcacgugaacaauagcuacgagugcgacauccccaucggcgcuggcaucugugccagcuaccagacacagacaaacagccccagacgggcuagaagcguggccagccagagcaucauugccuacacaaugucucugggcgccgagaacagcguggccuacuccaacaacucuaucgcuauccccaccaacuucaccaucagcgugaccaccgagauccugccuguguccaugaccaagaccagcguggacugcaccauguacaucugcggcgauuccaccgagugcuccaaccugcugcugcaguacggcagcuucugcacccagcugaauagagcccugacagggaucgccguggaacaggacaagaacacccaagagguguucgcccaagugaagcaaaucuacaagaccccuccuaucaaggacuucggcggcuucaauuucagccagauucugcccgauccuagcaagcccagcaagcggagcuucaucgaggaccugcuguucaacaaagugacacuggccgacgccggcuucaucaagcaguauggcgauugucugggcgacauugccgccagggaucugauuugcgcccagaaguuuaacggacugacagugcugccuccucugcugaccgaugagaugaucgcccaguacacaucugcccugcuggccggcacaaucacaagcggcuggacauuuggagcuggcgccgcucugcagauccccuuugcuaugcagauggccuaccgguucaacggcaucggagugacccagaaugugcuguacgagaaccagaagcugaucgccaaccaguucaacagcgccaucggcaagauccaggacagccugagcagcacagcaagcgcccugggaaagcugcaggacguggucaaccagaaugcccaggcacugaacacccuggucaagcagcuguccuccaacuucggcgccaucagcucugugcugaacgauauccugagcagacuggacccuccugaggccgaggugcagaucgacagacugaucacaggcagacugcagagccuccagacauacgugacccagcagcugaucagagccgccgagauuagagccucugccaaucuggccgccaccaagaugucugagugugugcugggccagagcaagagaguggacuuuugcggcaagggcuaccaccugaugagcuucccucagucugccccucacggcgugguguuucugcacgugacauaugugcccgcucaagagaagaauuucaccaccgcuccagccaucugccacgacggcaaagcccacuuuccuagagaaggcguguucguguccaacggcacccauugguucgugacacagcggaacuucuacgagccccagaucaucaccaccgacaacaccuucgugucuggcaacugcgacguugugaucggcauugugaacaauaccguguacgacccucugcagcccgagcuggacagcuucaaagaggaacuggacaaguacuuuaagaaccacacaagccccgacguggaccugggcgauaucagcggaaucaaugccagcgucgugaacauccagaaagagaucgaccggcugaacgagguggccaagaaucugaacgagagccugaucgaccugcaagaacuggggaaguacgagcaguacaucaagggaggaucuggcuauauccccgaggcuccuagagauggccaggccuauguucggaaggauggcgaaugggugcugcugagcaccuuccuuuga

SEQ ID NO: 12116 - RNA, 3726 nt, Artificial Sequence
  SARS-CoV-2/Wuhan/WIV05/2019__EPI_ISL_402128 spike protein CDS gc mod (1-1211)(K986P_V987P_T887WN_A1020W) Foldon construct
auguucguguuucuggugcugcugccccugguguccagccagugugugaaccugaccaccagaacacagcugccuccagccuacaccaacagcuucaccagaggcguguacuaccccgacaagguguucagauccagcgugcugcacucuacccaggaccuguuccugccuuucuucagcaacgugaccugguuccacgccauccacguguccggcaccaauggcaccaagagauucgacaaccccgugcugcccuucaacgacgggguguacuuugccagcaccgagaaguccaacaucaucagaggcuggaucuucggcaccacacuggacagcaagacccagagccugcugaucgugaacaacgccaccaacguggucaucaaagugugcgaguuccaguucugcaacgaccccuuccugggcgucuacuaccacaagaacaacaagagcuggauggaaagcgaguuccggguguacagcagcgccaacaacugcaccuucgaguacgugucccagccuuuccugauggaccuggaaggcaagcagggcaacuucaagaaccugcgcgaguucguguucaagaacaucgacggcuacuucaaaaucuacagcaagcacaccccuaucaaccucgugcgggaucugccucagggcuucucugcucuggaaccccugguggaucugcccaucggcaucaacaucacccgguuucagacacugcuggcccugcacagaagcuaccugacaccuggcgauagcagcagcggauggacagcuggugccgccgcuuacuaugugggcuaccugcagccuagaaccuuccugcugaaguacaacgagaacggcaccaucaccgacgccguggauugugcucuggauccucugagcgagacaaagugcacccugaaguccuucaccguggaaaagggcaucuaccagaccagcaacuuccgggugcagcccaccgaauccaucgugcgguuccccaauaucaccaaucugugccccuucggcgagguguucaaugccaccagauucgccucuguguacgccuggaaccggaagcggaucagcaauugcguggccgacuacuccgugcuguacaacuccgccagcuucagcaccuucaagugcuacggcguguccccuaccaagcugaacgaccugugcuucacaaacguguacgccgacagcuucgugauccggggagaugaagugcggcagauugccccuggacagacaggcaagaucgccgacuacaacuacaagcugcccgacgacuucaccggcugugugauugccuggaacagcaacaaccuggacuccaaagucggcggcaacuacaauuaccuguaccggcuguuccggaaguccaaucugaagcccuucgagcgggacaucagcaccgaaaucuaucaggccggcagcaccccuugcaacggcguggaaggcuucaacugcuacuucccacugcaguccuacggcuuucagcccacaaauggcgugggcuaucagcccuacagagugguggugcugagcuucgaacugcugcaugcuccugccacagugugcggcccuaagaaaagcaccaaucucgugaagaacaaaugcgugaacuucaacuucaacggccugaccggcaccggcgugcugacagagagcaacaagaaguuccugccauuccagcaguuuggccgggauaucgccgauaccacagacgccguuagagauccccagacacuggaaauccuggacaucaccccaugcagcuucggcggagugucugugaucaccccuggcaccaacaccagcaaucagguggcagugcuguaccaggacgugaacuguaccgaagugcccguggccauucacgccgaucagcugacaccuacauggcggguguacuccaccggcagcaauguguuucagaccagagccggcugucugaucggagccgagcacgugaacaauagcuacgagugcgacauccccaucggcgcuggcaucugugccagcuaccagacacagacaaacagccccagacgggcuagaagcguggccagccagagcaucauugccuacacaaugucucugggcgccgagaacagcguggccuacuccaacaacucuaucgcuauccccaccaacuucaccaucagcgugaccaccgagauccugccuguguccaugaccaagaccagcguggacugcaccauguacaucugcggcgauuccaccgagugcuccaaccugcugcugcaguacggcagcuucugcacccagcugaauagagcccugacagggaucgccguggaacaggacaagaacacccaagagguguucgcccaagugaagcaaaucuacaagaccccuccuaucaaggacuucggcggcuucaauuucagccagauucugcccgauccuagcaagcccagcaagcggagcuucaucgaggaccugcuguucaacaaagugacacuggccgacgccggcuucaucaagcaguauggcgauugucugggcgacauugccgccagggaucugauuugcgcccagaaguuuaacggacugacagugcugccuccucugcugaccgaugagaugaucgcccaguacacaucugcccugcuggccggcacaaucacaagcggcuggugguuuggagcuggcgccgcucugcagauccccuuugcuaugcagauggccuaccgguucaacggcaucggagugacccagaaugugcuguacgagaaccagaagcugaucgccaaccaguucaacagcgccaucggcaagauccaggacagccugagcagcacagcaagcgcccugggaaagcugcaggacguggucaaccagaaugcccaggcacugaacacccuggucaagcagcuguccuccaacuucggcgccaucagcucugugcugaacgauauccugagcagacuggacccuccugaggccgaggugcagaucgacagacugaucacaggcagacugcagagccuccagacauacgugacccagcagcugaucagagccgccgagauuagauggucugccaaucuggccgccaccaagaugucugagugugugcugggccagagcaagagaguggacuuuugcggcaagggcuaccaccugaugagcuucccucagucugccccucacggcgugguguuucugcacgugacauaugugcccgcucaagagaagaauuucaccaccgcuccagccaucugccacgacggcaaagcccacuuuccuagagaaggcguguucguguccaacggcacccauugguucgugacacagcggaacuucuacgagccccagaucaucaccaccgacaacaccuucgugucuggcaacugcgacguugugaucggcauugugaacaauaccguguacgacccucugcagcccgagcuggacagcuucaaagaggaacuggacaaguacuuuaagaaccacacaagccccgacguggaccugggcgauaucagcggaaucaaugccagcgucgugaacauccagaaagagaucgaccggcugaacgagguggccaagaaucugaacgagagccugaucgaccugcaagaacuggggaaguacgagcaguacaucaagggaggaucuggcuauauccccgaggcuccuagagauggccaggccuauguucggaaggauggcgaaugggugcugcugagcaccuuccuuuga

SEQ ID NO: 12117 - RNA, 3726 nt, Artificial Sequence
  SARS-CoV-2/Wuhan/WIV05/2019__EPI_ISL_402128 spike protein CDS gc mod (1-1211)(K986P_V987P_P1069F) Foldon construct
auguucguguuucuggugcugcugccccugguguccagccagugugugaaccugaccaccagaacacagcugccuccagccuacaccaacagcuucaccagaggcguguacuaccccgacaagguguucagauccagcgugcugcacucuacccaggaccuguuccugccuuucuucagcaacgugaccugguuccacgccauccacguguccggcaccaauggcaccaagagauucgacaaccccgugcugcccuucaacgacgggguguacuuugccagcaccgagaaguccaacaucaucagaggcuggaucuucggcaccacacuggacagcaagacccagagccugcugaucgugaacaacgccaccaacguggucaucaaagugugcgaguuccaguucugcaacgaccccuuccugggcgucuacuaccacaagaacaacaagagcuggauggaaagcgaguuccggguguacagcagcgccaacaacugcaccuucgaguacgugucccagccuuuccugauggaccuggaaggcaagcagggcaacuucaagaaccugcgcgaguucguguucaagaacaucgacggcuacuucaaaaucuacagcaagcacaccccuaucaaccucgugcgggaucugccucagggcuucucugcucuggaaccccugguggaucugcccaucggcaucaacaucacccgguuucagacacugcuggcccugcacagaagcuaccugacaccuggcgauagcagcagcggauggacagcuggugccgccgcuuacuaugugggcuaccugcagccuagaaccuuccugcugaaguacaacgagaacggcaccaucaccgacgccguggauugugcucuggauccucugagcgagacaaagugcacccugaaguccuucaccguggaaaagggcaucuaccagaccagcaacuuccgggugcagcccaccgaauccaucgugcgguuccccaauaucaccaaucugugccccuucggcgagguguucaaugccaccagauucgccucuguguacgccuggaaccggaagcggaucagcaauugcguggccgacuacuccgugcuguacaacuccgccagcuucagcaccuucaagugcuacggcguguccccuaccaagcugaacgaccugugcuucacaaacguguacgccgacagcuucgugauccggggagaugaagugcggcagauugccccuggacagacaggcaagaucgccgacuacaacuacaagcugcccgacgacuucaccggcugugugauugccuggaacagcaacaaccuggacuccaaagucggcggcaacuacaauuaccuguaccggcuguuccggaaguccaaucugaagcccuucgagcgggacaucagcaccgaaaucuaucaggccggcagcaccccuugcaacggcguggaaggcuucaacugcuacuucccacugcaguccuacggcuuucagcccacaaauggcgugggcuaucagcccuacagagugguggugcugagcuucgaacugcugcaugcuccugccacagugugcggcccuaagaaaagcaccaaucucgugaagaacaaaugcgugaacuucaacuucaacggccugaccggcaccggcgugcugacagagagcaacaagaaguuccugccauuccagcaguuuggccgggauaucgccgauaccacagacgccguuagagauccccagacacuggaaauccuggacaucaccccaugcagcuucggcggagugucugugaucaccccuggcaccaacaccagcaaucagguggcagugcuguaccaggacgugaacuguaccgaagugcccguggccauucacgccgaucagcugacaccuacauggcggguguacuccaccggcagcaauguguuucagaccagagccggcugucugaucggagccgagcacgugaacaauagcuacgagugcgacauccccaucggcgcuggcaucugugccagcuaccagacacagacaaacagccccagacgggcuagaagcguggccagccagagcaucauugccuacacaaugucucugggcgccgagaacagcguggccuacuccaacaacucuaucgcuauccccaccaacuucaccaucagcgugaccaccgagauccugccuguguccaugaccaagaccagcguggacugcaccauguacaucugcggcgauuccaccgagugcuccaaccugcugcugcaguacggcagcuucugcacccagcugaauagagcccugacagggaucgccguggaacaggacaagaacacccaagagguguucgcccaagugaagcaaaucuacaagaccccuccuaucaaggacuucggcggcuucaauuucagccagauucugcccgauccuagcaagcccagcaagcggagcuucaucgaggaccugcuguucaacaaagugacacuggccgacgccggcuucaucaagcaguauggcgauugucugggcgacauugccgccagggaucugauuugcgcccagaaguuuaacggacugacagugcugccuccucugcugaccgaugagaugaucgcccaguacacaucugcccugcuggccggcacaaucacaagcggcuggacauuuggagcuggcgccgcucugcagauccccuuugcuaugcagauggccuaccgguucaacggcaucggagugacccagaaugugcuguacgagaaccagaagcugaucgccaaccaguucaacagcgccaucggcaagauccaggacagccugagcagcacagcaagcgcccugggaaagcugcaggacguggucaaccagaaugcccaggcacugaacacccuggucaagcagcuguccuccaacuucggcgccaucagcucugugcugaacgauauccugagcagacuggacccuccugaggccgaggugcagaucgacagacugaucacaggcagacugcagagccuccagacauacgugacccagcagcugaucagagccgccgagauuagagccucugccaaucuggccgccaccaagaugucugagugugugcugggccagagcaagagaguggacuuuugcggcaagggcuaccaccugaugagcuucccucagucugccccucacggcgugguguuucugcacgugacauauguguucgcucaagagaagaauuucaccaccgcuccagccaucugccacgacggcaaagcccacuuuccuagagaaggcguguucguguccaacggcacccauugguucgugacacagcggaacuucuacgagccccagaucaucaccaccgacaacaccuucgugucuggcaacugcgacguugugaucggcauugugaacaauaccguguacgacccucugcagcccgagcuggacagcuucaaagaggaacuggacaaguacuuuaagaaccacacaagccccgacguggaccugggcgauaucagcggaaucaaugccagcgucgugaacauccagaaagagaucgaccggcugaacgagguggccaagaaucugaacgagagccugaucgaccugcaagaacuggggaaguacgagcaguacaucaagggaggaucuggcuauauccccgaggcuccuagagauggccaggccuauguucggaaggauggcgaaugggugcugcugagcaccuuccuuuga

SEQ ID NO: 12118 - RNA, 3726 nt, Artificial Sequence
  SARS-CoV-2/Wuhan/WIV05/2019__EPI_ISL_402128 spike protein CDS gc mod (1-1211)(K986P_V987P_ H1048Q_H1064N_ H1083N_H1101N) Foldon construct
auguucguguuucuggugcugcugccccugguguccagccagugugugaaccugaccaccagaacacagcugccuccagccuacaccaacagcuucaccagaggcguguacuaccccgacaagguguucagauccagcgugcugcacucuacccaggaccuguuccugccuuucuucagcaacgugaccugguuccacgccauccacguguccggcaccaauggcaccaagagauucgacaaccccgugcugcccuucaacgacgggguguacuuugccagcaccgagaaguccaacaucaucagaggcuggaucuucggcaccacacuggacagcaagacccagagccugcugaucgugaacaacgccaccaacguggucaucaaagugugcgaguuccaguucugcaacgaccccuuccugggcgucuacuaccacaagaacaacaagagcuggauggaaagcgaguuccggguguacagcagcgccaacaacugcaccuucgaguacgugucccagccuuuccugauggaccuggaaggcaagcagggcaacuucaagaaccugcgcgaguucguguucaagaacaucgacggcuacuucaaaaucuacagcaagcacaccccuaucaaccucgugcgggaucugccucagggcuucucugcucuggaaccccugguggaucugcccaucggcaucaacaucacccgguuucagacacugcuggcccugcacagaagcuaccugacaccuggcgauagcagcagcggauggacagcuggugccgccgcuuacuaugugggcuaccugcagccuagaaccuuccugcugaaguacaacgagaacggcaccaucaccgacgccguggauugugcucuggauccucugagcgagacaaagugcacccugaaguccuucaccguggaaaagggcaucuaccagaccagcaacuuccgggugcagcccaccgaauccaucgugcgguuccccaauaucaccaaucugugccccuucggcgagguguucaaugccaccagauucgccucuguguacgccuggaaccggaagcggaucagcaauugcguggccgacuacuccgugcuguacaacuccgccagcuucagcaccuucaagugcuacggcguguccccuaccaagcugaacgaccugugcuucacaaacguguacgccgacagcuucgugauccggggagaugaagugcggcagauugccccuggacagacaggcaagaucgccgacuacaacuacaagcugcccgacgacuucaccggcugugugauugccuggaacagcaacaaccuggacuccaaagucggcggcaacuacaauuaccuguaccggcuguuccggaaguccaaucugaagcccuucgagcgggacaucagcaccgaaaucuaucaggccggcagcaccccuugcaacggcguggaaggcuucaacugcuacuucccacugcaguccuacggcuuucagcccacaaauggcgugggcuaucagcccuacagagugguggugcugagcuucgaacugcugcaugcuccugccacagugugcggcccuaagaaaagcaccaaucucgugaagaacaaaugcgugaacuucaacuucaacggccugaccggcaccggcgugcugacagagagcaacaagaaguuccugccauuccagcaguuuggccgggauaucgccgauaccacagacgccguuagagauccccagacacuggaaauccuggacaucaccccaugcagcuucggcggagugucugugaucaccccuggcaccaacaccagcaaucagguggcagugcuguaccaggacgugaacuguaccgaagugcccguggccauucacgccgaucagcugacaccuacauggcggguguacuccaccggcagcaauguguuucagaccagagccggcugucugaucggagccgagcacgugaacaauagcuacgagugcgacauccccaucggcgcuggcaucugugccagcuaccagacacagacaaacagccccagacgggcuagaagcguggccagccagagcaucauugccuacacaaugucucugggcgccgagaacagcguggccuacuccaacaacucuaucgcuauccccaccaacuucaccaucagcgugaccaccgagauccugccuguguccaugaccaagaccagcguggacugcaccauguacaucugcggcgauuccaccgagugcuccaaccugcugcugcaguacggcagcuucugcacccagcugaauagagcccugacagggaucgccguggaacaggacaagaacacccaagagguguucgcccaagugaagcaaaucuacaagaccccuccuaucaaggacuucggcggcuucaauuucagccagauucugcccgauccuagcaagcccagcaagcggagcuucaucgaggaccugcuguucaacaaagugacacuggccgacgccggcuucaucaagcaguauggcgauugucugggcgacauugccgccagggaucugauuugcgcccagaaguuuaacggacugacagugcugccuccucugcugaccgaugagaugaucgcccaguacacaucugcccugcuggccggcacaaucacaagcggcuggacauuuggagcuggcgccgcucugcagauccccuuugcuaugcagauggccuaccgguucaacggcaucggagugacccagaaugugcuguacgagaaccagaagcugaucgccaaccaguucaacagcgccaucggcaagauccaggacagccugagcagcacagcaagcgcccugggaaagcugcaggacguggucaaccagaaugcccaggcacugaacacccuggucaagcagcuguccuccaacuucggcgccaucagcucugugcugaacgauauccugagcagacuggacccuccugaggccgaggugcagaucgacagacugaucacaggcagacugcagagccuccagacauacgugacccagcagcugaucagagccgccgagauuagagccucugccaaucuggccgccaccaagaugucugagugugugcugggccagagcaagagaguggacuuuugcggcaagggcuaccagcugaugagcuucccucagucugccccucacggcgugguguuucugaacgugacauaugugcccgcucaagagaagaauuucaccaccgcuccagccaucugcaacgacggcaaagcccacuuuccuagagaaggcguguucguguccaacggcaccaacugguucgugacacagcggaacuucuacgagccccagaucaucaccaccgacaacaccuucgugucuggcaacugcgacguugugaucggcauugugaacaauaccguguacgacccucugcagcccgagcuggacagcuucaaagaggaacuggacaaguacuuuaagaaccacacaagccccgacguggaccugggcgauaucagcggaaucaaugccagcgucgugaacauccagaaagagaucgaccggcugaacgagguggccaagaaucugaacgagagccugaucgaccugcaagaacuggggaaguacgagcaguacaucaagggaggaucuggcuauauccccgaggcuccuagagauggccaggccuauguucggaaggauggcgaaugggugcugcugagcaccuuccuuuga

SEQ ID NO: 12119 - RNA, 3726 nt, Artificial Sequence
  SARS-CoV-2/Wuhan/WIV05/2019__EPI_ISL_402128 spike protein CDS gc mod (1-1211)(I712C_T1077C) Foldon construct
auguucguguuucuggugcugcugccccugguguccagccagugugugaaccugaccaccagaacacagcugccuccagccuacaccaacagcuucaccagaggcguguacuaccccgacaagguguucagauccagcgugcugcacucuacccaggaccuguuccugccuuucuucagcaacgugaccugguuccacgccauccacguguccggcaccaauggcaccaagagauucgacaaccccgugcugcccuucaacgacgggguguacuuugccagcaccgagaaguccaacaucaucagaggcuggaucuucggcaccacacuggacagcaagacccagagccugcugaucgugaacaacgccaccaacguggucaucaaagugugcgaguuccaguucugcaacgaccccuuccugggcgucuacuaccacaagaacaacaagagcuggauggaaagcgaguuccggguguacagcagcgccaacaacugcaccuucgaguacgugucccagccuuuccugauggaccuggaaggcaagcagggcaacuucaagaaccugcgcgaguucguguucaagaacaucgacggcuacuucaaaaucuacagcaagcacaccccuaucaaccucgugcgggaucugccucagggcuucucugcucuggaaccccugguggaucugcccaucggcaucaacaucacccgguuucagacacugcuggcccugcacagaagcuaccugacaccuggcgauagcagcagcggauggacagcuggugccgccgcuuacuaugugggcuaccugcagccuagaaccuuccugcugaaguacaacgagaacggcaccaucaccgacgccguggauugugcucuggauccucugagcgagacaaagugcacccugaaguccuucaccguggaaaagggcaucuaccagaccagcaacuuccgggugcagcccaccgaauccaucgugcgguuccccaauaucaccaaucugugccccuucggcgagguguucaaugccaccagauucgccucuguguacgccuggaaccggaagcggaucagcaauugcguggccgacuacuccgugcuguacaacuccgccagcuucagcaccuucaagugcuacggcguguccccuaccaagcugaacgaccugugcuucacaaacguguacgccgacagcuucgugauccggggagaugaagugcggcagauugccccuggacagacaggcaagaucgccgacuacaacuacaagcugcccgacgacuucaccggcugugugauugccuggaacagcaacaaccuggacuccaaagucggcggcaacuacaauuaccuguaccggcuguuccggaaguccaaucugaagcccuucgagcgggacaucagcaccgaaaucuaucaggccggcagcaccccuugcaacggcguggaaggcuucaacugcuacuucccacugcaguccuacggcuuucagcccacaaauggcgugggcuaucagcccuacagagugguggugcugagcuucgaacugcugcaugcuccugccacagugugcggcccuaagaaaagcaccaaucucgugaagaacaaaugcgugaacuucaacuucaacggccugaccggcaccggcgugcugacagagagcaacaagaaguuccugccauuccagcaguuuggccgggauaucgccgauaccacagacgccguuagagauccccagacacuggaaauccuggacaucaccccaugcagcuucggcggagugucugugaucaccccuggcaccaacaccagcaaucagguggcagugcuguaccaggacgugaacuguaccgaagugcccguggccauucacgccgaucagcugacaccuacauggcggguguacuccaccggcagcaauguguuucagaccagagccggcugucugaucggagccgagcacgugaacaauagcuacgagugcgacauccccaucggcgcuggcaucugugccagcuaccagacacagacaaacagccccagacgggcuagaagcguggccagccagagcaucauugccuacacaaugucucugggcgccgagaacagcguggccuacuccaacaacucuugcgcuauccccaccaacuucaccaucagcgugaccaccgagauccugccuguguccaugaccaagaccagcguggacugcaccauguacaucugcggcgauuccaccgagugcuccaaccugcugcugcaguacggcagcuucugcacccagcugaauagagcccugacagggaucgccguggaacaggacaagaacacccaagagguguucgcccaagugaagcaaaucuacaagaccccuccuaucaaggacuucggcggcuucaauuucagccagauucugcccgauccuagcaagcccagcaagcggagcuucaucgaggaccugcuguucaacaaagugacacuggccgacgccggcuucaucaagcaguauggcgauugucugggcgacauugccgccagggaucugauuugcgcccagaaguuuaacggacugacagugcugccuccucugcugaccgaugagaugaucgcccaguacacaucugcccugcuggccggcacaaucacaagcggcuggacauuuggagcuggcgccgcucugcagauccccuuugcuaugcagauggccuaccgguucaacggcaucggagugacccagaaugugcuguacgagaaccagaagcugaucgccaaccaguucaacagcgccaucggcaagauccaggacagccugagcagcacagcaagcgcccugggaaagcugcaggacguggucaaccagaaugcccaggcacugaacacccuggucaagcagcuguccuccaacuucggcgccaucagcucugugcugaacgauauccugagcagacuggacaaggucgaggccgaggugcagaucgacagacugaucacaggcagacugcagagccuccagacauacgugacccagcagcugaucagagccgccgagauuagagccucugccaaucuggccgccaccaagaugucugagugugugcugggccagagcaagagaguggacuuuugcggcaagggcuaccaccugaugagcuucccucagucugccccucacggcgugguguuucugcacgugacauaugugcccgcucaagagaagaauuucaccugugcuccagccaucugccacgacggcaaagcccacuuuccuagagaaggcguguucguguccaacggcacccauugguucgugacacagcggaacuucuacgagccccagaucaucaccaccgacaacaccuucgugucuggcaacugcgacguugugaucggcauugugaacaauaccguguacgacccucugcagcccgagcuggacagcuucaaagaggaacuggacaaguacuuuaagaaccacacaagccccgacguggaccugggcgauaucagcggaaucaaugccagcgucgugaacauccagaaagagaucgaccggcugaacgagguggccaagaaucugaacgagagccugaucgaccugcaagaacuggggaaguacgagcaguacaucaagggaggaucuggcuauauccccgaggcuccuagagauggccaggccuauguucggaaggauggcgaaugggugcugcugagcaccuuccuuuga

SEQ ID NO: 12120 - RNA, 3726 nt, Artificial Sequence
  SARS-CoV-2/Wuhan/WIV05/2019__EPI_ISL_402128 spike protein CDS gc mod (1-1211)(I714C_Y1110C) Foldon construct
auguucguguuucuggugcugcugccccugguguccagccagugugugaaccugaccaccagaacacagcugccuccagccuacaccaacagcuucaccagaggcguguacuaccccgacaagguguucagauccagcgugcugcacucuacccaggaccuguuccugccuuucuucagcaacgugaccugguuccacgccauccacguguccggcaccaauggcaccaagagauucgacaaccccgugcugcccuucaacgacgggguguacuuugccagcaccgagaaguccaacaucaucagaggcuggaucuucggcaccacacuggacagcaagacccagagccugcugaucgugaacaacgccaccaacguggucaucaaagugugcgaguuccaguucugcaacgaccccuuccugggcgucuacuaccacaagaacaacaagagcuggauggaaagcgaguuccggguguacagcagcgccaacaacugcaccuucgaguacgugucccagccuuuccugauggaccuggaaggcaagcagggcaacuucaagaaccugcgcgaguucguguucaagaacaucgacggcuacuucaaaaucuacagcaagcacaccccuaucaaccucgugcgggaucugccucagggcuucucugcucuggaaccccugguggaucugcccaucggcaucaacaucacccgguuucagacacugcuggcccugcacagaagcuaccugacaccuggcgauagcagcagcggauggacagcuggugccgccgcuuacuaugugggcuaccugcagccuagaaccuuccugcugaaguacaacgagaacggcaccaucaccgacgccguggauugugcucuggauccucugagcgagacaaagugcacccugaaguccuucaccguggaaaagggcaucuaccagaccagcaacuuccgggugcagcccaccgaauccaucgugcgguuccccaauaucaccaaucugugccccuucggcgagguguucaaugccaccagauucgccucuguguacgccuggaaccggaagcggaucagcaauugcguggccgacuacuccgugcuguacaacuccgccagcuucagcaccuucaagugcuacggcguguccccuaccaagcugaacgaccugugcuucacaaacguguacgccgacagcuucgugauccggggagaugaagugcggcagauugccccuggacagacaggcaagaucgccgacuacaacuacaagcugcccgacgacuucaccggcugugugauugccuggaacagcaacaaccuggacuccaaagucggcggcaacuacaauuaccuguaccggcuguuccggaaguccaaucugaagcccuucgagcgggacaucagcaccgaaaucuaucaggccggcagcaccccuugcaacggcguggaaggcuucaacugcuacuucccacugcaguccuacggcuuucagcccacaaauggcgugggcuaucagcccuacagagugguggugcugagcuucgaacugcugcaugcuccugccacagugugcggcccuaagaaaagcaccaaucucgugaagaacaaaugcgugaacuucaacuucaacggccugaccggcaccggcgugcugacagagagcaacaagaaguuccugccauuccagcaguuuggccgggauaucgccgauaccacagacgccguuagagauccccagacacuggaaauccuggacaucaccccaugcagcuucggcggagugucugugaucaccccuggcaccaacaccagcaaucagguggcagugcuguaccaggacgugaacuguaccgaagugcccguggccauucacgccgaucagcugacaccuacauggcggguguacuccaccggcagcaauguguuucagaccagagccggcugucugaucggagccgagcacgugaacaauagcuacgagugcgacauccccaucggcgcuggcaucugugccagcuaccagacacagacaaacagccccagacgggcuagaagcguggccagccagagcaucauugccuacacaaugucucugggcgccgagaacagcguggccuacuccaacaacucuaucgcuugccccaccaacuucaccaucagcgugaccaccgagauccugccuguguccaugaccaagaccagcguggacugcaccauguacaucugcggcgauuccaccgagugcuccaaccugcugcugcaguacggcagcuucugcacccagcugaauagagcccugacagggaucgccguggaacaggacaagaacacccaagagguguucgcccaagugaagcaaaucuacaagaccccuccuaucaaggacuucggcggcuucaauuucagccagauucugcccgauccuagcaagcccagcaagcggagcuucaucgaggaccugcuguucaacaaagugacacuggccgacgccggcuucaucaagcaguauggcgauugucugggcgacauugccgccagggaucugauuugcgcccagaaguuuaacggacugacagugcugccuccucugcugaccgaugagaugaucgcccaguacacaucugcccugcuggccggcacaaucacaagcggcuggacauuuggagcuggcgccgcucugcagauccccuuugcuaugcagauggccuaccgguucaacggcaucggagugacccagaaugugcuguacgagaaccagaagcugaucgccaaccaguucaacagcgccaucggcaagauccaggacagccugagcagcacagcaagcgcccugggaaagcugcaggacguggucaaccagaaugcccaggcacugaacacccuggucaagcagcuguccuccaacuucggcgccaucagcucugugcugaacgauauccugagcagacuggacaaggucgaggccgaggugcagaucgacagacugaucacaggcagacugcagagccuccagacauacgugacccagcagcugaucagagccgccgagauuagagccucugccaaucuggccgccaccaagaugucugagugugugcugggccagagcaagagaguggacuuuugcggcaagggcuaccaccugaugagcuucccucagucugccccucacggcgugguguuucugcacgugacauaugugcccgcucaagagaagaauuucaccaccgcuccagccaucugccacgacggcaaagcccacuuuccuagagaaggcguguucguguccaacggcacccauugguucgugacacagcggaacuucugugagccccagaucaucaccaccgacaacaccuucgugucuggcaacugcgacguugugaucggcauugugaacaauaccguguacgacccucugcagcccgagcuggacagcuucaaagaggaacuggacaaguacuuuaagaaccacacaagccccgacguggaccugggcgauaucagcggaaucaaugccagcgucgugaacauccagaaagagaucgaccggcugaacgagguggccaagaaucugaacgagagccugaucgaccugcaagaacuggggaaguacgagcaguacaucaagggaggaucuggcuauauccccgaggcuccuagagauggccaggccuauguucggaaggauggcgaaugggugcugcugagcaccuuccuuuga

SEQ ID NO: 12121 - RNA, 3726 nt, Artificial Sequence
  SARS-CoV-2/Wuhan/WIV05/2019__EPI_ISL_402128 spike protein CDS gc mod (1-1211)(P715C_P1069C) Foldon construct
auguucguguuucuggugcugcugccccugguguccagccagugugugaaccugaccaccagaacacagcugccuccagccuacaccaacagcuucaccagaggcguguacuaccccgacaagguguucagauccagcgugcugcacucuacccaggaccuguuccugccuuucuucagcaacgugaccugguuccacgccauccacguguccggcaccaauggcaccaagagauucgacaaccccgugcugcccuucaacgacgggguguacuuugccagcaccgagaaguccaacaucaucagaggcuggaucuucggcaccacacuggacagcaagacccagagccugcugaucgugaacaacgccaccaacguggucaucaaagugugcgaguuccaguucugcaacgaccccuuccugggcgucuacuaccacaagaacaacaagagcuggauggaaagcgaguuccggguguacagcagcgccaacaacugcaccuucgaguacgugucccagccuuuccugauggaccuggaaggcaagcagggcaacuucaagaaccugcgcgaguucguguucaagaacaucgacggcuacuucaaaaucuacagcaagcacaccccuaucaaccucgugcgggaucugccucagggcuucucugcucuggaaccccugguggaucugcccaucggcaucaacaucacccgguuucagacacugcuggcccugcacagaagcuaccugacaccuggcgauagcagcagcggauggacagcuggugccgccgcuuacuaugugggcuaccugcagccuagaaccuuccugcugaaguacaacgagaacggcaccaucaccgacgccguggauugugcucuggauccucugagcgagacaaagugcacccugaaguccuucaccguggaaaagggcaucuaccagaccagcaacuuccgggugcagcccaccgaauccaucgugcgguuccccaauaucaccaaucugugccccuucggcgagguguucaaugccaccagauucgccucuguguacgccuggaaccggaagcggaucagcaauugcguggccgacuacuccgugcuguacaacuccgccagcuucagcaccuucaagugcuacggcguguccccuaccaagcugaacgaccugugcuucacaaacguguacgccgacagcuucgugauccggggagaugaagugcggcagauugccccuggacagacaggcaagaucgccgacuacaacuacaagcugcccgacgacuucaccggcugugugauugccuggaacagcaacaaccuggacuccaaagucggcggcaacuacaauuaccuguaccggcuguuccggaaguccaaucugaagcccuucgagcgggacaucagcaccgaaaucuaucaggccggcagcaccccuugcaacggcguggaaggcuucaacugcuacuucccacugcaguccuacggcuuucagcccacaaauggcgugggcuaucagcccuacagagugguggugcugagcuucgaacugcugcaugcuccugccacagugugcggcccuaagaaaagcaccaaucucgugaagaacaaaugcgugaacuucaacuucaacggccugaccggcaccggcgugcugacagagagcaacaagaaguuccugccauuccagcaguuuggccgggauaucgccgauaccacagacgccguuagagauccccagacacuggaaauccuggacaucaccccaugcagcuucggcggagugucugugaucaccccuggcaccaacaccagcaaucagguggcagugcuguaccaggacgugaacuguaccgaagugcccguggccauucacgccgaucagcugacaccuacauggcggguguacuccaccggcagcaauguguuucagaccagagccggcugucugaucggagccgagcacgugaacaauagcuacgagugcgacauccccaucggcgcuggcaucugugccagcuaccagacacagacaaacagccccagacgggcuagaagcguggccagccagagcaucauugccuacacaaugucucugggcgccgagaacagcguggccuacuccaacaacucuaucgcuaucugcaccaacuucaccaucagcgugaccaccgagauccugccuguguccaugaccaagaccagcguggacugcaccauguacaucugcggcgauuccaccgagugcuccaaccugcugcugcaguacggcagcuucugcacccagcugaauagagcccugacagggaucgccguggaacaggacaagaacacccaagagguguucgcccaagugaagcaaaucuacaagaccccuccuaucaaggacuucggcggcuucaauuucagccagauucugcccgauccuagcaagcccagcaagcggagcuucaucgaggaccugcuguucaacaaagugacacuggccgacgccggcuucaucaagcaguauggcgauugucugggcgacauugccgccagggaucugauuugcgcccagaaguuuaacggacugacagugcugccuccucugcugaccgaugagaugaucgcccaguacacaucugcccugcuggccggcacaaucacaagcggcuggacauuuggagcuggcgccgcucugcagauccccuuugcuaugcagauggccuaccgguucaacggcaucggagugacccagaaugugcuguacgagaaccagaagcugaucgccaaccaguucaacagcgccaucggcaagauccaggacagccugagcagcacagcaagcgcccugggaaagcugcaggacguggucaaccagaaugcccaggcacugaacacccuggucaagcagcuguccuccaacuucggcgccaucagcucugugcugaacgauauccugagcagacuggacaaggucgaggccgaggugcagaucgacagacugaucacaggcagacugcagagccuccagacauacgugacccagcagcugaucagagccgccgagauuagagccucugccaaucuggccgccaccaagaugucugagugugugcugggccagagcaagagaguggacuuuugcggcaagggcuaccaccugaugagcuucccucagucugccccucacggcgugguguuucugcacgugacauaugugugugcucaagagaagaauuucaccaccgcuccagccaucugccacgacggcaaagcccacuuuccuagagaaggcguguucguguccaacggcacccauugguucgugacacagcggaacuucuacgagccccagaucaucaccaccgacaacaccuucgugucuggcaacugcgacguugugaucggcauugugaacaauaccguguacgacccucugcagcccgagcuggacagcuucaaagaggaacuggacaaguacuuuaagaaccacacaagccccgacguggaccugggcgauaucagcggaaucaaugccagcgucgugaacauccagaaagagaucgaccggcugaacgagguggccaagaaucugaacgagagccugaucgaccugcaagaacuggggaaguacgagcaguacaucaagggaggaucuggcuauauccccgaggcuccuagagauggccaggccuauguucggaaggauggcgaaugggugcugcugagcaccuuccuuuga

SEQ ID NO: 12122 - RNA, 3726 nt, Artificial Sequence
  SARS-CoV-2/Wuhan/WIV05/2019__EPI_ISL_402128 spike protein CDS gc mod (1-1211)(G889C_L1034C) Foldon construct
auguucguguuucuggugcugcugccccugguguccagccagugugugaaccugaccaccagaacacagcugccuccagccuacaccaacagcuucaccagaggcguguacuaccccgacaagguguucagauccagcgugcugcacucuacccaggaccuguuccugccuuucuucagcaacgugaccugguuccacgccauccacguguccggcaccaauggcaccaagagauucgacaaccccgugcugcccuucaacgacgggguguacuuugccagcaccgagaaguccaacaucaucagaggcuggaucuucggcaccacacuggacagcaagacccagagccugcugaucgugaacaacgccaccaacguggucaucaaagugugcgaguuccaguucugcaacgaccccuuccugggcgucuacuaccacaagaacaacaagagcuggauggaaagcgaguuccggguguacagcagcgccaacaacugcaccuucgaguacgugucccagccuuuccugauggaccuggaaggcaagcagggcaacuucaagaaccugcgcgaguucguguucaagaacaucgacggcuacuucaaaaucuacagcaagcacaccccuaucaaccucgugcgggaucugccucagggcuucucugcucuggaaccccugguggaucugcccaucggcaucaacaucacccgguuucagacacugcuggcccugcacagaagcuaccugacaccuggcgauagcagcagcggauggacagcuggugccgccgcuuacuaugugggcuaccugcagccuagaaccuuccugcugaaguacaacgagaacggcaccaucaccgacgccguggauugugcucuggauccucugagcgagacaaagugcacccugaaguccuucaccguggaaaagggcaucuaccagaccagcaacuuccgggugcagcccaccgaauccaucgugcgguuccccaauaucaccaaucugugccccuucggcgagguguucaaugccaccagauucgccucuguguacgccuggaaccggaagcggaucagcaauugcguggccgacuacuccgugcuguacaacuccgccagcuucagcaccuucaagugcuacggcguguccccuaccaagcugaacgaccugugcuucacaaacguguacgccgacagcuucgugauccggggagaugaagugcggcagauugccccuggacagacaggcaagaucgccgacuacaacuacaagcugcccgacgacuucaccggcugugugauugccuggaacagcaacaaccuggacuccaaagucggcggcaacuacaauuaccuguaccggcuguuccggaaguccaaucugaagcccuucgagcgggacaucagcaccgaaaucuaucaggccggcagcaccccuugcaacggcguggaaggcuucaacugcuacuucccacugcaguccuacggcuuucagcccacaaauggcgugggcuaucagcccuacagagugguggugcugagcuucgaacugcugcaugcuccugccacagugugcggcccuaagaaaagcaccaaucucgugaagaacaaaugcgugaacuucaacuucaacggccugaccggcaccggcgugcugacagagagcaacaagaaguuccugccauuccagcaguuuggccgggauaucgccgauaccacagacgccguuagagauccccagacacuggaaauccuggacaucaccccaugcagcuucggcggagugucugugaucaccccuggcaccaacaccagcaaucagguggcagugcuguaccaggacgugaacuguaccgaagugcccguggccauucacgccgaucagcugacaccuacauggcggguguacuccaccggcagcaauguguuucagaccagagccggcugucugaucggagccgagcacgugaacaauagcuacgagugcgacauccccaucggcgcuggcaucugugccagcuaccagacacagacaaacagccccagacgggcuagaagcguggccagccagagcaucauugccuacacaaugucucugggcgccgagaacagcguggccuacuccaacaacucuaucgcuauccccaccaacuucaccaucagcgugaccaccgagauccugccuguguccaugaccaagaccagcguggacugcaccauguacaucugcggcgauuccaccgagugcuccaaccugcugcugcaguacggcagcuucugcacccagcugaauagagcccugacagggaucgccguggaacaggacaagaacacccaagagguguucgcccaagugaagcaaaucuacaagaccccuccuaucaaggacuucggcggcuucaauuucagccagauucugcccgauccuagcaagcccagcaagcggagcuucaucgaggaccugcuguucaacaaagugacacuggccgacgccggcuucaucaagcaguauggcgauugucugggcgacauugccgccagggaucugauuugcgcccagaaguuuaacggacugacagugcugccuccucugcugaccgaugagaugaucgcccaguacacaucugcccugcuggccggcacaaucacaagcggcuggacauuuugcgcuggcgccgcucugcagauccccuuugcuaugcagauggccuaccgguucaacggcaucggagugacccagaaugugcuguacgagaaccagaagcugaucgccaaccaguucaacagcgccaucggcaagauccaggacagccugagcagcacagcaagcgcccugggaaagcugcaggacguggucaaccagaaugcccaggcacugaacacccuggucaagcagcuguccuccaacuucggcgccaucagcucugugcugaacgauauccugagcagacuggacaaggucgaggccgaggugcagaucgacagacugaucacaggcagacugcagagccuccagacauacgugacccagcagcugaucagagccgccgagauuagagccucugccaaucuggccgccaccaagaugucugaguguguguguggccagagcaagagaguggacuuuugcggcaagggcuaccaccugaugagcuucccucagucugccccucacggcgugguguuucugcacgugacauaugugcccgcucaagagaagaauuucaccaccgcuccagccaucugccacgacggcaaagcccacuuuccuagagaaggcguguucguguccaacggcacccauugguucgugacacagcggaacuucuacgagccccagaucaucaccaccgacaacaccuucgugucuggcaacugcgacguugugaucggcauugugaacaauaccguguacgacccucugcagcccgagcuggacagcuucaaagaggaacuggacaaguacuuuaagaaccacacaagccccgacguggaccugggcgauaucagcggaaucaaugccagcgucgugaacauccagaaagagaucgaccggcugaacgagguggccaagaaucugaacgagagccugaucgaccugcaagaacuggggaaguacgagcaguacaucaagggaggaucuggcuauauccccgaggcuccuagagauggccaggccuauguucggaaggauggcgaaugggugcugcugagcaccuuccuuuga

SEQ ID NO: 12123 - RNA, 3726 nt, Artificial Sequence
  SARS-CoV-2/Wuhan/WIV05/2019__EPI_ISL_402128 spike protein CDS gc mod (1-1211)(I909C_Y1047C) Foldon construct
auguucguguuucuggugcugcugccccugguguccagccagugugugaaccugaccaccagaacacagcugccuccagccuacaccaacagcuucaccagaggcguguacuaccccgacaagguguucagauccagcgugcugcacucuacccaggaccuguuccugccuuucuucagcaacgugaccugguuccacgccauccacguguccggcaccaauggcaccaagagauucgacaaccccgugcugcccuucaacgacgggguguacuuugccagcaccgagaaguccaacaucaucagaggcuggaucuucggcaccacacuggacagcaagacccagagccugcugaucgugaacaacgccaccaacguggucaucaaagugugcgaguuccaguucugcaacgaccccuuccugggcgucuacuaccacaagaacaacaagagcuggauggaaagcgaguuccggguguacagcagcgccaacaacugcaccuucgaguacgugucccagccuuuccugauggaccuggaaggcaagcagggcaacuucaagaaccugcgcgaguucguguucaagaacaucgacggcuacuucaaaaucuacagcaagcacaccccuaucaaccucgugcgggaucugccucagggcuucucugcucuggaaccccugguggaucugcccaucggcaucaacaucacccgguuucagacacugcuggcccugcacagaagcuaccugacaccuggcgauagcagcagcggauggacagcuggugccgccgcuuacuaugugggcuaccugcagccuagaaccuuccugcugaaguacaacgagaacggcaccaucaccgacgccguggauugugcucuggauccucugagcgagacaaagugcacccugaaguccuucaccguggaaaagggcaucuaccagaccagcaacuuccgggugcagcccaccgaauccaucgugcgguuccccaauaucaccaaucugugccccuucggcgagguguucaaugccaccagauucgccucuguguacgccuggaaccggaagcggaucagcaauugcguggccgacuacuccgugcuguacaacuccgccagcuucagcaccuucaagugcuacggcguguccccuaccaagcugaacgaccugugcuucacaaacguguacgccgacagcuucgugauccggggagaugaagugcggcagauugccccuggacagacaggcaagaucgccgacuacaacuacaagcugcccgacgacuucaccggcugugugauugccuggaacagcaacaaccuggacuccaaagucggcggcaacuacaauuaccuguaccggcuguuccggaaguccaaucugaagcccuucgagcgggacaucagcaccgaaaucuaucaggccggcagcaccccuugcaacggcguggaaggcuucaacugcuacuucccacugcaguccuacggcuuucagcccacaaauggcgugggcuaucagcccuacagagugguggugcugagcuucgaacugcugcaugcuccugccacagugugcggcccuaagaaaagcaccaaucucgugaagaacaaaugcgugaacuucaacuucaacggccugaccggcaccggcgugcugacagagagcaacaagaaguuccugccauuccagcaguuuggccgggauaucgccgauaccacagacgccguuagagauccccagacacuggaaauccuggacaucaccccaugcagcuucggcggagugucugugaucaccccuggcaccaacaccagcaaucagguggcagugcuguaccaggacgugaacuguaccgaagugcccguggccauucacgccgaucagcugacaccuacauggcggguguacuccaccggcagcaauguguuucagaccagagccggcugucugaucggagccgagcacgugaacaauagcuacgagugcgacauccccaucggcgcuggcaucugugccagcuaccagacacagacaaacagccccagacgggcuagaagcguggccagccagagcaucauugccuacacaaugucucugggcgccgagaacagcguggccuacuccaacaacucuaucgcuauccccaccaacuucaccaucagcgugaccaccgagauccugccuguguccaugaccaagaccagcguggacugcaccauguacaucugcggcgauuccaccgagugcuccaaccugcugcugcaguacggcagcuucugcacccagcugaauagagcccugacagggaucgccguggaacaggacaagaacacccaagagguguucgcccaagugaagcaaaucuacaagaccccuccuaucaaggacuucggcggcuucaauuucagccagauucugcccgauccuagcaagcccagcaagcggagcuucaucgaggaccugcuguucaacaaagugacacuggccgacgccggcuucaucaagcaguauggcgauugucugggcgacauugccgccagggaucugauuugcgcccagaaguuuaacggacugacagugcugccuccucugcugaccgaugagaugaucgcccaguacacaucugcccugcuggccggcacaaucacaagcggcuggacauuuggagcuggcgccgcucugcagauccccuuugcuaugcagauggccuaccgguucaacggcugcggagugacccagaaugugcuguacgagaaccagaagcugaucgccaaccaguucaacagcgccaucggcaagauccaggacagccugagcagcacagcaagcgcccugggaaagcugcaggacguggucaaccagaaugcccaggcacugaacacccuggucaagcagcuguccuccaacuucggcgccaucagcucugugcugaacgauauccugagcagacuggacaaggucgaggccgaggugcagaucgacagacugaucacaggcagacugcagagccuccagacauacgugacccagcagcugaucagagccgccgagauuagagccucugccaaucuggccgccaccaagaugucugagugugugcugggccagagcaagagaguggacuuuugcggcaagggcugucaccugaugagcuucccucagucugccccucacggcgugguguuucugcacgugacauaugugcccgcucaagagaagaauuucaccaccgcuccagccaucugccacgacggcaaagcccacuuuccuagagaaggcguguucguguccaacggcacccauugguucgugacacagcggaacuucuacgagccccagaucaucaccaccgacaacaccuucgugucuggcaacugcgacguugugaucggcauugugaacaauaccguguacgacccucugcagcccgagcuggacagcuucaaagaggaacuggacaaguacuuuaagaaccacacaagccccgacguggaccugggcgauaucagcggaaucaaugccagcgucgugaacauccagaaagagaucgaccggcugaacgagguggccaagaaucugaacgagagccugaucgaccugcaagaacuggggaaguacgagcaguacaucaagggaggaucuggcuauauccccgaggcuccuagagauggccaggccuauguucggaaggauggcgaaugggugcugcugagcaccuuccuuuga

SEQ ID NO: 12124 - RNA, 3726 nt, Artificial Sequence
  SARS-CoV-2/Wuhan/WIV05/2019__EPI_ISL_402128 spike protein CDS gc mod (1-1211)(Q965C_S1003C) Foldon construct
auguucguguuucuggugcugcugccccugguguccagccagugugugaaccugaccaccagaacacagcugccuccagccuacaccaacagcuucaccagaggcguguacuaccccgacaagguguucagauccagcgugcugcacucuacccaggaccuguuccugccuuucuucagcaacgugaccugguuccacgccauccacguguccggcaccaauggcaccaagagauucgacaaccccgugcugcccuucaacgacgggguguacuuugccagcaccgagaaguccaacaucaucagaggcuggaucuucggcaccacacuggacagcaagacccagagccugcugaucgugaacaacgccaccaacguggucaucaaagugugcgaguuccaguucugcaacgaccccuuccugggcgucuacuaccacaagaacaacaagagcuggauggaaagcgaguuccggguguacagcagcgccaacaacugcaccuucgaguacgugucccagccuuuccugauggaccuggaaggcaagcagggcaacuucaagaaccugcgcgaguucguguucaagaacaucgacggcuacuucaaaaucuacagcaagcacaccccuaucaaccucgugcgggaucugccucagggcuucucugcucuggaaccccugguggaucugcccaucggcaucaacaucacccgguuucagacacugcuggcccugcacagaagcuaccugacaccuggcgauagcagcagcggauggacagcuggugccgccgcuuacuaugugggcuaccugcagccuagaaccuuccugcugaaguacaacgagaacggcaccaucaccgacgccguggauugugcucuggauccucugagcgagacaaagugcacccugaaguccuucaccguggaaaagggcaucuaccagaccagcaacuuccgggugcagcccaccgaauccaucgugcgguuccccaauaucaccaaucugugccccuucggcgagguguucaaugccaccagauucgccucuguguacgccuggaaccggaagcggaucagcaauugcguggccgacuacuccgugcuguacaacuccgccagcuucagcaccuucaagugcuacggcguguccccuaccaagcugaacgaccugugcuucacaaacguguacgccgacagcuucgugauccggggagaugaagugcggcagauugccccuggacagacaggcaagaucgccgacuacaacuacaagcugcccgacgacuucaccggcugugugauugccuggaacagcaacaaccuggacuccaaagucggcggcaacuacaauuaccuguaccggcuguuccggaaguccaaucugaagcccuucgagcgggacaucagcaccgaaaucuaucaggccggcagcaccccuugcaacggcguggaaggcuucaacugcuacuucccacugcaguccuacggcuuucagcccacaaauggcgugggcuaucagcccuacagagugguggugcugagcuucgaacugcugcaugcuccugccacagugugcggcccuaagaaaagcaccaaucucgugaagaacaaaugcgugaacuucaacuucaacggccugaccggcaccggcgugcugacagagagcaacaagaaguuccugccauuccagcaguuuggccgggauaucgccgauaccacagacgccguuagagauccccagacacuggaaauccuggacaucaccccaugcagcuucggcggagugucugugaucaccccuggcaccaacaccagcaaucagguggcagugcuguaccaggacgugaacuguaccgaagugcccguggccauucacgccgaucagcugacaccuacauggcggguguacuccaccggcagcaauguguuucagaccagagccggcugucugaucggagccgagcacgugaacaauagcuacgagugcgacauccccaucggcgcuggcaucugugccagcuaccagacacagacaaacagccccagacgggcuagaagcguggccagccagagcaucauugccuacacaaugucucugggcgccgagaacagcguggccuacuccaacaacucuaucgcuauccccaccaacuucaccaucagcgugaccaccgagauccugccuguguccaugaccaagaccagcguggacugcaccauguacaucugcggcgauuccaccgagugcuccaaccugcugcugcaguacggcagcuucugcacccagcugaauagagcccugacagggaucgccguggaacaggacaagaacacccaagagguguucgcccaagugaagcaaaucuacaagaccccuccuaucaaggacuucggcggcuucaauuucagccagauucugcccgauccuagcaagcccagcaagcggagcuucaucgaggaccugcuguucaacaaagugacacuggccgacgccggcuucaucaagcaguauggcgauugucugggcgacauugccgccagggaucugauuugcgcccagaaguuuaacggacugacagugcugccuccucugcugaccgaugagaugaucgcccaguacacaucugcccugcuggccggcacaaucacaagcggcuggacauuuggagcuggcgccgcucugcagauccccuuugcuaugcagauggccuaccgguucaacggcaucggagugacccagaaugugcuguacgagaaccagaagcugaucgccaaccaguucaacagcgccaucggcaagauccaggacagccugagcagcacagcaagcgcccugggaaagcugcaggacguggucaaccagaaugcccaggcacugaacacccuggucaagugccuguccuccaacuucggcgccaucagcucugugcugaacgauauccugagcagacuggacaaggucgaggccgaggugcagaucgacagacugaucacaggcagacugcagugucuccagacauacgugacccagcagcugaucagagccgccgagauuagagccucugccaaucuggccgccaccaagaugucugagugugugcugggccagagcaagagaguggacuuuugcggcaagggcuaccaccugaugagcuucccucagucugccccucacggcgugguguuucugcacgugacauaugugcccgcucaagagaagaauuucaccaccgcuccagccaucugccacgacggcaaagcccacuuuccuagagaaggcguguucguguccaacggcacccauugguucgugacacagcggaacuucuacgagccccagaucaucaccaccgacaacaccuucgugucuggcaacugcgacguugugaucggcauugugaacaauaccguguacgacccucugcagcccgagcuggacagcuucaaagaggaacuggacaaguacuuuaagaaccacacaagccccgacguggaccugggcgauaucagcggaaucaaugccagcgucgugaacauccagaaagagaucgaccggcugaacgagguggccaagaaucugaacgagagccugaucgaccugcaagaacuggggaaguacgagcaguacaucaagggaggaucuggcuauauccccgaggcuccuagagauggccaggccuauguucggaaggauggcgaaugggugcugcugagcaccuuccuuuga

SEQ ID NO: 12125 - RNA, 3726 nt, Artificial Sequence
  SARS-CoV-2/Wuhan/WIV05/2019__EPI_ISL_402128 spike protein CDS gc mod (1-1211)(F970C_G999C) Foldon construct
auguucguguuucuggugcugcugccccugguguccagccagugugugaaccugaccaccagaacacagcugccuccagccuacaccaacagcuucaccagaggcguguacuaccccgacaagguguucagauccagcgugcugcacucuacccaggaccuguuccugccuuucuucagcaacgugaccugguuccacgccauccacguguccggcaccaauggcaccaagagauucgacaaccccgugcugcccuucaacgacgggguguacuuugccagcaccgagaaguccaacaucaucagaggcuggaucuucggcaccacacuggacagcaagacccagagccugcugaucgugaacaacgccaccaacguggucaucaaagugugcgaguuccaguucugcaacgaccccuuccugggcgucuacuaccacaagaacaacaagagcuggauggaaagcgaguuccggguguacagcagcgccaacaacugcaccuucgaguacgugucccagccuuuccugauggaccuggaaggcaagcagggcaacuucaagaaccugcgcgaguucguguucaagaacaucgacggcuacuucaaaaucuacagcaagcacaccccuaucaaccucgugcgggaucugccucagggcuucucugcucuggaaccccugguggaucugcccaucggcaucaacaucacccgguuucagacacugcuggcccugcacagaagcuaccugacaccuggcgauagcagcagcggauggacagcuggugccgccgcuuacuaugugggcuaccugcagccuagaaccuuccugcugaaguacaacgagaacggcaccaucaccgacgccguggauugugcucuggauccucugagcgagacaaagugcacccugaaguccuucaccguggaaaagggcaucuaccagaccagcaacuuccgggugcagcccaccgaauccaucgugcgguuccccaauaucaccaaucugugccccuucggcgagguguucaaugccaccagauucgccucuguguacgccuggaaccggaagcggaucagcaauugcguggccgacuacuccgugcuguacaacuccgccagcuucagcaccuucaagugcuacggcguguccccuaccaagcugaacgaccugugcuucacaaacguguacgccgacagcuucgugauccggggagaugaagugcggcagauugccccuggacagacaggcaagaucgccgacuacaacuacaagcugcccgacgacuucaccggcugugugauugccuggaacagcaacaaccuggacuccaaagucggcggcaacuacaauuaccuguaccggcuguuccggaaguccaaucugaagcccuucgagcgggacaucagcaccgaaaucuaucaggccggcagcaccccuugcaacggcguggaaggcuucaacugcuacuucccacugcaguccuacggcuuucagcccacaaauggcgugggcuaucagcccuacagagugguggugcugagcuucgaacugcugcaugcuccugccacagugugcggcccuaagaaaagcaccaaucucgugaagaacaaaugcgugaacuucaacuucaacggccugaccggcaccggcgugcugacagagagcaacaagaaguuccugccauuccagcaguuuggccgggauaucgccgauaccacagacgccguuagagauccccagacacuggaaauccuggacaucaccccaugcagcuucggcggagugucugugaucaccccuggcaccaacaccagcaaucagguggcagugcuguaccaggacgugaacuguaccgaagugcccguggccauucacgccgaucagcugacaccuacauggcggguguacuccaccggcagcaauguguuucagaccagagccggcugucugaucggagccgagcacgugaacaauagcuacgagugcgacauccccaucggcgcuggcaucugugccagcuaccagacacagacaaacagccccagacgggcuagaagcguggccagccagagcaucauugccuacacaaugucucugggcgccgagaacagcguggccuacuccaacaacucuaucgcuauccccaccaacuucaccaucagcgugaccaccgagauccugccuguguccaugaccaagaccagcguggacugcaccauguacaucugcggcgauuccaccgagugcuccaaccugcugcugcaguacggcagcuucugcacccagcugaauagagcccugacagggaucgccguggaacaggacaagaacacccaagagguguucgcccaagugaagcaaaucuacaagaccccuccuaucaaggacuucggcggcuucaauuucagccagauucugcccgauccuagcaagcccagcaagcggagcuucaucgaggaccugcuguucaacaaagugacacuggccgacgccggcuucaucaagcaguauggcgauugucugggcgacauugccgccagggaucugauuugcgcccagaaguuuaacggacugacagugcugccuccucugcugaccgaugagaugaucgcccaguacacaucugcccugcuggccggcacaaucacaagcggcuggacauuuggagcuggcgccgcucugcagauccccuuugcuaugcagauggccuaccgguucaacggcaucggagugacccagaaugugcuguacgagaaccagaagcugaucgccaaccaguucaacagcgccaucggcaagauccaggacagccugagcagcacagcaagcgcccugggaaagcugcaggacguggucaaccagaaugcccaggcacugaacacccuggucaagcagcuguccuccaacugcggcgccaucagcucugugcugaacgauauccugagcagacuggacaaggucgaggccgaggugcagaucgacagacugaucacauguagacugcagagccuccagacauacgugacccagcagcugaucagagccgccgagauuagagccucugccaaucuggccgccaccaagaugucugagugugugcugggccagagcaagagaguggacuuuugcggcaagggcuaccaccugaugagcuucccucagucugccccucacggcgugguguuucugcacgugacauaugugcccgcucaagagaagaauuucaccaccgcuccagccaucugccacgacggcaaagcccacuuuccuagagaaggcguguucguguccaacggcacccauugguucgugacacagcggaacuucuacgagccccagaucaucaccaccgacaacaccuucgugucuggcaacugcgacguugugaucggcauugugaacaauaccguguacgacccucugcagcccgagcuggacagcuucaaagaggaacuggacaaguacuuuaagaaccacacaagccccgacguggaccugggcgauaucagcggaaucaaugccagcgucgugaacauccagaaagagaucgaccggcugaacgagguggccaagaaucugaacgagagccugaucgaccugcaagaacuggggaaguacgagcaguacaucaagggaggaucuggcuauauccccgaggcuccuagagauggccaggccuauguucggaaggauggcgaaugggugcugcugagcaccuuccuuuga

SEQ ID NO: 12126 - RNA, 3726 nt, Artificial Sequence
  SARS-CoV-2/Wuhan/WIV05/2019__EPI_ISL_402128 spike protein CDS gc mod (1-1211)(A972C_R995C) Foldon construct
auguucguguuucuggugcugcugccccugguguccagccagugugugaaccugaccaccagaacacagcugccuccagccuacaccaacagcuucaccagaggcguguacuaccccgacaagguguucagauccagcgugcugcacucuacccaggaccuguuccugccuuucuucagcaacgugaccugguuccacgccauccacguguccggcaccaauggcaccaagagauucgacaaccccgugcugcccuucaacgacgggguguacuuugccagcaccgagaaguccaacaucaucagaggcuggaucuucggcaccacacuggacagcaagacccagagccugcugaucgugaacaacgccaccaacguggucaucaaagugugcgaguuccaguucugcaacgaccccuuccugggcgucuacuaccacaagaacaacaagagcuggauggaaagcgaguuccggguguacagcagcgccaacaacugcaccuucgaguacgugucccagccuuuccugauggaccuggaaggcaagcagggcaacuucaagaaccugcgcgaguucguguucaagaacaucgacggcuacuucaaaaucuacagcaagcacaccccuaucaaccucgugcgggaucugccucagggcuucucugcucuggaaccccugguggaucugcccaucggcaucaacaucacccgguuucagacacugcuggcccugcacagaagcuaccugacaccuggcgauagcagcagcggauggacagcuggugccgccgcuuacuaugugggcuaccugcagccuagaaccuuccugcugaaguacaacgagaacggcaccaucaccgacgccguggauugugcucuggauccucugagcgagacaaagugcacccugaaguccuucaccguggaaaagggcaucuaccagaccagcaacuuccgggugcagcccaccgaauccaucgugcgguuccccaauaucaccaaucugugccccuucggcgagguguucaaugccaccagauucgccucuguguacgccuggaaccggaagcggaucagcaauugcguggccgacuacuccgugcuguacaacuccgccagcuucagcaccuucaagugcuacggcguguccccuaccaagcugaacgaccugugcuucacaaacguguacgccgacagcuucgugauccggggagaugaagugcggcagauugccccuggacagacaggcaagaucgccgacuacaacuacaagcugcccgacgacuucaccggcugugugauugccuggaacagcaacaaccuggacuccaaagucggcggcaacuacaauuaccuguaccggcuguuccggaaguccaaucugaagcccuucgagcgggacaucagcaccgaaaucuaucaggccggcagcaccccuugcaacggcguggaaggcuucaacugcuacuucccacugcaguccuacggcuuucagcccacaaauggcgugggcuaucagcccuacagagugguggugcugagcuucgaacugcugcaugcuccugccacagugugcggcccuaagaaaagcaccaaucucgugaagaacaaaugcgugaacuucaacuucaacggccugaccggcaccggcgugcugacagagagcaacaagaaguuccugccauuccagcaguuuggccgggauaucgccgauaccacagacgccguuagagauccccagacacuggaaauccuggacaucaccccaugcagcuucggcggagugucugugaucaccccuggcaccaacaccagcaaucagguggcagugcuguaccaggacgugaacuguaccgaagugcccguggccauucacgccgaucagcugacaccuacauggcggguguacuccaccggcagcaauguguuucagaccagagccggcugucugaucggagccgagcacgugaacaauagcuacgagugcgacauccccaucggcgcuggcaucugugccagcuaccagacacagacaaacagccccagacgggcuagaagcguggccagccagagcaucauugccuacacaaugucucugggcgccgagaacagcguggccuacuccaacaacucuaucgcuauccccaccaacuucaccaucagcgugaccaccgagauccugccuguguccaugaccaagaccagcguggacugcaccauguacaucugcggcgauuccaccgagugcuccaaccugcugcugcaguacggcagcuucugcacccagcugaauagagcccugacagggaucgccguggaacaggacaagaacacccaagagguguucgcccaagugaagcaaaucuacaagaccccuccuaucaaggacuucggcggcuucaauuucagccagauucugcccgauccuagcaagcccagcaagcggagcuucaucgaggaccugcuguucaacaaagugacacuggccgacgccggcuucaucaagcaguauggcgauugucugggcgacauugccgccagggaucugauuugcgcccagaaguuuaacggacugacagugcugccuccucugcugaccgaugagaugaucgcccaguacacaucugcccugcuggccggcacaaucacaagcggcuggacauuuggagcuggcgccgcucugcagauccccuuugcuaugcagauggccuaccgguucaacggcaucggagugacccagaaugugcuguacgagaaccagaagcugaucgccaaccaguucaacagcgccaucggcaagauccaggacagccugagcagcacagcaagcgcccugggaaagcugcaggacguggucaaccagaaugcccaggcacugaacacccuggucaagcagcuguccuccaacuucggcugcaucagcucugugcugaacgauauccugagcagacuggacaaggucgaggccgaggugcagaucgacugucugaucacaggcagacugcagagccuccagacauacgugacccagcagcugaucagagccgccgagauuagagccucugccaaucuggccgccaccaagaugucugagugugugcugggccagagcaagagaguggacuuuugcggcaagggcuaccaccugaugagcuucccucagucugccccucacggcgugguguuucugcacgugacauaugugcccgcucaagagaagaauuucaccaccgcuccagccaucugccacgacggcaaagcccacuuuccuagagaaggcguguucguguccaacggcacccauugguucgugacacagcggaacuucuacgagccccagaucaucaccaccgacaacaccuucgugucuggcaacugcgacguugugaucggcauugugaacaauaccguguacgacccucugcagcccgagcuggacagcuucaaagaggaacuggacaaguacuuuaagaaccacacaagccccgacguggaccugggcgauaucagcggaaucaaugccagcgucgugaacauccagaaagagaucgaccggcugaacgagguggccaagaaucugaacgagagccugaucgaccugcaagaacuggggaaguacgagcaguacaucaagggaggaucuggcuauauccccgaggcuccuagagauggccaggccuauguucggaaggauggcgaaugggugcugcugagcaccuuccuuuga

SEQ ID NO: 12127 - RNA, 3726 nt, Artificial Sequence
  SARS-CoV-2/Wuhan/WIV05/2019__EPI_ISL_402128 spike protein CDS gc mod (1-1211)(A890C_V1040C) Foldon construct
auguucguguuucuggugcugcugccccugguguccagccagugugugaaccugaccaccagaacacagcugccuccagccuacaccaacagcuucaccagaggcguguacuaccccgacaagguguucagauccagcgugcugcacucuacccaggaccuguuccugccuuucuucagcaacgugaccugguuccacgccauccacguguccggcaccaauggcaccaagagauucgacaaccccgugcugcccuucaacgacgggguguacuuugccagcaccgagaaguccaacaucaucagaggcuggaucuucggcaccacacuggacagcaagacccagagccugcugaucgugaacaacgccaccaacguggucaucaaagugugcgaguuccaguucugcaacgaccccuuccugggcgucuacuaccacaagaacaacaagagcuggauggaaagcgaguuccggguguacagcagcgccaacaacugcaccuucgaguacgugucccagccuuuccugauggaccuggaaggcaagcagggcaacuucaagaaccugcgcgaguucguguucaagaacaucgacggcuacuucaaaaucuacagcaagcacaccccuaucaaccucgugcgggaucugccucagggcuucucugcucuggaaccccugguggaucugcccaucggcaucaacaucacccgguuucagacacugcuggcccugcacagaagcuaccugacaccuggcgauagcagcagcggauggacagcuggugccgccgcuuacuaugugggcuaccugcagccuagaaccuuccugcugaaguacaacgagaacggcaccaucaccgacgccguggauugugcucuggauccucugagcgagacaaagugcacccugaaguccuucaccguggaaaagggcaucuaccagaccagcaacuuccgggugcagcccaccgaauccaucgugcgguuccccaauaucaccaaucugugccccuucggcgagguguucaaugccaccagauucgccucuguguacgccuggaaccggaagcggaucagcaauugcguggccgacuacuccgugcuguacaacuccgccagcuucagcaccuucaagugcuacggcguguccccuaccaagcugaacgaccugugcuucacaaacguguacgccgacagcuucgugauccggggagaugaagugcggcagauugccccuggacagacaggcaagaucgccgacuacaacuacaagcugcccgacgacuucaccggcugugugauugccuggaacagcaacaaccuggacuccaaagucggcggcaacuacaauuaccuguaccggcuguuccggaaguccaaucugaagcccuucgagcgggacaucagcaccgaaaucuaucaggccggcagcaccccuugcaacggcguggaaggcuucaacugcuacuucccacugcaguccuacggcuuucagcccacaaauggcgugggcuaucagcccuacagagugguggugcugagcuucgaacugcugcaugcuccugccacagugugcggcccuaagaaaagcaccaaucucgugaagaacaaaugcgugaacuucaacuucaacggccugaccggcaccggcgugcugacagagagcaacaagaaguuccugccauuccagcaguuuggccgggauaucgccgauaccacagacgccguuagagauccccagacacuggaaauccuggacaucaccccaugcagcuucggcggagugucugugaucaccccuggcaccaacaccagcaaucagguggcagugcuguaccaggacgugaacuguaccgaagugcccguggccauucacgccgaucagcugacaccuacauggcggguguacuccaccggcagcaauguguuucagaccagagccggcugucugaucggagccgagcacgugaacaauagcuacgagugcgacauccccaucggcgcuggcaucugugccagcuaccagacacagacaaacagccccagacgggcuagaagcguggccagccagagcaucauugccuacacaaugucucugggcgccgagaacagcguggccuacuccaacaacucuaucgcuauccccaccaacuucaccaucagcgugaccaccgagauccugccuguguccaugaccaagaccagcguggacugcaccauguacaucugcggcgauuccaccgagugcuccaaccugcugcugcaguacggcagcuucugcacccagcugaauagagcccugacagggaucgccguggaacaggacaagaacacccaagagguguucgcccaagugaagcaaaucuacaagaccccuccuaucaaggacuucggcggcuucaauuucagccagauucugcccgauccuagcaagcccagcaagcggagcuucaucgaggaccugcuguucaacaaagugacacuggccgacgccggcuucaucaagcaguauggcgauugucugggcgacauugccgccagggaucugauuugcgcccagaaguuuaacggacugacagugcugccuccucugcugaccgaugagaugaucgcccaguacacaucugcccugcuggccggcacaaucacaagcggcuggacauuuggaugcggcgccgcucugcagauccccuuugcuaugcagauggccuaccgguucaacggcaucggagugacccagaaugugcuguacgagaaccagaagcugaucgccaaccaguucaacagcgccaucggcaagauccaggacagccugagcagcacagcaagcgcccugggaaagcugcaggacguggucaaccagaaugcccaggcacugaacacccuggucaagcagcuguccuccaacuucggcgccaucagcucugugcugaacgauauccugagcagacuggacaaggucgaggccgaggugcagaucgacagacugaucacaggcagacugcagagccuccagacauacgugacccagcagcugaucagagccgccgagauuagagccucugccaaucuggccgccaccaagaugucugagugugugcugggccagagcaagagaugugacuuuugcggcaagggcuaccaccugaugagcuucccucagucugccccucacggcgugguguuucugcacgugacauaugugcccgcucaagagaagaauuucaccaccgcuccagccaucugccacgacggcaaagcccacuuuccuagagaaggcguguucguguccaacggcacccauugguucgugacacagcggaacuucuacgagccccagaucaucaccaccgacaacaccuucgugucuggcaacugcgacguugugaucggcauugugaacaauaccguguacgacccucugcagcccgagcuggacagcuucaaagaggaacuggacaaguacuuuaagaaccacacaagccccgacguggaccugggcgauaucagcggaaucaaugccagcgucgugaacauccagaaagagaucgaccggcugaacgagguggccaagaaucugaacgagagccugaucgaccugcaagaacuggggaaguacgagcaguacaucaagggaggaucuggcuauauccccgaggcuccuagagauggccaggccuauguucggaaggauggcgaaugggugcugcugagcaccuuccuuuga

SEQ ID NO: 12128 - RNA, 3726 nt, Artificial Sequence
  SARS-CoV-2/Wuhan/WIV05/2019__EPI_ISL_402128 spike protein CDS gc mod (1-1211)(T874C_S1055C) Foldon construct
auguucguguuucuggugcugcugccccugguguccagccagugugugaaccugaccaccagaacacagcugccuccagccuacaccaacagcuucaccagaggcguguacuaccccgacaagguguucagauccagcgugcugcacucuacccaggaccuguuccugccuuucuucagcaacgugaccugguuccacgccauccacguguccggcaccaauggcaccaagagauucgacaaccccgugcugcccuucaacgacgggguguacuuugccagcaccgagaaguccaacaucaucagaggcuggaucuucggcaccacacuggacagcaagacccagagccugcugaucgugaacaacgccaccaacguggucaucaaagugugcgaguuccaguucugcaacgaccccuuccugggcgucuacuaccacaagaacaacaagagcuggauggaaagcgaguuccggguguacagcagcgccaacaacugcaccuucgaguacgugucccagccuuuccugauggaccuggaaggcaagcagggcaacuucaagaaccugcgcgaguucguguucaagaacaucgacggcuacuucaaaaucuacagcaagcacaccccuaucaaccucgugcgggaucugccucagggcuucucugcucuggaaccccugguggaucugcccaucggcaucaacaucacccgguuucagacacugcuggcccugcacagaagcuaccugacaccuggcgauagcagcagcggauggacagcuggugccgccgcuuacuaugugggcuaccugcagccuagaaccuuccugcugaaguacaacgagaacggcaccaucaccgacgccguggauugugcucuggauccucugagcgagacaaagugcacccugaaguccuucaccguggaaaagggcaucuaccagaccagcaacuuccgggugcagcccaccgaauccaucgugcgguuccccaauaucaccaaucugugccccuucggcgagguguucaaugccaccagauucgccucuguguacgccuggaaccggaagcggaucagcaauugcguggccgacuacuccgugcuguacaacuccgccagcuucagcaccuucaagugcuacggcguguccccuaccaagcugaacgaccugugcuucacaaacguguacgccgacagcuucgugauccggggagaugaagugcggcagauugccccuggacagacaggcaagaucgccgacuacaacuacaagcugcccgacgacuucaccggcugugugauugccuggaacagcaacaaccuggacuccaaagucggcggcaacuacaauuaccuguaccggcuguuccggaaguccaaucugaagcccuucgagcgggacaucagcaccgaaaucuaucaggccggcagcaccccuugcaacggcguggaaggcuucaacugcuacuucccacugcaguccuacggcuuucagcccacaaauggcgugggcuaucagcccuacagagugguggugcugagcuucgaacugcugcaugcuccugccacagugugcggcccuaagaaaagcaccaaucucgugaagaacaaaugcgugaacuucaacuucaacggccugaccggcaccggcgugcugacagagagcaacaagaaguuccugccauuccagcaguuuggccgggauaucgccgauaccacagacgccguuagagauccccagacacuggaaauccuggacaucaccccaugcagcuucggcggagugucugugaucaccccuggcaccaacaccagcaaucagguggcagugcuguaccaggacgugaacuguaccgaagugcccguggccauucacgccgaucagcugacaccuacauggcggguguacuccaccggcagcaauguguuucagaccagagccggcugucugaucggagccgagcacgugaacaauagcuacgagugcgacauccccaucggcgcuggcaucugugccagcuaccagacacagacaaacagccccagacgggcuagaagcguggccagccagagcaucauugccuacacaaugucucugggcgccgagaacagcguggccuacuccaacaacucuaucgcuauccccaccaacuucaccaucagcgugaccaccgagauccugccuguguccaugaccaagaccagcguggacugcaccauguacaucugcggcgauuccaccgagugcuccaaccugcugcugcaguacggcagcuucugcacccagcugaauagagcccugacagggaucgccguggaacaggacaagaacacccaagagguguucgcccaagugaagcaaaucuacaagaccccuccuaucaaggacuucggcggcuucaauuucagccagauucugcccgauccuagcaagcccagcaagcggagcuucaucgaggaccugcuguucaacaaagugacacuggccgacgccggcuucaucaagcaguauggcgauugucugggcgacauugccgccagggaucugauuugcgcccagaaguuuaacggacugacagugcugccuccucugcugaccgaugagaugaucgcccaguacugcucugcccugcuggccggcacaaucacaagcggcuggacauuuggagcuggcgccgcucugcagauccccuuugcuaugcagauggccuaccgguucaacggcaucggagugacccagaaugugcuguacgagaaccagaagcugaucgccaaccaguucaacagcgccaucggcaagauccaggacagccugagcagcacagcaagcgcccugggaaagcugcaggacguggucaaccagaaugcccaggcacugaacacccuggucaagcagcuguccuccaacuucggcgccaucagcucugugcugaacgauauccugagcagacuggacaaggucgaggccgaggugcagaucgacagacugaucacaggcagacugcagagccuccagacauacgugacccagcagcugaucagagccgccgagauuagagccucugccaaucuggccgccaccaagaugucugagugugugcugggccagagcaagagaguggacuuuugcggcaagggcuaccaccugaugagcuucccucagugcgccccucacggcgugguguuucugcacgugacauaugugcccgcucaagagaagaauuucaccaccgcuccagccaucugccacgacggcaaagcccacuuuccuagagaaggcguguucguguccaacggcacccauugguucgugacacagcggaacuucuacgagccccagaucaucaccaccgacaacaccuucgugucuggcaacugcgacguugugaucggcauugugaacaauaccguguacgacccucugcagcccgagcuggacagcuucaaagaggaacuggacaaguacuuuaagaaccacacaagccccgacguggaccugggcgauaucagcggaaucaaugccagcgucgugaacauccagaaagagaucgaccggcugaacgagguggccaagaaucugaacgagagccugaucgaccugcaagaacuggggaaguacgagcaguacaucaagggaggaucuggcuauauccccgaggcuccuagagauggccaggccuauguucggaaggauggcgaaugggugcugcugagcaccuuccuuuga

SEQ ID NO: 12129 - RNA, 4098 nt, Artificial Sequence
  SARS-CoV-2/Wuhan/WIV05/2019__EPI_ISL_402128 spike protein CDS gc mod (1-1211) WhcAg construct
auguucguguuucuggugcugcugccccugguguccagccagugugugaaccugaccaccagaacacagcugccuccagccuacaccaacagcuucaccagaggcguguacuaccccgacaagguguucagauccagcgugcugcacucuacccaggaccuguuccugccuuucuucagcaacgugaccugguuccacgccauccacguguccggcaccaauggcaccaagagauucgacaaccccgugcugcccuucaacgacgggguguacuuugccagcaccgagaaguccaacaucaucagaggcuggaucuucggcaccacacuggacagcaagacccagagccugcugaucgugaacaacgccaccaacguggucaucaaagugugcgaguuccaguucugcaacgaccccuuccugggcgucuacuaccacaagaacaacaagagcuggauggaaagcgaguuccggguguacagcagcgccaacaacugcaccuucgaguacgugucccagccuuuccugauggaccuggaaggcaagcagggcaacuucaagaaccugcgcgaguucguguucaagaacaucgacggcuacuucaaaaucuacagcaagcacaccccuaucaaccucgugcgggaucugccucagggcuucucugcucuggaaccccugguggaucugcccaucggcaucaacaucacccgguuucagacacugcuggcccugcacagaagcuaccugacaccuggcgauagcagcagcggauggacagcuggugccgccgcuuacuaugugggcuaccugcagccuagaaccuuccugcugaaguacaacgagaacggcaccaucaccgacgccguggauugugcucuggauccucugagcgagacaaagugcacccugaaguccuucaccguggaaaagggcaucuaccagaccagcaacuuccgggugcagcccaccgaauccaucgugcgguuccccaauaucaccaaucugugccccuucggcgagguguucaaugccaccagauucgccucuguguacgccuggaaccggaagcggaucagcaauugcguggccgacuacuccgugcuguacaacuccgccagcuucagcaccuucaagugcuacggcguguccccuaccaagcugaacgaccugugcuucacaaacguguacgccgacagcuucgugauccggggagaugaagugcggcagauugccccuggacagacaggcaagaucgccgacuacaacuacaagcugcccgacgacuucaccggcugugugauugccuggaacagcaacaaccuggacuccaaagucggcggcaacuacaauuaccuguaccggcuguuccggaaguccaaucugaagcccuucgagcgggacaucagcaccgaaaucuaucaggccggcagcaccccuugcaacggcguggaaggcuucaacugcuacuucccacugcaguccuacggcuuucagcccacaaauggcgugggcuaucagcccuacagagugguggugcugagcuucgaacugcugcaugcuccugccacagugugcggcccuaagaaaagcaccaaucucgugaagaacaaaugcgugaacuucaacuucaacggccugaccggcaccggcgugcugacagagagcaacaagaaguuccugccauuccagcaguuuggccgggauaucgccgauaccacagacgccguuagagauccccagacacuggaaauccuggacaucaccccaugcagcuucggcggagugucugugaucaccccuggcaccaacaccagcaaucagguggcagugcuguaccaggacgugaacuguaccgaagugcccguggccauucacgccgaucagcugacaccuacauggcggguguacuccaccggcagcaauguguuucagaccagagccggcugucugaucggagccgagcacgugaacaauagcuacgagugcgacauccccaucggcgcuggcaucugugccagcuaccagacacagacaaacagccccagacgggcuagaagcguggccagccagagcaucauugccuacacaaugucucugggcgccgagaacagcguggccuacuccaacaacucuaucgcuauccccaccaacuucaccaucagcgugaccaccgagauccugccuguguccaugaccaagaccagcguggacugcaccauguacaucugcggcgauuccaccgagugcuccaaccugcugcugcaguacggcagcuucugcacccagcugaauagagcccugacagggaucgccguggaacaggacaagaacacccaagagguguucgcccaagugaagcaaaucuacaagaccccuccuaucaaggacuucggcggcuucaauuucagccagauucugcccgauccuagcaagcccagcaagcggagcuucaucgaggaccugcuguucaacaaagugacacuggccgacgccggcuucaucaagcaguauggcgauugucugggcgacauugccgccagggaucugauuugcgcccagaaguuuaacggacugacagugcugccuccucugcugaccgaugagaugaucgcccaguacacaucugcccugcuggccggcacaaucacaagcggcuggacauuuggagcuggcgccgcucugcagauccccuuugcuaugcagauggccuaccgguucaacggcaucggagugacccagaaugugcuguacgagaaccagaagcugaucgccaaccaguucaacagcgccaucggcaagauccaggacagccugagcagcacagcaagcgcccugggaaagcugcaggacguggucaaccagaaugcccaggcacugaacacccuggucaagcagcuguccuccaacuucggcgccaucagcucugugcugaacgauauccugagcagacuggacaaggucgaggccgaggugcagaucgacagacugaucacaggcagacugcagagccuccagacauacgugacccagcagcugaucagagccgccgagauuagagccucugccaaucuggccgccaccaagaugucugagugugugcugggccagagcaagagaguggacuuuugcggcaagggcuaccaccugaugagcuucccucagucugccccucacggcgugguguuucugcacgugacauaugugcccgcucaagagaagaauuucaccaccgcuccagccaucugccacgacggcaaagcccacuuuccuagagaaggcguguucguguccaacggcacccauugguucgugacacagcggaacuucuacgagccccagaucaucaccaccgacaacaccuucgugucuggcaacugcgacguugugaucggcauugugaacaauaccguguacgacccucugcagcccgagcuggacagcuucaaagaggaacuggacaaguacuuuaagaaccacacaagccccgacguggaccugggcgauaucagcggaaucaaugccagcgucgugaacauccagaaagagaucgaccggcugaacgagguggccaagaaucugaacgagagccugaucgaccugcaagaacuggggaaguacgagcaguacaucaagggaggcggaggaucugacaucgaccccuacaaagaguucggcagcagcuaccagcugcugaacuuccugccucuggacuucuuccccgaccugaacgcccugguggauacagccacagcucuguacgaggaagaacugaccggcagagagcacugcagcccucaccacacagccauuagacaggcccucgugugcugggacgagcugacaaaacugaucgccuggaugagcagcaacaucaccagcgagcaagugcggaccaucaucgugaaccacgugaacgauaccuggggccugaaagugcggcagagccugugguuucaccugagcugucugaccuucggccagcacaccgugcaagaguuucugguguccuucggcguguggaucagaaccccugcuccauacagaccuccaaacgcucccauccugagcacccugccugagcacacagugaucuguuga

SEQ ID NO: 12130 - RNA, 4098 nt, Artificial Sequence
  SARS-CoV-2/Wuhan/WIV05/2019__EPI_ISL_402128 spike protein CDS gc mod (1-1211)(K986P_V987P) WhcAg construct
auguucguguuucuggugcugcugccccugguguccagccagugugugaaccugaccaccagaacacagcugccuccagccuacaccaacagcuucaccagaggcguguacuaccccgacaagguguucagauccagcgugcugcacucuacccaggaccuguuccugccuuucuucagcaacgugaccugguuccacgccauccacguguccggcaccaauggcaccaagagauucgacaaccccgugcugcccuucaacgacgggguguacuuugccagcaccgagaaguccaacaucaucagaggcuggaucuucggcaccacacuggacagcaagacccagagccugcugaucgugaacaacgccaccaacguggucaucaaagugugcgaguuccaguucugcaacgaccccuuccugggcgucuacuaccacaagaacaacaagagcuggauggaaagcgaguuccggguguacagcagcgccaacaacugcaccuucgaguacgugucccagccuuuccugauggaccuggaaggcaagcagggcaacuucaagaaccugcgcgaguucguguucaagaacaucgacggcuacuucaaaaucuacagcaagcacaccccuaucaaccucgugcgggaucugccucagggcuucucugcucuggaaccccugguggaucugcccaucggcaucaacaucacccgguuucagacacugcuggcccugcacagaagcuaccugacaccuggcgauagcagcagcggauggacagcuggugccgccgcuuacuaugugggcuaccugcagccuagaaccuuccugcugaaguacaacgagaacggcaccaucaccgacgccguggauugugcucuggauccucugagcgagacaaagugcacccugaaguccuucaccguggaaaagggcaucuaccagaccagcaacuuccgggugcagcccaccgaauccaucgugcgguuccccaauaucaccaaucugugccccuucggcgagguguucaaugccaccagauucgccucuguguacgccuggaaccggaagcggaucagcaauugcguggccgacuacuccgugcuguacaacuccgccagcuucagcaccuucaagugcuacggcguguccccuaccaagcugaacgaccugugcuucacaaacguguacgccgacagcuucgugauccggggagaugaagugcggcagauugccccuggacagacaggcaagaucgccgacuacaacuacaagcugcccgacgacuucaccggcugugugauugccuggaacagcaacaaccuggacuccaaagucggcggcaacuacaauuaccuguaccggcuguuccggaaguccaaucugaagcccuucgagcgggacaucagcaccgaaaucuaucaggccggcagcaccccuugcaacggcguggaaggcuucaacugcuacuucccacugcaguccuacggcuuucagcccacaaauggcgugggcuaucagcccuacagagugguggugcugagcuucgaacugcugcaugcuccugccacagugugcggcccuaagaaaagcaccaaucucgugaagaacaaaugcgugaacuucaacuucaacggccugaccggcaccggcgugcugacagagagcaacaagaaguuccugccauuccagcaguuuggccgggauaucgccgauaccacagacgccguuagagauccccagacacuggaaauccuggacaucaccccaugcagcuucggcggagugucugugaucaccccuggcaccaacaccagcaaucagguggcagugcuguaccaggacgugaacuguaccgaagugcccguggccauucacgccgaucagcugacaccuacauggcggguguacuccaccggcagcaauguguuucagaccagagccggcugucugaucggagccgagcacgugaacaauagcuacgagugcgacauccccaucggcgcuggcaucugugccagcuaccagacacagacaaacagccccagacgggcuagaagcguggccagccagagcaucauugccuacacaaugucucugggcgccgagaacagcguggccuacuccaacaacucuaucgcuauccccaccaacuucaccaucagcgugaccaccgagauccugccuguguccaugaccaagaccagcguggacugcaccauguacaucugcggcgauuccaccgagugcuccaaccugcugcugcaguacggcagcuucugcacccagcugaauagagcccugacagggaucgccguggaacaggacaagaacacccaagagguguucgcccaagugaagcaaaucuacaagaccccuccuaucaaggacuucggcggcuucaauuucagccagauucugcccgauccuagcaagcccagcaagcggagcuucaucgaggaccugcuguucaacaaagugacacuggccgacgccggcuucaucaagcaguauggcgauugucugggcgacauugccgccagggaucugauuugcgcccagaaguuuaacggacugacagugcugccuccucugcugaccgaugagaugaucgcccaguacacaucugcccugcuggccggcacaaucacaagcggcuggacauuuggagcuggcgccgcucugcagauccccuuugcuaugcagauggccuaccgguucaacggcaucggagugacccagaaugugcuguacgagaaccagaagcugaucgccaaccaguucaacagcgccaucggcaagauccaggacagccugagcagcacagcaagcgcccugggaaagcugcaggacguggucaaccagaaugcccaggcacugaacacccuggucaagcagcuguccuccaacuucggcgccaucagcucugugcugaacgauauccugagcagacuggacccuccugaggccgaggugcagaucgacagacugaucacaggcagacugcagagccuccagacauacgugacccagcagcugaucagagccgccgagauuagagccucugccaaucuggccgccaccaagaugucugagugugugcugggccagagcaagagaguggacuuuugcggcaagggcuaccaccugaugagcuucccucagucugccccucacggcgugguguuucugcacgugacauaugugcccgcucaagagaagaauuucaccaccgcuccagccaucugccacgacggcaaagcccacuuuccuagagaaggcguguucguguccaacggcacccauugguucgugacacagcggaacuucuacgagccccagaucaucaccaccgacaacaccuucgugucuggcaacugcgacguugugaucggcauugugaacaauaccguguacgacccucugcagcccgagcuggacagcuucaaagaggaacuggacaaguacuuuaagaaccacacaagccccgacguggaccugggcgauaucagcggaaucaaugccagcgucgugaacauccagaaagagaucgaccggcugaacgagguggccaagaaucugaacgagagccugaucgaccugcaagaacuggggaaguacgagcaguacaucaagggaggcggaggaucugacaucgaccccuacaaagaguucggcagcagcuaccagcugcugaacuuccugccucuggacuucuuccccgaccugaacgcccugguggauacagccacagcucuguacgaggaagaacugaccggcagagagcacugcagcccucaccacacagccauuagacaggcccucgugugcugggacgagcugacaaaacugaucgccuggaugagcagcaacaucaccagcgagcaagugcggaccaucaucgugaaccacgugaacgauaccuggggccugaaagugcggcagagccugugguuucaccugagcugucugaccuucggccagcacaccgugcaagaguuucugguguccuucggcguguggaucagaaccccugcuccauacagaccuccaaacgcucccauccugagcacccugccugagcacacagugaucuguuga

SEQ ID NO: 12131 - RNA, 4098 nt, Artificial Sequence
  SARS-CoV-2/Wuhan/WIV05/2019__EPI_ISL_402128 spike protein CDS gc mod (1-1211)(K986P_V987P_T887WN_A1020W) WhcAg construct
auguucguguuucuggugcugcugccccugguguccagccagugugugaaccugaccaccagaacacagcugccuccagccuacaccaacagcuucaccagaggcguguacuaccccgacaagguguucagauccagcgugcugcacucuacccaggaccuguuccugccuuucuucagcaacgugaccugguuccacgccauccacguguccggcaccaauggcaccaagagauucgacaaccccgugcugcccuucaacgacgggguguacuuugccagcaccgagaaguccaacaucaucagaggcuggaucuucggcaccacacuggacagcaagacccagagccugcugaucgugaacaacgccaccaacguggucaucaaagugugcgaguuccaguucugcaacgaccccuuccugggcgucuacuaccacaagaacaacaagagcuggauggaaagcgaguuccggguguacagcagcgccaacaacugcaccuucgaguacgugucccagccuuuccugauggaccuggaaggcaagcagggcaacuucaagaaccugcgcgaguucguguucaagaacaucgacggcuacuucaaaaucuacagcaagcacaccccuaucaaccucgugcgggaucugccucagggcuucucugcucuggaaccccugguggaucugcccaucggcaucaacaucacccgguuucagacacugcuggcccugcacagaagcuaccugacaccuggcgauagcagcagcggauggacagcuggugccgccgcuuacuaugugggcuaccugcagccuagaaccuuccugcugaaguacaacgagaacggcaccaucaccgacgccguggauugugcucuggauccucugagcgagacaaagugcacccugaaguccuucaccguggaaaagggcaucuaccagaccagcaacuuccgggugcagcccaccgaauccaucgugcgguuccccaauaucaccaaucugugccccuucggcgagguguucaaugccaccagauucgccucuguguacgccuggaaccggaagcggaucagcaauugcguggccgacuacuccgugcuguacaacuccgccagcuucagcaccuucaagugcuacggcguguccccuaccaagcugaacgaccugugcuucacaaacguguacgccgacagcuucgugauccggggagaugaagugcggcagauugccccuggacagacaggcaagaucgccgacuacaacuacaagcugcccgacgacuucaccggcugugugauugccuggaacagcaacaaccuggacuccaaagucggcggcaacuacaauuaccuguaccggcuguuccggaaguccaaucugaagcccuucgagcgggacaucagcaccgaaaucuaucaggccggcagcaccccuugcaacggcguggaaggcuucaacugcuacuucccacugcaguccuacggcuuucagcccacaaauggcgugggcuaucagcccuacagagugguggugcugagcuucgaacugcugcaugcuccugccacagugugcggcccuaagaaaagcaccaaucucgugaagaacaaaugcgugaacuucaacuucaacggccugaccggcaccggcgugcugacagagagcaacaagaaguuccugccauuccagcaguuuggccgggauaucgccgauaccacagacgccguuagagauccccagacacuggaaauccuggacaucaccccaugcagcuucggcggagugucugugaucaccccuggcaccaacaccagcaaucagguggcagugcuguaccaggacgugaacuguaccgaagugcccguggccauucacgccgaucagcugacaccuacauggcggguguacuccaccggcagcaauguguuucagaccagagccggcugucugaucggagccgagcacgugaacaauagcuacgagugcgacauccccaucggcgcuggcaucugugccagcuaccagacacagacaaacagccccagacgggcuagaagcguggccagccagagcaucauugccuacacaaugucucugggcgccgagaacagcguggccuacuccaacaacucuaucgcuauccccaccaacuucaccaucagcgugaccaccgagauccugccuguguccaugaccaagaccagcguggacugcaccauguacaucugcggcgauuccaccgagugcuccaaccugcugcugcaguacggcagcuucugcacccagcugaauagagcccugacagggaucgccguggaacaggacaagaacacccaagagguguucgcccaagugaagcaaaucuacaagaccccuccuaucaaggacuucggcggcuucaauuucagccagauucugcccgauccuagcaagcccagcaagcggagcuucaucgaggaccugcuguucaacaaagugacacuggccgacgccggcuucaucaagcaguauggcgauugucugggcgacauugccgccagggaucugauuugcgcccagaaguuuaacggacugacagugcugccuccucugcugaccgaugagaugaucgcccaguacacaucugcccugcuggccggcacaaucacaagcggcuggugguuuggagcuggcgccgcucugcagauccccuuugcuaugcagauggccuaccgguucaacggcaucggagugacccagaaugugcuguacgagaaccagaagcugaucgccaaccaguucaacagcgccaucggcaagauccaggacagccugagcagcacagcaagcgcccugggaaagcugcaggacguggucaaccagaaugcccaggcacugaacacccuggucaagcagcuguccuccaacuucggcgccaucagcucugugcugaacgauauccugagcagacuggacccuccugaggccgaggugcagaucgacagacugaucacaggcagacugcagagccuccagacauacgugacccagcagcugaucagagccgccgagauuagauggucugccaaucuggccgccaccaagaugucugagugugugcugggccagagcaagagaguggacuuuugcggcaagggcuaccaccugaugagcuucccucagucugccccucacggcgugguguuucugcacgugacauaugugcccgcucaagagaagaauuucaccaccgcuccagccaucugccacgacggcaaagcccacuuuccuagagaaggcguguucguguccaacggcacccauugguucgugacacagcggaacuucuacgagccccagaucaucaccaccgacaacaccuucgugucuggcaacugcgacguugugaucggcauugugaacaauaccguguacgacccucugcagcccgagcuggacagcuucaaagaggaacuggacaaguacuuuaagaaccacacaagccccgacguggaccugggcgauaucagcggaaucaaugccagcgucgugaacauccagaaagagaucgaccggcugaacgagguggccaagaaucugaacgagagccugaucgaccugcaagaacuggggaaguacgagcaguacaucaagggaggcggaggaucugacaucgaccccuacaaagaguucggcagcagcuaccagcugcugaacuuccugccucuggacuucuuccccgaccugaacgcccugguggauacagccacagcucuguacgaggaagaacugaccggcagagagcacugcagcccucaccacacagccauuagacaggcccucgugugcugggacgagcugacaaaacugaucgccuggaugagcagcaacaucaccagcgagcaagugcggaccaucaucgugaaccacgugaacgauaccuggggccugaaagugcggcagagccugugguuucaccugagcugucugaccuucggccagcacaccgugcaagaguuucugguguccuucggcguguggaucagaaccccugcuccauacagaccuccaaacgcucccauccugagcacccugccugagcacacagugaucuguuga

SEQ ID NO: 12132 - RNA, 4098 nt, Artificial Sequence
  SARS-CoV-2/Wuhan/WIV05/2019__EPI_ISL_402128 spike protein CDS gc mod (1-1211)(K986P_V987P_P1069F) WhcAg construct
auguucguguuucuggugcugcugccccugguguccagccagugugugaaccugaccaccagaacacagcugccuccagccuacaccaacagcuucaccagaggcguguacuaccccgacaagguguucagauccagcgugcugcacucuacccaggaccuguuccugccuuucuucagcaacgugaccugguuccacgccauccacguguccggcaccaauggcaccaagagauucgacaaccccgugcugcccuucaacgacgggguguacuuugccagcaccgagaaguccaacaucaucagaggcuggaucuucggcaccacacuggacagcaagacccagagccugcugaucgugaacaacgccaccaacguggucaucaaagugugcgaguuccaguucugcaacgaccccuuccugggcgucuacuaccacaagaacaacaagagcuggauggaaagcgaguuccggguguacagcagcgccaacaacugcaccuucgaguacgugucccagccuuuccugauggaccuggaaggcaagcagggcaacuucaagaaccugcgcgaguucguguucaagaacaucgacggcuacuucaaaaucuacagcaagcacaccccuaucaaccucgugcgggaucugccucagggcuucucugcucuggaaccccugguggaucugcccaucggcaucaacaucacccgguuucagacacugcuggcccugcacagaagcuaccugacaccuggcgauagcagcagcggauggacagcuggugccgccgcuuacuaugugggcuaccugcagccuagaaccuuccugcugaaguacaacgagaacggcaccaucaccgacgccguggauugugcucuggauccucugagcgagacaaagugcacccugaaguccuucaccguggaaaagggcaucuaccagaccagcaacuuccgggugcagcccaccgaauccaucgugcgguuccccaauaucaccaaucugugccccuucggcgagguguucaaugccaccagauucgccucuguguacgccuggaaccggaagcggaucagcaauugcguggccgacuacuccgugcuguacaacuccgccagcuucagcaccuucaagugcuacggcguguccccuaccaagcugaacgaccugugcuucacaaacguguacgccgacagcuucgugauccggggagaugaagugcggcagauugccccuggacagacaggcaagaucgccgacuacaacuacaagcugcccgacgacuucaccggcugugugauugccuggaacagcaacaaccuggacuccaaagucggcggcaacuacaauuaccuguaccggcuguuccggaaguccaaucugaagcccuucgagcgggacaucagcaccgaaaucuaucaggccggcagcaccccuugcaacggcguggaaggcuucaacugcuacuucccacugcaguccuacggcuuucagcccacaaauggcgugggcuaucagcccuacagagugguggugcugagcuucgaacugcugcaugcuccugccacagugugcggcccuaagaaaagcaccaaucucgugaagaacaaaugcgugaacuucaacuucaacggccugaccggcaccggcgugcugacagagagcaacaagaaguuccugccauuccagcaguuuggccgggauaucgccgauaccacagacgccguuagagauccccagacacuggaaauccuggacaucaccccaugcagcuucggcggagugucugugaucaccccuggcaccaacaccagcaaucagguggcagugcuguaccaggacgugaacuguaccgaagugcccguggccauucacgccgaucagcugacaccuacauggcggguguacuccaccggcagcaauguguuucagaccagagccggcugucugaucggagccgagcacgugaacaauagcuacgagugcgacauccccaucggcgcuggcaucugugccagcuaccagacacagacaaacagccccagacgggcuagaagcguggccagccagagcaucauugccuacacaaugucucugggcgccgagaacagcguggccuacuccaacaacucuaucgcuauccccaccaacuucaccaucagcgugaccaccgagauccugccuguguccaugaccaagaccagcguggacugcaccauguacaucugcggcgauuccaccgagugcuccaaccugcugcugcaguacggcagcuucugcacccagcugaauagagcccugacagggaucgccguggaacaggacaagaacacccaagagguguucgcccaagugaagcaaaucuacaagaccccuccuaucaaggacuucggcggcuucaauuucagccagauucugcccgauccuagcaagcccagcaagcggagcuucaucgaggaccugcuguucaacaaagugacacuggccgacgccggcuucaucaagcaguauggcgauugucugggcgacauugccgccagggaucugauuugcgcccagaaguuuaacggacugacagugcugccuccucugcugaccgaugagaugaucgcccaguacacaucugcccugcuggccggcacaaucacaagcggcuggacauuuggagcuggcgccgcucugcagauccccuuugcuaugcagauggccuaccgguucaacggcaucggagugacccagaaugugcuguacgagaaccagaagcugaucgccaaccaguucaacagcgccaucggcaagauccaggacagccugagcagcacagcaagcgcccugggaaagcugcaggacguggucaaccagaaugcccaggcacugaacacccuggucaagcagcuguccuccaacuucggcgccaucagcucugugcugaacgauauccugagcagacuggacccuccugaggccgaggugcagaucgacagacugaucacaggcagacugcagagccuccagacauacgugacccagcagcugaucagagccgccgagauuagagccucugccaaucuggccgccaccaagaugucugagugugugcugggccagagcaagagaguggacuuuugcggcaagggcuaccaccugaugagcuucccucagucugccccucacggcgugguguuucugcacgugacauauguguucgcucaagagaagaauuucaccaccgcuccagccaucugccacgacggcaaagcccacuuuccuagagaaggcguguucguguccaacggcacccauugguucgugacacagcggaacuucuacgagccccagaucaucaccaccgacaacaccuucgugucuggcaacugcgacguugugaucggcauugugaacaauaccguguacgacccucugcagcccgagcuggacagcuucaaagaggaacuggacaaguacuuuaagaaccacacaagccccgacguggaccugggcgauaucagcggaaucaaugccagcgucgugaacauccagaaagagaucgaccggcugaacgagguggccaagaaucugaacgagagccugaucgaccugcaagaacuggggaaguacgagcaguacaucaagggaggcggaggaucugacaucgaccccuacaaagaguucggcagcagcuaccagcugcugaacuuccugccucuggacuucuuccccgaccugaacgcccugguggauacagccacagcucuguacgaggaagaacugaccggcagagagcacugcagcccucaccacacagccauuagacaggcccucgugugcugggacgagcugacaaaacugaucgccuggaugagcagcaacaucaccagcgagcaagugcggaccaucaucgugaaccacgugaacgauaccuggggccugaaagugcggcagagccugugguuucaccugagcugucugaccuucggccagcacaccgugcaagaguuucugguguccuucggcguguggaucagaaccccugcuccauacagaccuccaaacgcucccauccugagcacccugccugagcacacagugaucuguuga

SEQ ID NO: 12133 - RNA, 4098 nt, Artificial Sequence
  SARS-CoV-2/Wuhan/WIV05/2019__EPI_ISL_402128 spike protein CDS gc mod (1-1211)(K986P_V987P_ H1048Q_H1064N_ H1083N_H1101N) WhcAg construct
auguucguguuucuggugcugcugccccugguguccagccagugugugaaccugaccaccagaacacagcugccuccagccuacaccaacagcuucaccagaggcguguacuaccccgacaagguguucagauccagcgugcugcacucuacccaggaccuguuccugccuuucuucagcaacgugaccugguuccacgccauccacguguccggcaccaauggcaccaagagauucgacaaccccgugcugcccuucaacgacgggguguacuuugccagcaccgagaaguccaacaucaucagaggcuggaucuucggcaccacacuggacagcaagacccagagccugcugaucgugaacaacgccaccaacguggucaucaaagugugcgaguuccaguucugcaacgaccccuuccugggcgucuacuaccacaagaacaacaagagcuggauggaaagcgaguuccggguguacagcagcgccaacaacugcaccuucgaguacgugucccagccuuuccugauggaccuggaaggcaagcagggcaacuucaagaaccugcgcgaguucguguucaagaacaucgacggcuacuucaaaaucuacagcaagcacaccccuaucaaccucgugcgggaucugccucagggcuucucugcucuggaaccccugguggaucugcccaucggcaucaacaucacccgguuucagacacugcuggcccugcacagaagcuaccugacaccuggcgauagcagcagcggauggacagcuggugccgccgcuuacuaugugggcuaccugcagccuagaaccuuccugcugaaguacaacgagaacggcaccaucaccgacgccguggauugugcucuggauccucugagcgagacaaagugcacccugaaguccuucaccguggaaaagggcaucuaccagaccagcaacuuccgggugcagcccaccgaauccaucgugcgguuccccaauaucaccaaucugugccccuucggcgagguguucaaugccaccagauucgccucuguguacgccuggaaccggaagcggaucagcaauugcguggccgacuacuccgugcuguacaacuccgccagcuucagcaccuucaagugcuacggcguguccccuaccaagcugaacgaccugugcuucacaaacguguacgccgacagcuucgugauccggggagaugaagugcggcagauugccccuggacagacaggcaagaucgccgacuacaacuacaagcugcccgacgacuucaccggcugugugauugccuggaacagcaacaaccuggacuccaaagucggcggcaacuacaauuaccuguaccggcuguuccggaaguccaaucugaagcccuucgagcgggacaucagcaccgaaaucuaucaggccggcagcaccccuugcaacggcguggaaggcuucaacugcuacuucccacugcaguccuacggcuuucagcccacaaauggcgugggcuaucagcccuacagagugguggugcugagcuucgaacugcugcaugcuccugccacagugugcggcccuaagaaaagcaccaaucucgugaagaacaaaugcgugaacuucaacuucaacggccugaccggcaccggcgugcugacagagagcaacaagaaguuccugccauuccagcaguuuggccgggauaucgccgauaccacagacgccguuagagauccccagacacuggaaauccuggacaucaccccaugcagcuucggcggagugucugugaucaccccuggcaccaacaccagcaaucagguggcagugcuguaccaggacgugaacuguaccgaagugcccguggccauucacgccgaucagcugacaccuacauggcggguguacuccaccggcagcaauguguuucagaccagagccggcugucugaucggagccgagcacgugaacaauagcuacgagugcgacauccccaucggcgcuggcaucugugccagcuaccagacacagacaaacagccccagacgggcuagaagcguggccagccagagcaucauugccuacacaaugucucugggcgccgagaacagcguggccuacuccaacaacucuaucgcuauccccaccaacuucaccaucagcgugaccaccgagauccugccuguguccaugaccaagaccagcguggacugcaccauguacaucugcggcgauuccaccgagugcuccaaccugcugcugcaguacggcagcuucugcacccagcugaauagagcccugacagggaucgccguggaacaggacaagaacacccaagagguguucgcccaagugaagcaaaucuacaagaccccuccuaucaaggacuucggcggcuucaauuucagccagauucugcccgauccuagcaagcccagcaagcggagcuucaucgaggaccugcuguucaacaaagugacacuggccgacgccggcuucaucaagcaguauggcgauugucugggcgacauugccgccagggaucugauuugcgcccagaaguuuaacggacugacagugcugccuccucugcugaccgaugagaugaucgcccaguacacaucugcccugcuggccggcacaaucacaagcggcuggacauuuggagcuggcgccgcucugcagauccccuuugcuaugcagauggccuaccgguucaacggcaucggagugacccagaaugugcuguacgagaaccagaagcugaucgccaaccaguucaacagcgccaucggcaagauccaggacagccugagcagcacagcaagcgcccugggaaagcugcaggacguggucaaccagaaugcccaggcacugaacacccuggucaagcagcuguccuccaacuucggcgccaucagcucugugcugaacgauauccugagcagacuggacccuccugaggccgaggugcagaucgacagacugaucacaggcagacugcagagccuccagacauacgugacccagcagcugaucagagccgccgagauuagagccucugccaaucuggccgccaccaagaugucugagugugugcugggccagagcaagagaguggacuuuugcggcaagggcuaccagcugaugagcuucccucagucugccccucacggcgugguguuucugaacgugacauaugugcccgcucaagagaagaauuucaccaccgcuccagccaucugcaacgacggcaaagcccacuuuccuagagaaggcguguucguguccaacggcaccaacugguucgugacacagcggaacuucuacgagccccagaucaucaccaccgacaacaccuucgugucuggcaacugcgacguugugaucggcauugugaacaauaccguguacgacccucugcagcccgagcuggacagcuucaaagaggaacuggacaaguacuuuaagaaccacacaagccccgacguggaccugggcgauaucagcggaaucaaugccagcgucgugaacauccagaaagagaucgaccggcugaacgagguggccaagaaucugaacgagagccugaucgaccugcaagaacuggggaaguacgagcaguacaucaagggaggcggaggaucugacaucgaccccuacaaagaguucggcagcagcuaccagcugcugaacuuccugccucuggacuucuuccccgaccugaacgcccugguggauacagccacagcucuguacgaggaagaacugaccggcagagagcacugcagcccucaccacacagccauuagacaggcccucgugugcugggacgagcugacaaaacugaucgccuggaugagcagcaacaucaccagcgagcaagugcggaccaucaucgugaaccacgugaacgauaccuggggccugaaagugcggcagagccugugguuucaccugagcugucugaccuucggccagcacaccgugcaagaguuucugguguccuucggcguguggaucagaaccccugcuccauacagaccuccaaacgcucccauccugagcacccugccugagcacacagugaucuguuga

SEQ ID NO: 12134 - RNA, 4098 nt, Artificial Sequence
  SARS-CoV-2/Wuhan/WIV05/2019__EPI_ISL_402128 spike protein CDS gc mod (1-1211)(I712C_T1077C) WhcAg construct
auguucguguuucuggugcugcugccccugguguccagccagugugugaaccugaccaccagaacacagcugccuccagccuacaccaacagcuucaccagaggcguguacuaccccgacaagguguucagauccagcgugcugcacucuacccaggaccuguuccugccuuucuucagcaacgugaccugguuccacgccauccacguguccggcaccaauggcaccaagagauucgacaaccccgugcugcccuucaacgacgggguguacuuugccagcaccgagaaguccaacaucaucagaggcuggaucuucggcaccacacuggacagcaagacccagagccugcugaucgugaacaacgccaccaacguggucaucaaagugugcgaguuccaguucugcaacgaccccuuccugggcgucuacuaccacaagaacaacaagagcuggauggaaagcgaguuccggguguacagcagcgccaacaacugcaccuucgaguacgugucccagccuuuccugauggaccuggaaggcaagcagggcaacuucaagaaccugcgcgaguucguguucaagaacaucgacggcuacuucaaaaucuacagcaagcacaccccuaucaaccucgugcgggaucugccucagggcuucucugcucuggaaccccugguggaucugcccaucggcaucaacaucacccgguuucagacacugcuggcccugcacagaagcuaccugacaccuggcgauagcagcagcggauggacagcuggugccgccgcuuacuaugugggcuaccugcagccuagaaccuuccugcugaaguacaacgagaacggcaccaucaccgacgccguggauugugcucuggauccucugagcgagacaaagugcacccugaaguccuucaccguggaaaagggcaucuaccagaccagcaacuuccgggugcagcccaccgaauccaucgugcgguuccccaauaucaccaaucugugccccuucggcgagguguucaaugccaccagauucgccucuguguacgccuggaaccggaagcggaucagcaauugcguggccgacuacuccgugcuguacaacuccgccagcuucagcaccuucaagugcuacggcguguccccuaccaagcugaacgaccugugcuucacaaacguguacgccgacagcuucgugauccggggagaugaagugcggcagauugccccuggacagacaggcaagaucgccgacuacaacuacaagcugcccgacgacuucaccggcugugugauugccuggaacagcaacaaccuggacuccaaagucggcggcaacuacaauuaccuguaccggcuguuccggaaguccaaucugaagcccuucgagcgggacaucagcaccgaaaucuaucaggccggcagcaccccuugcaacggcguggaaggcuucaacugcuacuucccacugcaguccuacggcuuucagcccacaaauggcgugggcuaucagcccuacagagugguggugcugagcuucgaacugcugcaugcuccugccacagugugcggcccuaagaaaagcaccaaucucgugaagaacaaaugcgugaacuucaacuucaacggccugaccggcaccggcgugcugacagagagcaacaagaaguuccugccauuccagcaguuuggccgggauaucgccgauaccacagacgccguuagagauccccagacacuggaaauccuggacaucaccccaugcagcuucggcggagugucugugaucaccccuggcaccaacaccagcaaucagguggcagugcuguaccaggacgugaacuguaccgaagugcccguggccauucacgccgaucagcugacaccuacauggcggguguacuccaccggcagcaauguguuucagaccagagccggcugucugaucggagccgagcacgugaacaauagcuacgagugcgacauccccaucggcgcuggcaucugugccagcuaccagacacagacaaacagccccagacgggcuagaagcguggccagccagagcaucauugccuacacaaugucucugggcgccgagaacagcguggccuacuccaacaacucuugcgcuauccccaccaacuucaccaucagcgugaccaccgagauccugccuguguccaugaccaagaccagcguggacugcaccauguacaucugcggcgauuccaccgagugcuccaaccugcugcugcaguacggcagcuucugcacccagcugaauagagcccugacagggaucgccguggaacaggacaagaacacccaagagguguucgcccaagugaagcaaaucuacaagaccccuccuaucaaggacuucggcggcuucaauuucagccagauucugcccgauccuagcaagcccagcaagcggagcuucaucgaggaccugcuguucaacaaagugacacuggccgacgccggcuucaucaagcaguauggcgauugucugggcgacauugccgccagggaucugauuugcgcccagaaguuuaacggacugacagugcugccuccucugcugaccgaugagaugaucgcccaguacacaucugcccugcuggccggcacaaucacaagcggcuggacauuuggagcuggcgccgcucugcagauccccuuugcuaugcagauggccuaccgguucaacggcaucggagugacccagaaugugcuguacgagaaccagaagcugaucgccaaccaguucaacagcgccaucggcaagauccaggacagccugagcagcacagcaagcgcccugggaaagcugcaggacguggucaaccagaaugcccaggcacugaacacccuggucaagcagcuguccuccaacuucggcgccaucagcucugugcugaacgauauccugagcagacuggacaaggucgaggccgaggugcagaucgacagacugaucacaggcagacugcagagccuccagacauacgugacccagcagcugaucagagccgccgagauuagagccucugccaaucuggccgccaccaagaugucugagugugugcugggccagagcaagagaguggacuuuugcggcaagggcuaccaccugaugagcuucccucagucugccccucacggcgugguguuucugcacgugacauaugugcccgcucaagagaagaauuucaccugugcuccagccaucugccacgacggcaaagcccacuuuccuagagaaggcguguucguguccaacggcacccauugguucgugacacagcggaacuucuacgagccccagaucaucaccaccgacaacaccuucgugucuggcaacugcgacguugugaucggcauugugaacaauaccguguacgacccucugcagcccgagcuggacagcuucaaagaggaacuggacaaguacuuuaagaaccacacaagccccgacguggaccugggcgauaucagcggaaucaaugccagcgucgugaacauccagaaagagaucgaccggcugaacgagguggccaagaaucugaacgagagccugaucgaccugcaagaacuggggaaguacgagcaguacaucaagggaggcggaggaucugacaucgaccccuacaaagaguucggcagcagcuaccagcugcugaacuuccugccucuggacuucuuccccgaccugaacgcccugguggauacagccacagcucuguacgaggaagaacugaccggcagagagcacugcagcccucaccacacagccauuagacaggcccucgugugcugggacgagcugacaaaacugaucgccuggaugagcagcaacaucaccagcgagcaagugcggaccaucaucgugaaccacgugaacgauaccuggggccugaaagugcggcagagccugugguuucaccugagcugucugaccuucggccagcacaccgugcaagaguuucugguguccuucggcguguggaucagaaccccugcuccauacagaccuccaaacgcucccauccugagcacccugccugagcacacagugaucuguuga

SEQ ID NO: 12135 - RNA, 4098 nt, Artificial Sequence
  SARS-CoV-2/Wuhan/WIV05/2019__EPI_ISL_402128 spike protein CDS gc mod (1-1211)(I714C_Y1110C) WhcAg construct
auguucguguuucuggugcugcugccccugguguccagccagugugugaaccugaccaccagaacacagcugccuccagccuacaccaacagcuucaccagaggcguguacuaccccgacaagguguucagauccagcgugcugcacucuacccaggaccuguuccugccuuucuucagcaacgugaccugguuccacgccauccacguguccggcaccaauggcaccaagagauucgacaaccccgugcugcccuucaacgacgggguguacuuugccagcaccgagaaguccaacaucaucagaggcuggaucuucggcaccacacuggacagcaagacccagagccugcugaucgugaacaacgccaccaacguggucaucaaagugugcgaguuccaguucugcaacgaccccuuccugggcgucuacuaccacaagaacaacaagagcuggauggaaagcgaguuccggguguacagcagcgccaacaacugcaccuucgaguacgugucccagccuuuccugauggaccuggaaggcaagcagggcaacuucaagaaccugcgcgaguucguguucaagaacaucgacggcuacuucaaaaucuacagcaagcacaccccuaucaaccucgugcgggaucugccucagggcuucucugcucuggaaccccugguggaucugcccaucggcaucaacaucacccgguuucagacacugcuggcccugcacagaagcuaccugacaccuggcgauagcagcagcggauggacagcuggugccgccgcuuacuaugugggcuaccugcagccuagaaccuuccugcugaaguacaacgagaacggcaccaucaccgacgccguggauugugcucuggauccucugagcgagacaaagugcacccugaaguccuucaccguggaaaagggcaucuaccagaccagcaacuuccgggugcagcccaccgaauccaucgugcgguuccccaauaucaccaaucugugccccuucggcgagguguucaaugccaccagauucgccucuguguacgccuggaaccggaagcggaucagcaauugcguggccgacuacuccgugcuguacaacuccgccagcuucagcaccuucaagugcuacggcguguccccuaccaagcugaacgaccugugcuucacaaacguguacgccgacagcuucgugauccggggagaugaagugcggcagauugccccuggacagacaggcaagaucgccgacuacaacuacaagcugcccgacgacuucaccggcugugugauugccuggaacagcaacaaccuggacuccaaagucggcggcaacuacaauuaccuguaccggcuguuccggaaguccaaucugaagcccuucgagcgggacaucagcaccgaaaucuaucaggccggcagcaccccuugcaacggcguggaaggcuucaacugcuacuucccacugcaguccuacggcuuucagcccacaaauggcgugggcuaucagcccuacagagugguggugcugagcuucgaacugcugcaugcuccugccacagugugcggcccuaagaaaagcaccaaucucgugaagaacaaaugcgugaacuucaacuucaacggccugaccggcaccggcgugcugacagagagcaacaagaaguuccugccauuccagcaguuuggccgggauaucgccgauaccacagacgccguuagagauccccagacacuggaaauccuggacaucaccccaugcagcuucggcggagugucugugaucaccccuggcaccaacaccagcaaucagguggcagugcuguaccaggacgugaacuguaccgaagugcccguggccauucacgccgaucagcugacaccuacauggcggguguacuccaccggcagcaauguguuucagaccagagccggcugucugaucggagccgagcacgugaacaauagcuacgagugcgacauccccaucggcgcuggcaucugugccagcuaccagacacagacaaacagccccagacgggcuagaagcguggccagccagagcaucauugccuacacaaugucucugggcgccgagaacagcguggccuacuccaacaacucuaucgcuugccccaccaacuucaccaucagcgugaccaccgagauccugccuguguccaugaccaagaccagcguggacugcaccauguacaucugcggcgauuccaccgagugcuccaaccugcugcugcaguacggcagcuucugcacccagcugaauagagcccugacagggaucgccguggaacaggacaagaacacccaagagguguucgcccaagugaagcaaaucuacaagaccccuccuaucaaggacuucggcggcuucaauuucagccagauucugcccgauccuagcaagcccagcaagcggagcuucaucgaggaccugcuguucaacaaagugacacuggccgacgccggcuucaucaagcaguauggcgauugucugggcgacauugccgccagggaucugauuugcgcccagaaguuuaacggacugacagugcugccuccucugcugaccgaugagaugaucgcccaguacacaucugcccugcuggccggcacaaucacaagcggcuggacauuuggagcuggcgccgcucugcagauccccuuugcuaugcagauggccuaccgguucaacggcaucggagugacccagaaugugcuguacgagaaccagaagcugaucgccaaccaguucaacagcgccaucggcaagauccaggacagccugagcagcacagcaagcgcccugggaaagcugcaggacguggucaaccagaaugcccaggcacugaacacccuggucaagcagcuguccuccaacuucggcgccaucagcucugugcugaacgauauccugagcagacuggacaaggucgaggccgaggugcagaucgacagacugaucacaggcagacugcagagccuccagacauacgugacccagcagcugaucagagccgccgagauuagagccucugccaaucuggccgccaccaagaugucugagugugugcugggccagagcaagagaguggacuuuugcggcaagggcuaccaccugaugagcuucccucagucugccccucacggcgugguguuucugcacgugacauaugugcccgcucaagagaagaauuucaccaccgcuccagccaucugccacgacggcaaagcccacuuuccuagagaaggcguguucguguccaacggcacccauugguucgugacacagcggaacuucugugagccccagaucaucaccaccgacaacaccuucgugucuggcaacugcgacguugugaucggcauugugaacaauaccguguacgacccucugcagcccgagcuggacagcuucaaagaggaacuggacaaguacuuuaagaaccacacaagccccgacguggaccugggcgauaucagcggaaucaaugccagcgucgugaacauccagaaagagaucgaccggcugaacgagguggccaagaaucugaacgagagccugaucgaccugcaagaacuggggaaguacgagcaguacaucaagggaggcggaggaucugacaucgaccccuacaaagaguucggcagcagcuaccagcugcugaacuuccugccucuggacuucuuccccgaccugaacgcccugguggauacagccacagcucuguacgaggaagaacugaccggcagagagcacugcagcccucaccacacagccauuagacaggcccucgugugcugggacgagcugacaaaacugaucgccuggaugagcagcaacaucaccagcgagcaagugcggaccaucaucgugaaccacgugaacgauaccuggggccugaaagugcggcagagccugugguuucaccugagcugucugaccuucggccagcacaccgugcaagaguuucugguguccuucggcguguggaucagaaccccugcuccauacagaccuccaaacgcucccauccugagcacccugccugagcacacagugaucuguuga

SEQ ID NO: 12136 - RNA, 4098 nt, Artificial Sequence
  SARS-CoV-2/Wuhan/WIV05/2019__EPI_ISL_402128 spike protein CDS gc mod (1-1211)(P715C_P1069C) WhcAg construct
auguucguguuucuggugcugcugccccugguguccagccagugugugaaccugaccaccagaacacagcugccuccagccuacaccaacagcuucaccagaggcguguacuaccccgacaagguguucagauccagcgugcugcacucuacccaggaccuguuccugccuuucuucagcaacgugaccugguuccacgccauccacguguccggcaccaauggcaccaagagauucgacaaccccgugcugcccuucaacgacgggguguacuuugccagcaccgagaaguccaacaucaucagaggcuggaucuucggcaccacacuggacagcaagacccagagccugcugaucgugaacaacgccaccaacguggucaucaaagugugcgaguuccaguucugcaacgaccccuuccugggcgucuacuaccacaagaacaacaagagcuggauggaaagcgaguuccggguguacagcagcgccaacaacugcaccuucgaguacgugucccagccuuuccugauggaccuggaaggcaagcagggcaacuucaagaaccugcgcgaguucguguucaagaacaucgacggcuacuucaaaaucuacagcaagcacaccccuaucaaccucgugcgggaucugccucagggcuucucugcucuggaaccccugguggaucugcccaucggcaucaacaucacccgguuucagacacugcuggcccugcacagaagcuaccugacaccuggcgauagcagcagcggauggacagcuggugccgccgcuuacuaugugggcuaccugcagccuagaaccuuccugcugaaguacaacgagaacggcaccaucaccgacgccguggauugugcucuggauccucugagcgagacaaagugcacccugaaguccuucaccguggaaaagggcaucuaccagaccagcaacuuccgggugcagcccaccgaauccaucgugcgguuccccaauaucaccaaucugugccccuucggcgagguguucaaugccaccagauucgccucuguguacgccuggaaccggaagcggaucagcaauugcguggccgacuacuccgugcuguacaacuccgccagcuucagcaccuucaagugcuacggcguguccccuaccaagcugaacgaccugugcuucacaaacguguacgccgacagcuucgugauccggggagaugaagugcggcagauugccccuggacagacaggcaagaucgccgacuacaacuacaagcugcccgacgacuucaccggcugugugauugccuggaacagcaacaaccuggacuccaaagucggcggcaacuacaauuaccuguaccggcuguuccggaaguccaaucugaagcccuucgagcgggacaucagcaccgaaaucuaucaggccggcagcaccccuugcaacggcguggaaggcuucaacugcuacuucccacugcaguccuacggcuuucagcccacaaauggcgugggcuaucagcccuacagagugguggugcugagcuucgaacugcugcaugcuccugccacagugugcggcccuaagaaaagcaccaaucucgugaagaacaaaugcgugaacuucaacuucaacggccugaccggcaccggcgugcugacagagagcaacaagaaguuccugccauuccagcaguuuggccgggauaucgccgauaccacagacgccguuagagauccccagacacuggaaauccuggacaucaccccaugcagcuucggcggagugucugugaucaccccuggcaccaacaccagcaaucagguggcagugcuguaccaggacgugaacuguaccgaagugcccguggccauucacgccgaucagcugacaccuacauggcggguguacuccaccggcagcaauguguuucagaccagagccggcugucugaucggagccgagcacgugaacaauagcuacgagugcgacauccccaucggcgcuggcaucugugccagcuaccagacacagacaaacagccccagacgggcuagaagcguggccagccagagcaucauugccuacacaaugucucugggcgccgagaacagcguggccuacuccaacaacucuaucgcuaucugcaccaacuucaccaucagcgugaccaccgagauccugccuguguccaugaccaagaccagcguggacugcaccauguacaucugcggcgauuccaccgagugcuccaaccugcugcugcaguacggcagcuucugcacccagcugaauagagcccugacagggaucgccguggaacaggacaagaacacccaagagguguucgcccaagugaagcaaaucuacaagaccccuccuaucaaggacuucggcggcuucaauuucagccagauucugcccgauccuagcaagcccagcaagcggagcuucaucgaggaccugcuguucaacaaagugacacuggccgacgccggcuucaucaagcaguauggcgauugucugggcgacauugccgccagggaucugauuugcgcccagaaguuuaacggacugacagugcugccuccucugcugaccgaugagaugaucgcccaguacacaucugcccugcuggccggcacaaucacaagcggcuggacauuuggagcuggcgccgcucugcagauccccuuugcuaugcagauggccuaccgguucaacggcaucggagugacccagaaugugcuguacgagaaccagaagcugaucgccaaccaguucaacagcgccaucggcaagauccaggacagccugagcagcacagcaagcgcccugggaaagcugcaggacguggucaaccagaaugcccaggcacugaacacccuggucaagcagcuguccuccaacuucggcgccaucagcucugugcugaacgauauccugagcagacuggacaaggucgaggccgaggugcagaucgacagacugaucacaggcagacugcagagccuccagacauacgugacccagcagcugaucagagccgccgagauuagagccucugccaaucuggccgccaccaagaugucugagugugugcugggccagagcaagagaguggacuuuugcggcaagggcuaccaccugaugagcuucccucagucugccccucacggcgugguguuucugcacgugacauaugugugugcucaagagaagaauuucaccaccgcuccagccaucugccacgacggcaaagcccacuuuccuagagaaggcguguucguguccaacggcacccauugguucgugacacagcggaacuucuacgagccccagaucaucaccaccgacaacaccuucgugucuggcaacugcgacguugugaucggcauugugaacaauaccguguacgacccucugcagcccgagcuggacagcuucaaagaggaacuggacaaguacuuuaagaaccacacaagccccgacguggaccugggcgauaucagcggaaucaaugccagcgucgugaacauccagaaagagaucgaccggcugaacgagguggccaagaaucugaacgagagccugaucgaccugcaagaacuggggaaguacgagcaguacaucaagggaggcggaggaucugacaucgaccccuacaaagaguucggcagcagcuaccagcugcugaacuuccugccucuggacuucuuccccgaccugaacgcccugguggauacagccacagcucuguacgaggaagaacugaccggcagagagcacugcagcccucaccacacagccauuagacaggcccucgugugcugggacgagcugacaaaacugaucgccuggaugagcagcaacaucaccagcgagcaagugcggaccaucaucgugaaccacgugaacgauaccuggggccugaaagugcggcagagccugugguuucaccugagcugucugaccuucggccagcacaccgugcaagaguuucugguguccuucggcguguggaucagaaccccugcuccauacagaccuccaaacgcucccauccugagcacccugccugagcacacagugaucuguuga

SEQ ID NO: 12137 - RNA, 4098 nt, Artificial Sequence
  SARS-CoV-2/Wuhan/WIV05/2019__EPI_ISL_402128 spike protein CDS gc mod (1-1211)(G889C_L1034C) WhcAg construct
auguucguguuucuggugcugcugccccugguguccagccagugugugaaccugaccaccagaacacagcugccuccagccuacaccaacagcuucaccagaggcguguacuaccccgacaagguguucagauccagcgugcugcacucuacccaggaccuguuccugccuuucuucagcaacgugaccugguuccacgccauccacguguccggcaccaauggcaccaagagauucgacaaccccgugcugcccuucaacgacgggguguacuuugccagcaccgagaaguccaacaucaucagaggcuggaucuucggcaccacacuggacagcaagacccagagccugcugaucgugaacaacgccaccaacguggucaucaaagugugcgaguuccaguucugcaacgaccccuuccugggcgucuacuaccacaagaacaacaagagcuggauggaaagcgaguuccggguguacagcagcgccaacaacugcaccuucgaguacgugucccagccuuuccugauggaccuggaaggcaagcagggcaacuucaagaaccugcgcgaguucguguucaagaacaucgacggcuacuucaaaaucuacagcaagcacaccccuaucaaccucgugcgggaucugccucagggcuucucugcucuggaaccccugguggaucugcccaucggcaucaacaucacccgguuucagacacugcuggcccugcacagaagcuaccugacaccuggcgauagcagcagcggauggacagcuggugccgccgcuuacuaugugggcuaccugcagccuagaaccuuccugcugaaguacaacgagaacggcaccaucaccgacgccguggauugugcucuggauccucugagcgagacaaagugcacccugaaguccuucaccguggaaaagggcaucuaccagaccagcaacuuccgggugcagcccaccgaauccaucgugcgguuccccaauaucaccaaucugugccccuucggcgagguguucaaugccaccagauucgccucuguguacgccuggaaccggaagcggaucagcaauugcguggccgacuacuccgugcuguacaacuccgccagcuucagcaccuucaagugcuacggcguguccccuaccaagcugaacgaccugugcuucacaaacguguacgccgacagcuucgugauccggggagaugaagugcggcagauugccccuggacagacaggcaagaucgccgacuacaacuacaagcugcccgacgacuucaccggcugugugauugccuggaacagcaacaaccuggacuccaaagucggcggcaacuacaauuaccuguaccggcuguuccggaaguccaaucugaagcccuucgagcgggacaucagcaccgaaaucuaucaggccggcagcaccccuugcaacggcguggaaggcuucaacugcuacuucccacugcaguccuacggcuuucagcccacaaauggcgugggcuaucagcccuacagagugguggugcugagcuucgaacugcugcaugcuccugccacagugugcggcccuaagaaaagcaccaaucucgugaagaacaaaugcgugaacuucaacuucaacggccugaccggcaccggcgugcugacagagagcaacaagaaguuccugccauuccagcaguuuggccgggauaucgccgauaccacagacgccguuagagauccccagacacuggaaauccuggacaucaccccaugcagcuucggcggagugucugugaucaccccuggcaccaacaccagcaaucagguggcagugcuguaccaggacgugaacuguaccgaagugcccguggccauucacgccgaucagcugacaccuacauggcggguguacuccaccggcagcaauguguuucagaccagagccggcugucugaucggagccgagcacgugaacaauagcuacgagugcgacauccccaucggcgcuggcaucugugccagcuaccagacacagacaaacagccccagacgggcuagaagcguggccagccagagcaucauugccuacacaaugucucugggcgccgagaacagcguggccuacuccaacaacucuaucgcuauccccaccaacuucaccaucagcgugaccaccgagauccugccuguguccaugaccaagaccagcguggacugcaccauguacaucugcggcgauuccaccgagugcuccaaccugcugcugcaguacggcagcuucugcacccagcugaauagagcccugacagggaucgccguggaacaggacaagaacacccaagagguguucgcccaagugaagcaaaucuacaagaccccuccuaucaaggacuucggcggcuucaauuucagccagauucugcccgauccuagcaagcccagcaagcggagcuucaucgaggaccugcuguucaacaaagugacacuggccgacgccggcuucaucaagcaguauggcgauugucugggcgacauugccgccagggaucugauuugcgcccagaaguuuaacggacugacagugcugccuccucugcugaccgaugagaugaucgcccaguacacaucugcccugcuggccggcacaaucacaagcggcuggacauuuugcgcuggcgccgcucugcagauccccuuugcuaugcagauggccuaccgguucaacggcaucggagugacccagaaugugcuguacgagaaccagaagcugaucgccaaccaguucaacagcgccaucggcaagauccaggacagccugagcagcacagcaagcgcccugggaaagcugcaggacguggucaaccagaaugcccaggcacugaacacccuggucaagcagcuguccuccaacuucggcgccaucagcucugugcugaacgauauccugagcagacuggacaaggucgaggccgaggugcagaucgacagacugaucacaggcagacugcagagccuccagacauacgugacccagcagcugaucagagccgccgagauuagagccucugccaaucuggccgccaccaagaugucugaguguguguguggccagagcaagagaguggacuuuugcggcaagggcuaccaccugaugagcuucccucagucugccccucacggcgugguguuucugcacgugacauaugugcccgcucaagagaagaauuucaccaccgcuccagccaucugccacgacggcaaagcccacuuuccuagagaaggcguguucguguccaacggcacccauugguucgugacacagcggaacuucuacgagccccagaucaucaccaccgacaacaccuucgugucuggcaacugcgacguugugaucggcauugugaacaauaccguguacgacccucugcagcccgagcuggacagcuucaaagaggaacuggacaaguacuuuaagaaccacacaagccccgacguggaccugggcgauaucagcggaaucaaugccagcgucgugaacauccagaaagagaucgaccggcugaacgagguggccaagaaucugaacgagagccugaucgaccugcaagaacuggggaaguacgagcaguacaucaagggaggcggaggaucugacaucgaccccuacaaagaguucggcagcagcuaccagcugcugaacuuccugccucuggacuucuuccccgaccugaacgcccugguggauacagccacagcucuguacgaggaagaacugaccggcagagagcacugcagcccucaccacacagccauuagacaggcccucgugugcugggacgagcugacaaaacugaucgccuggaugagcagcaacaucaccagcgagcaagugcggaccaucaucgugaaccacgugaacgauaccuggggccugaaagugcggcagagccugugguuucaccugagcugucugaccuucggccagcacaccgugcaagaguuucugguguccuucggcguguggaucagaaccccugcuccauacagaccuccaaacgcucccauccugagcacccugccugagcacacagugaucuguuga

SEQ ID NO: 12138 - RNA, 4098 nt, Artificial Sequence
  SARS-CoV-2/Wuhan/WIV05/2019__EPI_ISL_402128 spike protein CDS gc mod (1-1211)(I909C_Y1047C) WhcAg construct
auguucguguuucuggugcugcugccccugguguccagccagugugugaaccugaccaccagaacacagcugccuccagccuacaccaacagcuucaccagaggcguguacuaccccgacaagguguucagauccagcgugcugcacucuacccaggaccuguuccugccuuucuucagcaacgugaccugguuccacgccauccacguguccggcaccaauggcaccaagagauucgacaaccccgugcugcccuucaacgacgggguguacuuugccagcaccgagaaguccaacaucaucagaggcuggaucuucggcaccacacuggacagcaagacccagagccugcugaucgugaacaacgccaccaacguggucaucaaagugugcgaguuccaguucugcaacgaccccuuccugggcgucuacuaccacaagaacaacaagagcuggauggaaagcgaguuccggguguacagcagcgccaacaacugcaccuucgaguacgugucccagccuuuccugauggaccuggaaggcaagcagggcaacuucaagaaccugcgcgaguucguguucaagaacaucgacggcuacuucaaaaucuacagcaagcacaccccuaucaaccucgugcgggaucugccucagggcuucucugcucuggaaccccugguggaucugcccaucggcaucaacaucacccgguuucagacacugcuggcccugcacagaagcuaccugacaccuggcgauagcagcagcggauggacagcuggugccgccgcuuacuaugugggcuaccugcagccuagaaccuuccugcugaaguacaacgagaacggcaccaucaccgacgccguggauugugcucuggauccucugagcgagacaaagugcacccugaaguccuucaccguggaaaagggcaucuaccagaccagcaacuuccgggugcagcccaccgaauccaucgugcgguuccccaauaucaccaaucugugccccuucggcgagguguucaaugccaccagauucgccucuguguacgccuggaaccggaagcggaucagcaauugcguggccgacuacuccgugcuguacaacuccgccagcuucagcaccuucaagugcuacggcguguccccuaccaagcugaacgaccugugcuucacaaacguguacgccgacagcuucgugauccggggagaugaagugcggcagauugccccuggacagacaggcaagaucgccgacuacaacuacaagcugcccgacgacuucaccggcugugugauugccuggaacagcaacaaccuggacuccaaagucggcggcaacuacaauuaccuguaccggcuguuccggaaguccaaucugaagcccuucgagcgggacaucagcaccgaaaucuaucaggccggcagcaccccuugcaacggcguggaaggcuucaacugcuacuucccacugcaguccuacggcuuucagcccacaaauggcgugggcuaucagcccuacagagugguggugcugagcuucgaacugcugcaugcuccugccacagugugcggcccuaagaaaagcaccaaucucgugaagaacaaaugcgugaacuucaacuucaacggccugaccggcaccggcgugcugacagagagcaacaagaaguuccugccauuccagcaguuuggccgggauaucgccgauaccacagacgccguuagagauccccagacacuggaaauccuggacaucaccccaugcagcuucggcggagugucugugaucaccccuggcaccaacaccagcaaucagguggcagugcuguaccaggacgugaacuguaccgaagugcccguggccauucacgccgaucagcugacaccuacauggcggguguacuccaccggcagcaauguguuucagaccagagccggcugucugaucggagccgagcacgugaacaauagcuacgagugcgacauccccaucggcgcuggcaucugugccagcuaccagacacagacaaacagccccagacgggcuagaagcguggccagccagagcaucauugccuacacaaugucucugggcgccgagaacagcguggccuacuccaacaacucuaucgcuauccccaccaacuucaccaucagcgugaccaccgagauccugccuguguccaugaccaagaccagcguggacugcaccauguacaucugcggcgauuccaccgagugcuccaaccugcugcugcaguacggcagcuucugcacccagcugaauagagcccugacagggaucgccguggaacaggacaagaacacccaagagguguucgcccaagugaagcaaaucuacaagaccccuccuaucaaggacuucggcggcuucaauuucagccagauucugcccgauccuagcaagcccagcaagcggagcuucaucgaggaccugcuguucaacaaagugacacuggccgacgccggcuucaucaagcaguauggcgauugucugggcgacauugccgccagggaucugauuugcgcccagaaguuuaacggacugacagugcugccuccucugcugaccgaugagaugaucgcccaguacacaucugcccugcuggccggcacaaucacaagcggcuggacauuuggagcuggcgccgcucugcagauccccuuugcuaugcagauggccuaccgguucaacggcugcggagugacccagaaugugcuguacgagaaccagaagcugaucgccaaccaguucaacagcgccaucggcaagauccaggacagccugagcagcacagcaagcgcccugggaaagcugcaggacguggucaaccagaaugcccaggcacugaacacccuggucaagcagcuguccuccaacuucggcgccaucagcucugugcugaacgauauccugagcagacuggacaaggucgaggccgaggugcagaucgacagacugaucacaggcagacugcagagccuccagacauacgugacccagcagcugaucagagccgccgagauuagagccucugccaaucuggccgccaccaagaugucugagugugugcugggccagagcaagagaguggacuuuugcggcaagggcugucaccugaugagcuucccucagucugccccucacggcgugguguuucugcacgugacauaugugcccgcucaagagaagaauuucaccaccgcuccagccaucugccacgacggcaaagcccacuuuccuagagaaggcguguucguguccaacggcacccauugguucgugacacagcggaacuucuacgagccccagaucaucaccaccgacaacaccuucgugucuggcaacugcgacguugugaucggcauugugaacaauaccguguacgacccucugcagcccgagcuggacagcuucaaagaggaacuggacaaguacuuuaagaaccacacaagccccgacguggaccugggcgauaucagcggaaucaaugccagcgucgugaacauccagaaagagaucgaccggcugaacgagguggccaagaaucugaacgagagccugaucgaccugcaagaacuggggaaguacgagcaguacaucaagggaggcggaggaucugacaucgaccccuacaaagaguucggcagcagcuaccagcugcugaacuuccugccucuggacuucuuccccgaccugaacgcccugguggauacagccacagcucuguacgaggaagaacugaccggcagagagcacugcagcccucaccacacagccauuagacaggcccucgugugcugggacgagcugacaaaacugaucgccuggaugagcagcaacaucaccagcgagcaagugcggaccaucaucgugaaccacgugaacgauaccuggggccugaaagugcggcagagccugugguuucaccugagcugucugaccuucggccagcacaccgugcaagaguuucugguguccuucggcguguggaucagaaccccugcuccauacagaccuccaaacgcucccauccugagcacccugccugagcacacagugaucuguuga

SEQ ID NO: 12139 - RNA, 4098 nt, Artificial Sequence
  SARS-CoV-2/Wuhan/WIV05/2019__EPI_ISL_402128 spike protein CDS gc mod (1-1211)(Q965C_S1003C) WhcAg construct
auguucguguuucuggugcugcugccccugguguccagccagugugugaaccugaccaccagaacacagcugccuccagccuacaccaacagcuucaccagaggcguguacuaccccgacaagguguucagauccagcgugcugcacucuacccaggaccuguuccugccuuucuucagcaacgugaccugguuccacgccauccacguguccggcaccaauggcaccaagagauucgacaaccccgugcugcccuucaacgacgggguguacuuugccagcaccgagaaguccaacaucaucagaggcuggaucuucggcaccacacuggacagcaagacccagagccugcugaucgugaacaacgccaccaacguggucaucaaagugugcgaguuccaguucugcaacgaccccuuccugggcgucuacuaccacaagaacaacaagagcuggauggaaagcgaguuccggguguacagcagcgccaacaacugcaccuucgaguacgugucccagccuuuccugauggaccuggaaggcaagcagggcaacuucaagaaccugcgcgaguucguguucaagaacaucgacggcuacuucaaaaucuacagcaagcacaccccuaucaaccucgugcgggaucugccucagggcuucucugcucuggaaccccugguggaucugcccaucggcaucaacaucacccgguuucagacacugcuggcccugcacagaagcuaccugacaccuggcgauagcagcagcggauggacagcuggugccgccgcuuacuaugugggcuaccugcagccuagaaccuuccugcugaaguacaacgagaacggcaccaucaccgacgccguggauugugcucuggauccucugagcgagacaaagugcacccugaaguccuucaccguggaaaagggcaucuaccagaccagcaacuuccgggugcagcccaccgaauccaucgugcgguuccccaauaucaccaaucugugccccuucggcgagguguucaaugccaccagauucgccucuguguacgccuggaaccggaagcggaucagcaauugcguggccgacuacuccgugcuguacaacuccgccagcuucagcaccuucaagugcuacggcguguccccuaccaagcugaacgaccugugcuucacaaacguguacgccgacagcuucgugauccggggagaugaagugcggcagauugccccuggacagacaggcaagaucgccgacuacaacuacaagcugcccgacgacuucaccggcugugugauugccuggaacagcaacaaccuggacuccaaagucggcggcaacuacaauuaccuguaccggcuguuccggaaguccaaucugaagcccuucgagcgggacaucagcaccgaaaucuaucaggccggcagcaccccuugcaacggcguggaaggcuucaacugcuacuucccacugcaguccuacggcuuucagcccacaaauggcgugggcuaucagcccuacagagugguggugcugagcuucgaacugcugcaugcuccugccacagugugcggcccuaagaaaagcaccaaucucgugaagaacaaaugcgugaacuucaacuucaacggccugaccggcaccggcgugcugacagagagcaacaagaaguuccugccauuccagcaguuuggccgggauaucgccgauaccacagacgccguuagagauccccagacacuggaaauccuggacaucaccccaugcagcuucggcggagugucugugaucaccccuggcaccaacaccagcaaucagguggcagugcuguaccaggacgugaacuguaccgaagugcccguggccauucacgccgaucagcugacaccuacauggcggguguacuccaccggcagcaauguguuucagaccagagccggcugucugaucggagccgagcacgugaacaauagcuacgagugcgacauccccaucggcgcuggcaucugugccagcuaccagacacagacaaacagccccagacgggcuagaagcguggccagccagagcaucauugccuacacaaugucucugggcgccgagaacagcguggccuacuccaacaacucuaucgcuauccccaccaacuucaccaucagcgugaccaccgagauccugccuguguccaugaccaagaccagcguggacugcaccauguacaucugcggcgauuccaccgagugcuccaaccugcugcugcaguacggcagcuucugcacccagcugaauagagcccugacagggaucgccguggaacaggacaagaacacccaagagguguucgcccaagugaagcaaaucuacaagaccccuccuaucaaggacuucggcggcuucaauuucagccagauucugcccgauccuagcaagcccagcaagcggagcuucaucgaggaccugcuguucaacaaagugacacuggccgacgccggcuucaucaagcaguauggcgauugucugggcgacauugccgccagggaucugauuugcgcccagaaguuuaacggacugacagugcugccuccucugcugaccgaugagaugaucgcccaguacacaucugcccugcuggccggcacaaucacaagcggcuggacauuuggagcuggcgccgcucugcagauccccuuugcuaugcagauggccuaccgguucaacggcaucggagugacccagaaugugcuguacgagaaccagaagcugaucgccaaccaguucaacagcgccaucggcaagauccaggacagccugagcagcacagcaagcgcccugggaaagcugcaggacguggucaaccagaaugcccaggcacugaacacccuggucaagugccuguccuccaacuucggcgccaucagcucugugcugaacgauauccugagcagacuggacaaggucgaggccgaggugcagaucgacagacugaucacaggcagacugcagugucuccagacauacgugacccagcagcugaucagagccgccgagauuagagccucugccaaucuggccgccaccaagaugucugagugugugcugggccagagcaagagaguggacuuuugcggcaagggcuaccaccugaugagcuucccucagucugccccucacggcgugguguuucugcacgugacauaugugcccgcucaagagaagaauuucaccaccgcuccagccaucugccacgacggcaaagcccacuuuccuagagaaggcguguucguguccaacggcacccauugguucgugacacagcggaacuucuacgagccccagaucaucaccaccgacaacaccuucgugucuggcaacugcgacguugugaucggcauugugaacaauaccguguacgacccucugcagcccgagcuggacagcuucaaagaggaacuggacaaguacuuuaagaaccacacaagccccgacguggaccugggcgauaucagcggaaucaaugccagcgucgugaacauccagaaagagaucgaccggcugaacgagguggccaagaaucugaacgagagccugaucgaccugcaagaacuggggaaguacgagcaguacaucaagggaggcggaggaucugacaucgaccccuacaaagaguucggcagcagcuaccagcugcugaacuuccugccucuggacuucuuccccgaccugaacgcccugguggauacagccacagcucuguacgaggaagaacugaccggcagagagcacugcagcccucaccacacagccauuagacaggcccucgugugcugggacgagcugacaaaacugaucgccuggaugagcagcaacaucaccagcgagcaagugcggaccaucaucgugaaccacgugaacgauaccuggggccugaaagugcggcagagccugugguuucaccugagcugucugaccuucggccagcacaccgugcaagaguuucugguguccuucggcguguggaucagaaccccugcuccauacagaccuccaaacgcucccauccugagcacccugccugagcacacagugaucuguuga

SEQ ID NO: 12140 - RNA, 4098 nt, Artificial Sequence
  SARS-CoV-2/Wuhan/WIV05/2019__EPI_ISL_402128 spike protein CDS gc mod (1-1211)(F970C_G999C) WhcAg construct
auguucguguuucuggugcugcugccccugguguccagccagugugugaaccugaccaccagaacacagcugccuccagccuacaccaacagcuucaccagaggcguguacuaccccgacaagguguucagauccagcgugcugcacucuacccaggaccuguuccugccuuucuucagcaacgugaccugguuccacgccauccacguguccggcaccaauggcaccaagagauucgacaaccccgugcugcccuucaacgacgggguguacuuugccagcaccgagaaguccaacaucaucagaggcuggaucuucggcaccacacuggacagcaagacccagagccugcugaucgugaacaacgccaccaacguggucaucaaagugugcgaguuccaguucugcaacgaccccuuccugggcgucuacuaccacaagaacaacaagagcuggauggaaagcgaguuccggguguacagcagcgccaacaacugcaccuucgaguacgugucccagccuuuccugauggaccuggaaggcaagcagggcaacuucaagaaccugcgcgaguucguguucaagaacaucgacggcuacuucaaaaucuacagcaagcacaccccuaucaaccucgugcgggaucugccucagggcuucucugcucuggaaccccugguggaucugcccaucggcaucaacaucacccgguuucagacacugcuggcccugcacagaagcuaccugacaccuggcgauagcagcagcggauggacagcuggugccgccgcuuacuaugugggcuaccugcagccuagaaccuuccugcugaaguacaacgagaacggcaccaucaccgacgccguggauugugcucuggauccucugagcgagacaaagugcacccugaaguccuucaccguggaaaagggcaucuaccagaccagcaacuuccgggugcagcccaccgaauccaucgugcgguuccccaauaucaccaaucugugccccuucggcgagguguucaaugccaccagauucgccucuguguacgccuggaaccggaagcggaucagcaauugcguggccgacuacuccgugcuguacaacuccgccagcuucagcaccuucaagugcuacggcguguccccuaccaagcugaacgaccugugcuucacaaacguguacgccgacagcuucgugauccggggagaugaagugcggcagauugccccuggacagacaggcaagaucgccgacuacaacuacaagcugcccgacgacuucaccggcugugugauugccuggaacagcaacaaccuggacuccaaagucggcggcaacuacaauuaccuguaccggcuguuccggaaguccaaucugaagcccuucgagcgggacaucagcaccgaaaucuaucaggccggcagcaccccuugcaacggcguggaaggcuucaacugcuacuucccacugcaguccuacggcuuucagcccacaaauggcgugggcuaucagcccuacagagugguggugcugagcuucgaacugcugcaugcuccugccacagugugcggcccuaagaaaagcaccaaucucgugaagaacaaaugcgugaacuucaacuucaacggccugaccggcaccggcgugcugacagagagcaacaagaaguuccugccauuccagcaguuuggccgggauaucgccgauaccacagacgccguuagagauccccagacacuggaaauccuggacaucaccccaugcagcuucggcggagugucugugaucaccccuggcaccaacaccagcaaucagguggcagugcuguaccaggacgugaacuguaccgaagugcccguggccauucacgccgaucagcugacaccuacauggcggguguacuccaccggcagcaauguguuucagaccagagccggcugucugaucggagccgagcacgugaacaauagcuacgagugcgacauccccaucggcgcuggcaucugugccagcuaccagacacagacaaacagccccagacgggcuagaagcguggccagccagagcaucauugccuacacaaugucucugggcgccgagaacagcguggccuacuccaacaacucuaucgcuauccccaccaacuucaccaucagcgugaccaccgagauccugccuguguccaugaccaagaccagcguggacugcaccauguacaucugcggcgauuccaccgagugcuccaaccugcugcugcaguacggcagcuucugcacccagcugaauagagcccugacagggaucgccguggaacaggacaagaacacccaagagguguucgcccaagugaagcaaaucuacaagaccccuccuaucaaggacuucggcggcuucaauuucagccagauucugcccgauccuagcaagcccagcaagcggagcuucaucgaggaccugcuguucaacaaagugacacuggccgacgccggcuucaucaagcaguauggcgauugucugggcgacauugccgccagggaucugauuugcgcccagaaguuuaacggacugacagugcugccuccucugcugaccgaugagaugaucgcccaguacacaucugcccugcuggccggcacaaucacaagcggcuggacauuuggagcuggcgccgcucugcagauccccuuugcuaugcagauggccuaccgguucaacggcaucggagugacccagaaugugcuguacgagaaccagaagcugaucgccaaccaguucaacagcgccaucggcaagauccaggacagccugagcagcacagcaagcgcccugggaaagcugcaggacguggucaaccagaaugcccaggcacugaacacccuggucaagcagcuguccuccaacugcggcgccaucagcucugugcugaacgauauccugagcagacuggacaaggucgaggccgaggugcagaucgacagacugaucacauguagacugcagagccuccagacauacgugacccagcagcugaucagagccgccgagauuagagccucugccaaucuggccgccaccaagaugucugagugugugcugggccagagcaagagaguggacuuuugcggcaagggcuaccaccugaugagcuucccucagucugccccucacggcgugguguuucugcacgugacauaugugcccgcucaagagaagaauuucaccaccgcuccagccaucugccacgacggcaaagcccacuuuccuagagaaggcguguucguguccaacggcacccauugguucgugacacagcggaacuucuacgagccccagaucaucaccaccgacaacaccuucgugucuggcaacugcgacguugugaucggcauugugaacaauaccguguacgacccucugcagcccgagcuggacagcuucaaagaggaacuggacaaguacuuuaagaaccacacaagccccgacguggaccugggcgauaucagcggaaucaaugccagcgucgugaacauccagaaagagaucgaccggcugaacgagguggccaagaaucugaacgagagccugaucgaccugcaagaacuggggaaguacgagcaguacaucaagggaggcggaggaucugacaucgaccccuacaaagaguucggcagcagcuaccagcugcugaacuuccugccucuggacuucuuccccgaccugaacgcccugguggauacagccacagcucuguacgaggaagaacugaccggcagagagcacugcagcccucaccacacagccauuagacaggcccucgugugcugggacgagcugacaaaacugaucgccuggaugagcagcaacaucaccagcgagcaagugcggaccaucaucgugaaccacgugaacgauaccuggggccugaaagugcggcagagccugugguuucaccugagcugucugaccuucggccagcacaccgugcaagaguuucugguguccuucggcguguggaucagaaccccugcuccauacagaccuccaaacgcucccauccugagcacccugccugagcacacagugaucuguuga

SEQ ID NO: 12141 - RNA, 4098 nt, Artificial Sequence
  SARS-CoV-2/Wuhan/WIV05/2019__EPI_ISL_402128 spike protein CDS gc mod (1-1211)(A972C_R995C) WhcAg construct
auguucguguuucuggugcugcugccccugguguccagccagugugugaaccugaccaccagaacacagcugccuccagccuacaccaacagcuucaccagaggcguguacuaccccgacaagguguucagauccagcgugcugcacucuacccaggaccuguuccugccuuucuucagcaacgugaccugguuccacgccauccacguguccggcaccaauggcaccaagagauucgacaaccccgugcugcccuucaacgacgggguguacuuugccagcaccgagaaguccaacaucaucagaggcuggaucuucggcaccacacuggacagcaagacccagagccugcugaucgugaacaacgccaccaacguggucaucaaagugugcgaguuccaguucugcaacgaccccuuccugggcgucuacuaccacaagaacaacaagagcuggauggaaagcgaguuccggguguacagcagcgccaacaacugcaccuucgaguacgugucccagccuuuccugauggaccuggaaggcaagcagggcaacuucaagaaccugcgcgaguucguguucaagaacaucgacggcuacuucaaaaucuacagcaagcacaccccuaucaaccucgugcgggaucugccucagggcuucucugcucuggaaccccugguggaucugcccaucggcaucaacaucacccgguuucagacacugcuggcccugcacagaagcuaccugacaccuggcgauagcagcagcggauggacagcuggugccgccgcuuacuaugugggcuaccugcagccuagaaccuuccugcugaaguacaacgagaacggcaccaucaccgacgccguggauugugcucuggauccucugagcgagacaaagugcacccugaaguccuucaccguggaaaagggcaucuaccagaccagcaacuuccgggugcagcccaccgaauccaucgugcgguuccccaauaucaccaaucugugccccuucggcgagguguucaaugccaccagauucgccucuguguacgccuggaaccggaagcggaucagcaauugcguggccgacuacuccgugcuguacaacuccgccagcuucagcaccuucaagugcuacggcguguccccuaccaagcugaacgaccugugcuucacaaacguguacgccgacagcuucgugauccggggagaugaagugcggcagauugccccuggacagacaggcaagaucgccgacuacaacuacaagcugcccgacgacuucaccggcugugugauugccuggaacagcaacaaccuggacuccaaagucggcggcaacuacaauuaccuguaccggcuguuccggaaguccaaucugaagcccuucgagcgggacaucagcaccgaaaucuaucaggccggcagcaccccuugcaacggcguggaaggcuucaacugcuacuucccacugcaguccuacggcuuucagcccacaaauggcgugggcuaucagcccuacagagugguggugcugagcuucgaacugcugcaugcuccugccacagugugcggcccuaagaaaagcaccaaucucgugaagaacaaaugcgugaacuucaacuucaacggccugaccggcaccggcgugcugacagagagcaacaagaaguuccugccauuccagcaguuuggccgggauaucgccgauaccacagacgccguuagagauccccagacacuggaaauccuggacaucaccccaugcagcuucggcggagugucugugaucaccccuggcaccaacaccagcaaucagguggcagugcuguaccaggacgugaacuguaccgaagugcccguggccauucacgccgaucagcugacaccuacauggcggguguacuccaccggcagcaauguguuucagaccagagccggcugucugaucggagccgagcacgugaacaauagcuacgagugcgacauccccaucggcgcuggcaucugugccagcuaccagacacagacaaacagccccagacgggcuagaagcguggccagccagagcaucauugccuacacaaugucucugggcgccgagaacagcguggccuacuccaacaacucuaucgcuauccccaccaacuucaccaucagcgugaccaccgagauccugccuguguccaugaccaagaccagcguggacugcaccauguacaucugcggcgauuccaccgagugcuccaaccugcugcugcaguacggcagcuucugcacccagcugaauagagcccugacagggaucgccguggaacaggacaagaacacccaagagguguucgcccaagugaagcaaaucuacaagaccccuccuaucaaggacuucggcggcuucaauuucagccagauucugcccgauccuagcaagcccagcaagcggagcuucaucgaggaccugcuguucaacaaagugacacuggccgacgccggcuucaucaagcaguauggcgauugucugggcgacauugccgccagggaucugauuugcgcccagaaguuuaacggacugacagugcugccuccucugcugaccgaugagaugaucgcccaguacacaucugcccugcuggccggcacaaucacaagcggcuggacauuuggagcuggcgccgcucugcagauccccuuugcuaugcagauggccuaccgguucaacggcaucggagugacccagaaugugcuguacgagaaccagaagcugaucgccaaccaguucaacagcgccaucggcaagauccaggacagccugagcagcacagcaagcgcccugggaaagcugcaggacguggucaaccagaaugcccaggcacugaacacccuggucaagcagcuguccuccaacuucggcugcaucagcucugugcugaacgauauccugagcagacuggacaaggucgaggccgaggugcagaucgacugucugaucacaggcagacugcagagccuccagacauacgugacccagcagcugaucagagccgccgagauuagagccucugccaaucuggccgccaccaagaugucugagugugugcugggccagagcaagagaguggacuuuugcggcaagggcuaccaccugaugagcuucccucagucugccccucacggcgugguguuucugcacgugacauaugugcccgcucaagagaagaauuucaccaccgcuccagccaucugccacgacggcaaagcccacuuuccuagagaaggcguguucguguccaacggcacccauugguucgugacacagcggaacuucuacgagccccagaucaucaccaccgacaacaccuucgugucuggcaacugcgacguugugaucggcauugugaacaauaccguguacgacccucugcagcccgagcuggacagcuucaaagaggaacuggacaaguacuuuaagaaccacacaagccccgacguggaccugggcgauaucagcggaaucaaugccagcgucgugaacauccagaaagagaucgaccggcugaacgagguggccaagaaucugaacgagagccugaucgaccugcaagaacuggggaaguacgagcaguacaucaagggaggcggaggaucugacaucgaccccuacaaagaguucggcagcagcuaccagcugcugaacuuccugccucuggacuucuuccccgaccugaacgcccugguggauacagccacagcucuguacgaggaagaacugaccggcagagagcacugcagcccucaccacacagccauuagacaggcccucgugugcugggacgagcugacaaaacugaucgccuggaugagcagcaacaucaccagcgagcaagugcggaccaucaucgugaaccacgugaacgauaccuggggccugaaagugcggcagagccugugguuucaccugagcugucugaccuucggccagcacaccgugcaagaguuucugguguccuucggcguguggaucagaaccccugcuccauacagaccuccaaacgcucccauccugagcacccugccugagcacacagugaucuguuga

SEQ ID NO: 12142 - RNA, 4098 nt, Artificial Sequence
  SARS-CoV-2/Wuhan/WIV05/2019__EPI_ISL_402128 spike protein CDS gc mod (1-1211)(A890C_V1040C) WhcAg construct
auguucguguuucuggugcugcugccccugguguccagccagugugugaaccugaccaccagaacacagcugccuccagccuacaccaacagcuucaccagaggcguguacuaccccgacaagguguucagauccagcgugcugcacucuacccaggaccuguuccugccuuucuucagcaacgugaccugguuccacgccauccacguguccggcaccaauggcaccaagagauucgacaaccccgugcugcccuucaacgacgggguguacuuugccagcaccgagaaguccaacaucaucagaggcuggaucuucggcaccacacuggacagcaagacccagagccugcugaucgugaacaacgccaccaacguggucaucaaagugugcgaguuccaguucugcaacgaccccuuccugggcgucuacuaccacaagaacaacaagagcuggauggaaagcgaguuccggguguacagcagcgccaacaacugcaccuucgaguacgugucccagccuuuccugauggaccuggaaggcaagcagggcaacuucaagaaccugcgcgaguucguguucaagaacaucgacggcuacuucaaaaucuacagcaagcacaccccuaucaaccucgugcgggaucugccucagggcuucucugcucuggaaccccugguggaucugcccaucggcaucaacaucacccgguuucagacacugcuggcccugcacagaagcuaccugacaccuggcgauagcagcagcggauggacagcuggugccgccgcuuacuaugugggcuaccugcagccuagaaccuuccugcugaaguacaacgagaacggcaccaucaccgacgccguggauugugcucuggauccucugagcgagacaaagugcacccugaaguccuucaccguggaaaagggcaucuaccagaccagcaacuuccgggugcagcccaccgaauccaucgugcgguuccccaauaucaccaaucugugccccuucggcgagguguucaaugccaccagauucgccucuguguacgccuggaaccggaagcggaucagcaauugcguggccgacuacuccgugcuguacaacuccgccagcuucagcaccuucaagugcuacggcguguccccuaccaagcugaacgaccugugcuucacaaacguguacgccgacagcuucgugauccggggagaugaagugcggcagauugccccuggacagacaggcaagaucgccgacuacaacuacaagcugcccgacgacuucaccggcugugugauugccuggaacagcaacaaccuggacuccaaagucggcggcaacuacaauuaccuguaccggcuguuccggaaguccaaucugaagcccuucgagcgggacaucagcaccgaaaucuaucaggccggcagcaccccuugcaacggcguggaaggcuucaacugcuacuucccacugcaguccuacggcuuucagcccacaaauggcgugggcuaucagcccuacagagugguggugcugagcuucgaacugcugcaugcuccugccacagugugcggcccuaagaaaagcaccaaucucgugaagaacaaaugcgugaacuucaacuucaacggccugaccggcaccggcgugcugacagagagcaacaagaaguuccugccauuccagcaguuuggccgggauaucgccgauaccacagacgccguuagagauccccagacacuggaaauccuggacaucaccccaugcagcuucggcggagugucugugaucaccccuggcaccaacaccagcaaucagguggcagugcuguaccaggacgugaacuguaccgaagugcccguggccauucacgccgaucagcugacaccuacauggcggguguacuccaccggcagcaauguguuucagaccagagccggcugucugaucggagccgagcacgugaacaauagcuacgagugcgacauccccaucggcgcuggcaucugugccagcuaccagacacagacaaacagccccagacgggcuagaagcguggccagccagagcaucauugccuacacaaugucucugggcgccgagaacagcguggccuacuccaacaacucuaucgcuauccccaccaacuucaccaucagcgugaccaccgagauccugccuguguccaugaccaagaccagcguggacugcaccauguacaucugcggcgauuccaccgagugcuccaaccugcugcugcaguacggcagcuucugcacccagcugaauagagcccugacagggaucgccguggaacaggacaagaacacccaagagguguucgcccaagugaagcaaaucuacaagaccccuccuaucaaggacuucggcggcuucaauuucagccagauucugcccgauccuagcaagcccagcaagcggagcuucaucgaggaccugcuguucaacaaagugacacuggccgacgccggcuucaucaagcaguauggcgauugucugggcgacauugccgccagggaucugauuugcgcccagaaguuuaacggacugacagugcugccuccucugcugaccgaugagaugaucgcccaguacacaucugcccugcuggccggcacaaucacaagcggcuggacauuuggaugcggcgccgcucugcagauccccuuugcuaugcagauggccuaccgguucaacggcaucggagugacccagaaugugcuguacgagaaccagaagcugaucgccaaccaguucaacagcgccaucggcaagauccaggacagccugagcagcacagcaagcgcccugggaaagcugcaggacguggucaaccagaaugcccaggcacugaacacccuggucaagcagcuguccuccaacuucggcgccaucagcucugugcugaacgauauccugagcagacuggacaaggucgaggccgaggugcagaucgacagacugaucacaggcagacugcagagccuccagacauacgugacccagcagcugaucagagccgccgagauuagagccucugccaaucuggccgccaccaagaugucugagugugugcugggccagagcaagagaugugacuuuugcggcaagggcuaccaccugaugagcuucccucagucugccccucacggcgugguguuucugcacgugacauaugugcccgcucaagagaagaauuucaccaccgcuccagccaucugccacgacggcaaagcccacuuuccuagagaaggcguguucguguccaacggcacccauugguucgugacacagcggaacuucuacgagccccagaucaucaccaccgacaacaccuucgugucuggcaacugcgacguugugaucggcauugugaacaauaccguguacgacccucugcagcccgagcuggacagcuucaaagaggaacuggacaaguacuuuaagaaccacacaagccccgacguggaccugggcgauaucagcggaaucaaugccagcgucgugaacauccagaaagagaucgaccggcugaacgagguggccaagaaucugaacgagagccugaucgaccugcaagaacuggggaaguacgagcaguacaucaagggaggcggaggaucugacaucgaccccuacaaagaguucggcagcagcuaccagcugcugaacuuccugccucuggacuucuuccccgaccugaacgcccugguggauacagccacagcucuguacgaggaagaacugaccggcagagagcacugcagcccucaccacacagccauuagacaggcccucgugugcugggacgagcugacaaaacugaucgccuggaugagcagcaacaucaccagcgagcaagugcggaccaucaucgugaaccacgugaacgauaccuggggccugaaagugcggcagagccugugguuucaccugagcugucugaccuucggccagcacaccgugcaagaguuucugguguccuucggcguguggaucagaaccccugcuccauacagaccuccaaacgcucccauccugagcacccugccugagcacacagugaucuguuga

SEQ ID NO: 12143 - RNA, 4098 nt, Artificial Sequence
  SARS-CoV-2/Wuhan/WIV05/2019__EPI_ISL_402128 spike protein CDS gc mod (1-1211)(T874C_S1055C) WhcAg construct
auguucguguuucuggugcugcugccccugguguccagccagugugugaaccugaccaccagaacacagcugccuccagccuacaccaacagcuucaccagaggcguguacuaccccgacaagguguucagauccagcgugcugcacucuacccaggaccuguuccugccuuucuucagcaacgugaccugguuccacgccauccacguguccggcaccaauggcaccaagagauucgacaaccccgugcugcccuucaacgacgggguguacuuugccagcaccgagaaguccaacaucaucagaggcuggaucuucggcaccacacuggacagcaagacccagagccugcugaucgugaacaacgccaccaacguggucaucaaagugugcgaguuccaguucugcaacgaccccuuccugggcgucuacuaccacaagaacaacaagagcuggauggaaagcgaguuccggguguacagcagcgccaacaacugcaccuucgaguacgugucccagccuuuccugauggaccuggaaggcaagcagggcaacuucaagaaccugcgcgaguucguguucaagaacaucgacggcuacuucaaaaucuacagcaagcacaccccuaucaaccucgugcgggaucugccucagggcuucucugcucuggaaccccugguggaucugcccaucggcaucaacaucacccgguuucagacacugcuggcccugcacagaagcuaccugacaccuggcgauagcagcagcggauggacagcuggugccgccgcuuacuaugugggcuaccugcagccuagaaccuuccugcugaaguacaacgagaacggcaccaucaccgacgccguggauugugcucuggauccucugagcgagacaaagugcacccugaaguccuucaccguggaaaagggcaucuaccagaccagcaacuuccgggugcagcccaccgaauccaucgugcgguuccccaauaucaccaaucugugccccuucggcgagguguucaaugccaccagauucgccucuguguacgccuggaaccggaagcggaucagcaauugcguggccgacuacuccgugcuguacaacuccgccagcuucagcaccuucaagugcuacggcguguccccuaccaagcugaacgaccugugcuucacaaacguguacgccgacagcuucgugauccggggagaugaagugcggcagauugccccuggacagacaggcaagaucgccgacuacaacuacaagcugcccgacgacuucaccggcugugugauugccuggaacagcaacaaccuggacuccaaagucggcggcaacuacaauuaccuguaccggcuguuccggaaguccaaucugaagcccuucgagcgggacaucagcaccgaaaucuaucaggccggcagcaccccuugcaacggcguggaaggcuucaacugcuacuucccacugcaguccuacggcuuucagcccacaaauggcgugggcuaucagcccuacagagugguggugcugagcuucgaacugcugcaugcuccugccacagugugcggcccuaagaaaagcaccaaucucgugaagaacaaaugcgugaacuucaacuucaacggccugaccggcaccggcgugcugacagagagcaacaagaaguuccugccauuccagcaguuuggccgggauaucgccgauaccacagacgccguuagagauccccagacacuggaaauccuggacaucaccccaugcagcuucggcggagugucugugaucaccccuggcaccaacaccagcaaucagguggcagugcuguaccaggacgugaacuguaccgaagugcccguggccauucacgccgaucagcugacaccuacauggcggguguacuccaccggcagcaauguguuucagaccagagccggcugucugaucggagccgagcacgugaacaauagcuacgagugcgacauccccaucggcgcuggcaucugugccagcuaccagacacagacaaacagccccagacgggcuagaagcguggccagccagagcaucauugccuacacaaugucucugggcgccgagaacagcguggccuacuccaacaacucuaucgcuauccccaccaacuucaccaucagcgugaccaccgagauccugccuguguccaugaccaagaccagcguggacugcaccauguacaucugcggcgauuccaccgagugcuccaaccugcugcugcaguacggcagcuucugcacccagcugaauagagcccugacagggaucgccguggaacaggacaagaacacccaagagguguucgcccaagugaagcaaaucuacaagaccccuccuaucaaggacuucggcggcuucaauuucagccagauucugcccgauccuagcaagcccagcaagcggagcuucaucgaggaccugcuguucaacaaagugacacuggccgacgccggcuucaucaagcaguauggcgauugucugggcgacauugccgccagggaucugauuugcgcccagaaguuuaacggacugacagugcugccuccucugcugaccgaugagaugaucgcccaguacugcucugcccugcuggccggcacaaucacaagcggcuggacauuuggagcuggcgccgcucugcagauccccuuugcuaugcagauggccuaccgguucaacggcaucggagugacccagaaugugcuguacgagaaccagaagcugaucgccaaccaguucaacagcgccaucggcaagauccaggacagccugagcagcacagcaagcgcccugggaaagcugcaggacguggucaaccagaaugcccaggcacugaacacccuggucaagcagcuguccuccaacuucggcgccaucagcucugugcugaacgauauccugagcagacuggacaaggucgaggccgaggugcagaucgacagacugaucacaggcagacugcagagccuccagacauacgugacccagcagcugaucagagccgccgagauuagagccucugccaaucuggccgccaccaagaugucugagugugugcugggccagagcaagagaguggacuuuugcggcaagggcuaccaccugaugagcuucccucagugcgccccucacggcgugguguuucugcacgugacauaugugcccgcucaagagaagaauuucaccaccgcuccagccaucugccacgacggcaaagcccacuuuccuagagaaggcguguucguguccaacggcacccauugguucgugacacagcggaacuucuacgagccccagaucaucaccaccgacaacaccuucgugucuggcaacugcgacguugugaucggcauugugaacaauaccguguacgacccucugcagcccgagcuggacagcuucaaagaggaacuggacaaguacuuuaagaaccacacaagccccgacguggaccugggcgauaucagcggaaucaaugccagcgucgugaacauccagaaagagaucgaccggcugaacgagguggccaagaaucugaacgagagccugaucgaccugcaagaacuggggaaguacgagcaguacaucaagggaggcggaggaucugacaucgaccccuacaaagaguucggcagcagcuaccagcugcugaacuuccugccucuggacuucuuccccgaccugaacgcccugguggauacagccacagcucuguacgaggaagaacugaccggcagagagcacugcagcccucaccacacagccauuagacaggcccucgugugcugggacgagcugacaaaacugaucgccuggaugagcagcaacaucaccagcgagcaagugcggaccaucaucgugaaccacgugaacgauaccuggggccugaaagugcggcagagccugugguuucaccugagcugucugaccuucggccagcacaccgugcaagaguuucugguguccuucggcguguggaucagaaccccugcuccauacagaccuccaaacgcucccauccugagcacccugccugagcacacagugaucuguuga

SEQ ID NO: 12144 - RNA, 3924 nt, Artificial Sequence
  SARS-CoV-2/Wuhan/WIV05/2019__EPI_ISL_402128 spike protein CDS gc mod (1-1147) LumSynth construct
auguucguguuucuggugcugcugccccugguguccagccagugugugaaccugaccaccagaacacagcugccuccagccuacaccaacagcuucaccagaggcguguacuaccccgacaagguguucagauccagcgugcugcacucuacccaggaccuguuccugccuuucuucagcaacgugaccugguuccacgccauccacguguccggcaccaauggcaccaagagauucgacaaccccgugcugcccuucaacgacgggguguacuuugccagcaccgagaaguccaacaucaucagaggcuggaucuucggcaccacacuggacagcaagacccagagccugcugaucgugaacaacgccaccaacguggucaucaaagugugcgaguuccaguucugcaacgaccccuuccugggcgucuacuaccacaagaacaacaagagcuggauggaaagcgaguuccggguguacagcagcgccaacaacugcaccuucgaguacgugucccagccuuuccugauggaccuggaaggcaagcagggcaacuucaagaaccugcgcgaguucguguucaagaacaucgacggcuacuucaaaaucuacagcaagcacaccccuaucaaccucgugcgggaucugccucagggcuucucugcucuggaaccccugguggaucugcccaucggcaucaacaucacccgguuucagacacugcuggcccugcacagaagcuaccugacaccuggcgauagcagcagcggauggacagcuggugccgccgcuuacuaugugggcuaccugcagccuagaaccuuccugcugaaguacaacgagaacggcaccaucaccgacgccguggauugugcucuggauccucugagcgagacaaagugcacccugaaguccuucaccguggaaaagggcaucuaccagaccagcaacuuccgggugcagcccaccgaauccaucgugcgguuccccaauaucaccaaucugugccccuucggcgagguguucaaugccaccagauucgccucuguguacgccuggaaccggaagcggaucagcaauugcguggccgacuacuccgugcuguacaacuccgccagcuucagcaccuucaagugcuacggcguguccccuaccaagcugaacgaccugugcuucacaaacguguacgccgacagcuucgugauccggggagaugaagugcggcagauugccccuggacagacaggcaagaucgccgacuacaacuacaagcugcccgacgacuucaccggcugugugauugccuggaacagcaacaaccuggacuccaaagucggcggcaacuacaauuaccuguaccggcuguuccggaaguccaaucugaagcccuucgagcgggacaucagcaccgaaaucuaucaggccggcagcaccccuugcaacggcguggaaggcuucaacugcuacuucccacugcaguccuacggcuuucagcccacaaauggcgugggcuaucagcccuacagagugguggugcugagcuucgaacugcugcaugcuccugccacagugugcggcccuaagaaaagcaccaaucucgugaagaacaaaugcgugaacuucaacuucaacggccugaccggcaccggcgugcugacagagagcaacaagaaguuccugccauuccagcaguuuggccgggauaucgccgauaccacagacgccguuagagauccccagacacuggaaauccuggacaucaccccaugcagcuucggcggagugucugugaucaccccuggcaccaacaccagcaaucagguggcagugcuguaccaggacgugaacuguaccgaagugcccguggccauucacgccgaucagcugacaccuacauggcggguguacuccaccggcagcaauguguuucagaccagagccggcugucugaucggagccgagcacgugaacaauagcuacgagugcgacauccccaucggcgcuggcaucugugccagcuaccagacacagacaaacagccccagacgggcuagaagcguggccagccagagcaucauugccuacacaaugucucugggcgccgagaacagcguggccuacuccaacaacucuaucgcuauccccaccaacuucaccaucagcgugaccaccgagauccugccuguguccaugaccaagaccagcguggacugcaccauguacaucugcggcgauuccaccgagugcuccaaccugcugcugcaguacggcagcuucugcacccagcugaauagagcccugacagggaucgccguggaacaggacaagaacacccaagagguguucgcccaagugaagcaaaucuacaagaccccuccuaucaaggacuucggcggcuucaauuucagccagauucugcccgauccuagcaagcccagcaagcggagcuucaucgaggaccugcuguucaacaaagugacacuggccgacgccggcuucaucaagcaguauggcgauugucugggcgacauugccgccagggaucugauuugcgcccagaaguuuaacggacugacagugcugccuccucugcugaccgaugagaugaucgcccaguacacaucugcccugcuggccggcacaaucacaagcggcuggacauuuggagcuggcgccgcucugcagauccccuuugcuaugcagauggccuaccgguucaacggcaucggagugacccagaaugugcuguacgagaaccagaagcugaucgccaaccaguucaacagcgccaucggcaagauccaggacagccugagcagcacagcaagcgcccugggaaagcugcaggacguggucaaccagaaugcccaggcacugaacacccuggucaagcagcuguccuccaacuucggcgccaucagcucugugcugaacgauauccugagcagacuggacaaggucgaggccgaggugcagaucgacagacugaucacaggcagacugcagagccuccagacauacgugacccagcagcugaucagagccgccgagauuagagccucugccaaucuggccgccaccaagaugucugagugugugcugggccagagcaagagaguggacuuuugcggcaagggcuaccaccugaugagcuucccucagucugccccucacggcgugguguuucugcacgugacauaugugcccgcucaagagaagaauuucaccaccgcuccagccaucugccacgacggcaaagcccacuuuccuagagaaggcguguucguguccaacggcacccauugguucgugacacagcggaacuucuacgagccccagaucaucaccaccgacaacaccuucgugucuggcaacugcgacguugugaucggcauugugaacaauaccguguacgacccucugcagcccgagcuggacagcggcggaggaucuggcggaggacagaucuacgagggcaagcugacagccgagggccugagauuuggaaucguggccagccgguucaaucacgcccugguggauagacugguggaaggcgccaucgaugccauugucagacacggcggcagagaagaggacaucacccucguuagagugcccggcucuugggagauuccuguggcugcuggcgagcuggcccggaaagaagauaucgacgccguuaucgccaucggcgugcugaucagaggcgccacaccucacuucgacuauaucgccagcgagguguccaaaggccuggccgaucugagccuggaacugagaaagcccaucaccuucggcgugaucaccgcugacacacuggaacaggccauugagagagccggcaccaagcacggcaacaaaggaugggaagccgcucuguccgccaucgagauggccaaccuguucaagagccugcgguga

SEQ ID NO: 12145 - RNA, 3924 nt, Artificial Sequence
  SARS-CoV-2/Wuhan/WIV05/2019__EPI_ISL_402128 spike protein CDS gc mod (1-1147)(K986P_V987P) LumSynth construct
auguucguguuucuggugcugcugccccugguguccagccagugugugaaccugaccaccagaacacagcugccuccagccuacaccaacagcuucaccagaggcguguacuaccccgacaagguguucagauccagcgugcugcacucuacccaggaccuguuccugccuuucuucagcaacgugaccugguuccacgccauccacguguccggcaccaauggcaccaagagauucgacaaccccgugcugcccuucaacgacgggguguacuuugccagcaccgagaaguccaacaucaucagaggcuggaucuucggcaccacacuggacagcaagacccagagccugcugaucgugaacaacgccaccaacguggucaucaaagugugcgaguuccaguucugcaacgaccccuuccugggcgucuacuaccacaagaacaacaagagcuggauggaaagcgaguuccggguguacagcagcgccaacaacugcaccuucgaguacgugucccagccuuuccugauggaccuggaaggcaagcagggcaacuucaagaaccugcgcgaguucguguucaagaacaucgacggcuacuucaaaaucuacagcaagcacaccccuaucaaccucgugcgggaucugccucagggcuucucugcucuggaaccccugguggaucugcccaucggcaucaacaucacccgguuucagacacugcuggcccugcacagaagcuaccugacaccuggcgauagcagcagcggauggacagcuggugccgccgcuuacuaugugggcuaccugcagccuagaaccuuccugcugaaguacaacgagaacggcaccaucaccgacgccguggauugugcucuggauccucugagcgagacaaagugcacccugaaguccuucaccguggaaaagggcaucuaccagaccagcaacuuccgggugcagcccaccgaauccaucgugcgguuccccaauaucaccaaucugugccccuucggcgagguguucaaugccaccagauucgccucuguguacgccuggaaccggaagcggaucagcaauugcguggccgacuacuccgugcuguacaacuccgccagcuucagcaccuucaagugcuacggcguguccccuaccaagcugaacgaccugugcuucacaaacguguacgccgacagcuucgugauccggggagaugaagugcggcagauugccccuggacagacaggcaagaucgccgacuacaacuacaagcugcccgacgacuucaccggcugugugauugccuggaacagcaacaaccuggacuccaaagucggcggcaacuacaauuaccuguaccggcuguuccggaaguccaaucugaagcccuucgagcgggacaucagcaccgaaaucuaucaggccggcagcaccccuugcaacggcguggaaggcuucaacugcuacuucccacugcaguccuacggcuuucagcccacaaauggcgugggcuaucagcccuacagagugguggugcugagcuucgaacugcugcaugcuccugccacagugugcggcccuaagaaaagcaccaaucucgugaagaacaaaugcgugaacuucaacuucaacggccugaccggcaccggcgugcugacagagagcaacaagaaguuccugccauuccagcaguuuggccgggauaucgccgauaccacagacgccguuagagauccccagacacuggaaauccuggacaucaccccaugcagcuucggcggagugucugugaucaccccuggcaccaacaccagcaaucagguggcagugcuguaccaggacgugaacuguaccgaagugcccguggccauucacgccgaucagcugacaccuacauggcggguguacuccaccggcagcaauguguuucagaccagagccggcugucugaucggagccgagcacgugaacaauagcuacgagugcgacauccccaucggcgcuggcaucugugccagcuaccagacacagacaaacagccccagacgggcuagaagcguggccagccagagcaucauugccuacacaaugucucugggcgccgagaacagcguggccuacuccaacaacucuaucgcuauccccaccaacuucaccaucagcgugaccaccgagauccugccuguguccaugaccaagaccagcguggacugcaccauguacaucugcggcgauuccaccgagugcuccaaccugcugcugcaguacggcagcuucugcacccagcugaauagagcccugacagggaucgccguggaacaggacaagaacacccaagagguguucgcccaagugaagcaaaucuacaagaccccuccuaucaaggacuucggcggcuucaauuucagccagauucugcccgauccuagcaagcccagcaagcggagcuucaucgaggaccugcuguucaacaaagugacacuggccgacgccggcuucaucaagcaguauggcgauugucugggcgacauugccgccagggaucugauuugcgcccagaaguuuaacggacugacagugcugccuccucugcugaccgaugagaugaucgcccaguacacaucugcccugcuggccggcacaaucacaagcggcuggacauuuggagcuggcgccgcucugcagauccccuuugcuaugcagauggccuaccgguucaacggcaucggagugacccagaaugugcuguacgagaaccagaagcugaucgccaaccaguucaacagcgccaucggcaagauccaggacagccugagcagcacagcaagcgcccugggaaagcugcaggacguggucaaccagaaugcccaggcacugaacacccuggucaagcagcuguccuccaacuucggcgccaucagcucugugcugaacgauauccugagcagacuggacccuccugaggccgaggugcagaucgacagacugaucacaggcagacugcagagccuccagacauacgugacccagcagcugaucagagccgccgagauuagagccucugccaaucuggccgccaccaagaugucugagugugugcugggccagagcaagagaguggacuuuugcggcaagggcuaccaccugaugagcuucccucagucugccccucacggcgugguguuucugcacgugacauaugugcccgcucaagagaagaauuucaccaccgcuccagccaucugccacgacggcaaagcccacuuuccuagagaaggcguguucguguccaacggcacccauugguucgugacacagcggaacuucuacgagccccagaucaucaccaccgacaacaccuucgugucuggcaacugcgacguugugaucggcauugugaacaauaccguguacgacccucugcagcccgagcuggacagcggcggaggaucuggcggaggacagaucuacgagggcaagcugacagccgagggccugagauuuggaaucguggccagccgguucaaucacgcccugguggauagacugguggaaggcgccaucgaugccauugucagacacggcggcagagaagaggacaucacccucguuagagugcccggcucuugggagauuccuguggcugcuggcgagcuggcccggaaagaagauaucgacgccguuaucgccaucggcgugcugaucagaggcgccacaccucacuucgacuauaucgccagcgagguguccaaaggccuggccgaucugagccuggaacugagaaagcccaucaccuucggcgugaucaccgcugacacacuggaacaggccauugagagagccggcaccaagcacggcaacaaaggaugggaagccgcucuguccgccaucgagauggccaaccuguucaagagccugcgguga

SEQ ID NO: 12146 - RNA, 3924 nt, Artificial Sequence
  SARS-CoV-2/Wuhan/WIV05/2019__EPI_ISL_402128 spike protein CDS gc mod (1-1147)(K986P_V987P_T887WN_A1020W) LumSynth construct
auguucguguuucuggugcugcugccccugguguccagccagugugugaaccugaccaccagaacacagcugccuccagccuacaccaacagcuucaccagaggcguguacuaccccgacaagguguucagauccagcgugcugcacucuacccaggaccuguuccugccuuucuucagcaacgugaccugguuccacgccauccacguguccggcaccaauggcaccaagagauucgacaaccccgugcugcccuucaacgacgggguguacuuugccagcaccgagaaguccaacaucaucagaggcuggaucuucggcaccacacuggacagcaagacccagagccugcugaucgugaacaacgccaccaacguggucaucaaagugugcgaguuccaguucugcaacgaccccuuccugggcgucuacuaccacaagaacaacaagagcuggauggaaagcgaguuccggguguacagcagcgccaacaacugcaccuucgaguacgugucccagccuuuccugauggaccuggaaggcaagcagggcaacuucaagaaccugcgcgaguucguguucaagaacaucgacggcuacuucaaaaucuacagcaagcacaccccuaucaaccucgugcgggaucugccucagggcuucucugcucuggaaccccugguggaucugcccaucggcaucaacaucacccgguuucagacacugcuggcccugcacagaagcuaccugacaccuggcgauagcagcagcggauggacagcuggugccgccgcuuacuaugugggcuaccugcagccuagaaccuuccugcugaaguacaacgagaacggcaccaucaccgacgccguggauugugcucuggauccucugagcgagacaaagugcacccugaaguccuucaccguggaaaagggcaucuaccagaccagcaacuuccgggugcagcccaccgaauccaucgugcgguuccccaauaucaccaaucugugccccuucggcgagguguucaaugccaccagauucgccucuguguacgccuggaaccggaagcggaucagcaauugcguggccgacuacuccgugcuguacaacuccgccagcuucagcaccuucaagugcuacggcguguccccuaccaagcugaacgaccugugcuucacaaacguguacgccgacagcuucgugauccggggagaugaagugcggcagauugccccuggacagacaggcaagaucgccgacuacaacuacaagcugcccgacgacuucaccggcugugugauugccuggaacagcaacaaccuggacuccaaagucggcggcaacuacaauuaccuguaccggcuguuccggaaguccaaucugaagcccuucgagcgggacaucagcaccgaaaucuaucaggccggcagcaccccuugcaacggcguggaaggcuucaacugcuacuucccacugcaguccuacggcuuucagcccacaaauggcgugggcuaucagcccuacagagugguggugcugagcuucgaacugcugcaugcuccugccacagugugcggcccuaagaaaagcaccaaucucgugaagaacaaaugcgugaacuucaacuucaacggccugaccggcaccggcgugcugacagagagcaacaagaaguuccugccauuccagcaguuuggccgggauaucgccgauaccacagacgccguuagagauccccagacacuggaaauccuggacaucaccccaugcagcuucggcggagugucugugaucaccccuggcaccaacaccagcaaucagguggcagugcuguaccaggacgugaacuguaccgaagugcccguggccauucacgccgaucagcugacaccuacauggcggguguacuccaccggcagcaauguguuucagaccagagccggcugucugaucggagccgagcacgugaacaauagcuacgagugcgacauccccaucggcgcuggcaucugugccagcuaccagacacagacaaacagccccagacgggcuagaagcguggccagccagagcaucauugccuacacaaugucucugggcgccgagaacagcguggccuacuccaacaacucuaucgcuauccccaccaacuucaccaucagcgugaccaccgagauccugccuguguccaugaccaagaccagcguggacugcaccauguacaucugcggcgauuccaccgagugcuccaaccugcugcugcaguacggcagcuucugcacccagcugaauagagcccugacagggaucgccguggaacaggacaagaacacccaagagguguucgcccaagugaagcaaaucuacaagaccccuccuaucaaggacuucggcggcuucaauuucagccagauucugcccgauccuagcaagcccagcaagcggagcuucaucgaggaccugcuguucaacaaagugacacuggccgacgccggcuucaucaagcaguauggcgauugucugggcgacauugccgccagggaucugauuugcgcccagaaguuuaacggacugacagugcugccuccucugcugaccgaugagaugaucgcccaguacacaucugcccugcuggccggcacaaucacaagcggcuggugguuuggagcuggcgccgcucugcagauccccuuugcuaugcagauggccuaccgguucaacggcaucggagugacccagaaugugcuguacgagaaccagaagcugaucgccaaccaguucaacagcgccaucggcaagauccaggacagccugagcagcacagcaagcgcccugggaaagcugcaggacguggucaaccagaaugcccaggcacugaacacccuggucaagcagcuguccuccaacuucggcgccaucagcucugugcugaacgauauccugagcagacuggacccuccugaggccgaggugcagaucgacagacugaucacaggcagacugcagagccuccagacauacgugacccagcagcugaucagagccgccgagauuagauggucugccaaucuggccgccaccaagaugucugagugugugcugggccagagcaagagaguggacuuuugcggcaagggcuaccaccugaugagcuucccucagucugccccucacggcgugguguuucugcacgugacauaugugcccgcucaagagaagaauuucaccaccgcuccagccaucugccacgacggcaaagcccacuuuccuagagaaggcguguucguguccaacggcacccauugguucgugacacagcggaacuucuacgagccccagaucaucaccaccgacaacaccuucgugucuggcaacugcgacguugugaucggcauugugaacaauaccguguacgacccucugcagcccgagcuggacagcggcggaggaucuggcggaggacagaucuacgagggcaagcugacagccgagggccugagauuuggaaucguggccagccgguucaaucacgcccugguggauagacugguggaaggcgccaucgaugccauugucagacacggcggcagagaagaggacaucacccucguuagagugcccggcucuugggagauuccuguggcugcuggcgagcuggcccggaaagaagauaucgacgccguuaucgccaucggcgugcugaucagaggcgccacaccucacuucgacuauaucgccagcgagguguccaaaggccuggccgaucugagccuggaacugagaaagcccaucaccuucggcgugaucaccgcugacacacuggaacaggccauugagagagccggcaccaagcacggcaacaaaggaugggaagccgcucuguccgccaucgagauggccaaccuguucaagagccugcgguga

SEQ ID NO: 12147 - RNA, 3924 nt, Artificial Sequence
  SARS-CoV-2/Wuhan/WIV05/2019__EPI_ISL_402128 spike protein CDS gc mod (1-1147)(K986P_V987P_P1069F) LumSynth construct
auguucguguuucuggugcugcugccccugguguccagccagugugugaaccugaccaccagaacacagcugccuccagccuacaccaacagcuucaccagaggcguguacuaccccgacaagguguucagauccagcgugcugcacucuacccaggaccuguuccugccuuucuucagcaacgugaccugguuccacgccauccacguguccggcaccaauggcaccaagagauucgacaaccccgugcugcccuucaacgacgggguguacuuugccagcaccgagaaguccaacaucaucagaggcuggaucuucggcaccacacuggacagcaagacccagagccugcugaucgugaacaacgccaccaacguggucaucaaagugugcgaguuccaguucugcaacgaccccuuccugggcgucuacuaccacaagaacaacaagagcuggauggaaagcgaguuccggguguacagcagcgccaacaacugcaccuucgaguacgugucccagccuuuccugauggaccuggaaggcaagcagggcaacuucaagaaccugcgcgaguucguguucaagaacaucgacggcuacuucaaaaucuacagcaagcacaccccuaucaaccucgugcgggaucugccucagggcuucucugcucuggaaccccugguggaucugcccaucggcaucaacaucacccgguuucagacacugcuggcccugcacagaagcuaccugacaccuggcgauagcagcagcggauggacagcuggugccgccgcuuacuaugugggcuaccugcagccuagaaccuuccugcugaaguacaacgagaacggcaccaucaccgacgccguggauugugcucuggauccucugagcgagacaaagugcacccugaaguccuucaccguggaaaagggcaucuaccagaccagcaacuuccgggugcagcccaccgaauccaucgugcgguuccccaauaucaccaaucugugccccuucggcgagguguucaaugccaccagauucgccucuguguacgccuggaaccggaagcggaucagcaauugcguggccgacuacuccgugcuguacaacuccgccagcuucagcaccuucaagugcuacggcguguccccuaccaagcugaacgaccugugcuucacaaacguguacgccgacagcuucgugauccggggagaugaagugcggcagauugccccuggacagacaggcaagaucgccgacuacaacuacaagcugcccgacgacuucaccggcugugugauugccuggaacagcaacaaccuggacuccaaagucggcggcaacuacaauuaccuguaccggcuguuccggaaguccaaucugaagcccuucgagcgggacaucagcaccgaaaucuaucaggccggcagcaccccuugcaacggcguggaaggcuucaacugcuacuucccacugcaguccuacggcuuucagcccacaaauggcgugggcuaucagcccuacagagugguggugcugagcuucgaacugcugcaugcuccugccacagugugcggcccuaagaaaagcaccaaucucgugaagaacaaaugcgugaacuucaacuucaacggccugaccggcaccggcgugcugacagagagcaacaagaaguuccugccauuccagcaguuuggccgggauaucgccgauaccacagacgccguuagagauccccagacacuggaaauccuggacaucaccccaugcagcuucggcggagugucugugaucaccccuggcaccaacaccagcaaucagguggcagugcuguaccaggacgugaacuguaccgaagugcccguggccauucacgccgaucagcugacaccuacauggcggguguacuccaccggcagcaauguguuucagaccagagccggcugucugaucggagccgagcacgugaacaauagcuacgagugcgacauccccaucggcgcuggcaucugugccagcuaccagacacagacaaacagccccagacgggcuagaagcguggccagccagagcaucauugccuacacaaugucucugggcgccgagaacagcguggccuacuccaacaacucuaucgcuauccccaccaacuucaccaucagcgugaccaccgagauccugccuguguccaugaccaagaccagcguggacugcaccauguacaucugcggcgauuccaccgagugcuccaaccugcugcugcaguacggcagcuucugcacccagcugaauagagcccugacagggaucgccguggaacaggacaagaacacccaagagguguucgcccaagugaagcaaaucuacaagaccccuccuaucaaggacuucggcggcuucaauuucagccagauucugcccgauccuagcaagcccagcaagcggagcuucaucgaggaccugcuguucaacaaagugacacuggccgacgccggcuucaucaagcaguauggcgauugucugggcgacauugccgccagggaucugauuugcgcccagaaguuuaacggacugacagugcugccuccucugcugaccgaugagaugaucgcccaguacacaucugcccugcuggccggcacaaucacaagcggcuggacauuuggagcuggcgccgcucugcagauccccuuugcuaugcagauggccuaccgguucaacggcaucggagugacccagaaugugcuguacgagaaccagaagcugaucgccaaccaguucaacagcgccaucggcaagauccaggacagccugagcagcacagcaagcgcccugggaaagcugcaggacguggucaaccagaaugcccaggcacugaacacccuggucaagcagcuguccuccaacuucggcgccaucagcucugugcugaacgauauccugagcagacuggacccuccugaggccgaggugcagaucgacagacugaucacaggcagacugcagagccuccagacauacgugacccagcagcugaucagagccgccgagauuagagccucugccaaucuggccgccaccaagaugucugagugugugcugggccagagcaagagaguggacuuuugcggcaagggcuaccaccugaugagcuucccucagucugccccucacggcgugguguuucugcacgugacauauguguucgcucaagagaagaauuucaccaccgcuccagccaucugccacgacggcaaagcccacuuuccuagagaaggcguguucguguccaacggcacccauugguucgugacacagcggaacuucuacgagccccagaucaucaccaccgacaacaccuucgugucuggcaacugcgacguugugaucggcauugugaacaauaccguguacgacccucugcagcccgagcuggacagcggcggaggaucuggcggaggacagaucuacgagggcaagcugacagccgagggccugagauuuggaaucguggccagccgguucaaucacgcccugguggauagacugguggaaggcgccaucgaugccauugucagacacggcggcagagaagaggacaucacccucguuagagugcccggcucuugggagauuccuguggcugcuggcgagcuggcccggaaagaagauaucgacgccguuaucgccaucggcgugcugaucagaggcgccacaccucacuucgacuauaucgccagcgagguguccaaaggccuggccgaucugagccuggaacugagaaagcccaucaccuucggcgugaucaccgcugacacacuggaacaggccauugagagagccggcaccaagcacggcaacaaaggaugggaagccgcucuguccgccaucgagauggccaaccuguucaagagccugcgguga

SEQ ID NO: 12148 - RNA, 3924 nt, Artificial Sequence
  SARS-CoV-2/Wuhan/WIV05/2019__EPI_ISL_402128 spike protein CDS gc mod (1-1147)(K986P_V987P_ H1048Q_H1064N_ H1083N_H1101N) LumSynth construct
auguucguguuucuggugcugcugccccugguguccagccagugugugaaccugaccaccagaacacagcugccuccagccuacaccaacagcuucaccagaggcguguacuaccccgacaagguguucagauccagcgugcugcacucuacccaggaccuguuccugccuuucuucagcaacgugaccugguuccacgccauccacguguccggcaccaauggcaccaagagauucgacaaccccgugcugcccuucaacgacgggguguacuuugccagcaccgagaaguccaacaucaucagaggcuggaucuucggcaccacacuggacagcaagacccagagccugcugaucgugaacaacgccaccaacguggucaucaaagugugcgaguuccaguucugcaacgaccccuuccugggcgucuacuaccacaagaacaacaagagcuggauggaaagcgaguuccggguguacagcagcgccaacaacugcaccuucgaguacgugucccagccuuuccugauggaccuggaaggcaagcagggcaacuucaagaaccugcgcgaguucguguucaagaacaucgacggcuacuucaaaaucuacagcaagcacaccccuaucaaccucgugcgggaucugccucagggcuucucugcucuggaaccccugguggaucugcccaucggcaucaacaucacccgguuucagacacugcuggcccugcacagaagcuaccugacaccuggcgauagcagcagcggauggacagcuggugccgccgcuuacuaugugggcuaccugcagccuagaaccuuccugcugaaguacaacgagaacggcaccaucaccgacgccguggauugugcucuggauccucugagcgagacaaagugcacccugaaguccuucaccguggaaaagggcaucuaccagaccagcaacuuccgggugcagcccaccgaauccaucgugcgguuccccaauaucaccaaucugugccccuucggcgagguguucaaugccaccagauucgccucuguguacgccuggaaccggaagcggaucagcaauugcguggccgacuacuccgugcuguacaacuccgccagcuucagcaccuucaagugcuacggcguguccccuaccaagcugaacgaccugugcuucacaaacguguacgccgacagcuucgugauccggggagaugaagugcggcagauugccccuggacagacaggcaagaucgccgacuacaacuacaagcugcccgacgacuucaccggcugugugauugccuggaacagcaacaaccuggacuccaaagucggcggcaacuacaauuaccuguaccggcuguuccggaaguccaaucugaagcccuucgagcgggacaucagcaccgaaaucuaucaggccggcagcaccccuugcaacggcguggaaggcuucaacugcuacuucccacugcaguccuacggcuuucagcccacaaauggcgugggcuaucagcccuacagagugguggugcugagcuucgaacugcugcaugcuccugccacagugugcggcccuaagaaaagcaccaaucucgugaagaacaaaugcgugaacuucaacuucaacggccugaccggcaccggcgugcugacagagagcaacaagaaguuccugccauuccagcaguuuggccgggauaucgccgauaccacagacgccguuagagauccccagacacuggaaauccuggacaucaccccaugcagcuucggcggagugucugugaucaccccuggcaccaacaccagcaaucagguggcagugcuguaccaggacgugaacuguaccgaagugcccguggccauucacgccgaucagcugacaccuacauggcggguguacuccaccggcagcaauguguuucagaccagagccggcugucugaucggagccgagcacgugaacaauagcuacgagugcgacauccccaucggcgcuggcaucugugccagcuaccagacacagacaaacagccccagacgggcuagaagcguggccagccagagcaucauugccuacacaaugucucugggcgccgagaacagcguggccuacuccaacaacucuaucgcuauccccaccaacuucaccaucagcgugaccaccgagauccugccuguguccaugaccaagaccagcguggacugcaccauguacaucugcggcgauuccaccgagugcuccaaccugcugcugcaguacggcagcuucugcacccagcugaauagagcccugacagggaucgccguggaacaggacaagaacacccaagagguguucgcccaagugaagcaaaucuacaagaccccuccuaucaaggacuucggcggcuucaauuucagccagauucugcccgauccuagcaagcccagcaagcggagcuucaucgaggaccugcuguucaacaaagugacacuggccgacgccggcuucaucaagcaguauggcgauugucugggcgacauugccgccagggaucugauuugcgcccagaaguuuaacggacugacagugcugccuccucugcugaccgaugagaugaucgcccaguacacaucugcccugcuggccggcacaaucacaagcggcuggacauuuggagcuggcgccgcucugcagauccccuuugcuaugcagauggccuaccgguucaacggcaucggagugacccagaaugugcuguacgagaaccagaagcugaucgccaaccaguucaacagcgccaucggcaagauccaggacagccugagcagcacagcaagcgcccugggaaagcugcaggacguggucaaccagaaugcccaggcacugaacacccuggucaagcagcuguccuccaacuucggcgccaucagcucugugcugaacgauauccugagcagacuggacccuccugaggccgaggugcagaucgacagacugaucacaggcagacugcagagccuccagacauacgugacccagcagcugaucagagccgccgagauuagagccucugccaaucuggccgccaccaagaugucugagugugugcugggccagagcaagagaguggacuuuugcggcaagggcuaccagcugaugagcuucccucagucugccccucacggcgugguguuucugaacgugacauaugugcccgcucaagagaagaauuucaccaccgcuccagccaucugcaacgacggcaaagcccacuuuccuagagaaggcguguucguguccaacggcaccaacugguucgugacacagcggaacuucuacgagccccagaucaucaccaccgacaacaccuucgugucuggcaacugcgacguugugaucggcauugugaacaauaccguguacgacccucugcagcccgagcuggacagcggcggaggaucuggcggaggacagaucuacgagggcaagcugacagccgagggccugagauuuggaaucguggccagccgguucaaucacgcccugguggauagacugguggaaggcgccaucgaugccauugucagacacggcggcagagaagaggacaucacccucguuagagugcccggcucuugggagauuccuguggcugcuggcgagcuggcccggaaagaagauaucgacgccguuaucgccaucggcgugcugaucagaggcgccacaccucacuucgacuauaucgccagcgagguguccaaaggccuggccgaucugagccuggaacugagaaagcccaucaccuucggcgugaucaccgcugacacacuggaacaggccauugagagagccggcaccaagcacggcaacaaaggaugggaagccgcucuguccgccaucgagauggccaaccuguucaagagccugcgguga

SEQ ID NO: 12149 - RNA, 3924 nt, Artificial Sequence
  SARS-CoV-2/Wuhan/WIV05/2019__EPI_ISL_402128 spike protein CDS gc mod (1-1147)(I712C_T1077C) LumSynth construct
auguucguguuucuggugcugcugccccugguguccagccagugugugaaccugaccaccagaacacagcugccuccagccuacaccaacagcuucaccagaggcguguacuaccccgacaagguguucagauccagcgugcugcacucuacccaggaccuguuccugccuuucuucagcaacgugaccugguuccacgccauccacguguccggcaccaauggcaccaagagauucgacaaccccgugcugcccuucaacgacgggguguacuuugccagcaccgagaaguccaacaucaucagaggcuggaucuucggcaccacacuggacagcaagacccagagccugcugaucgugaacaacgccaccaacguggucaucaaagugugcgaguuccaguucugcaacgaccccuuccugggcgucuacuaccacaagaacaacaagagcuggauggaaagcgaguuccggguguacagcagcgccaacaacugcaccuucgaguacgugucccagccuuuccugauggaccuggaaggcaagcagggcaacuucaagaaccugcgcgaguucguguucaagaacaucgacggcuacuucaaaaucuacagcaagcacaccccuaucaaccucgugcgggaucugccucagggcuucucugcucuggaaccccugguggaucugcccaucggcaucaacaucacccgguuucagacacugcuggcccugcacagaagcuaccugacaccuggcgauagcagcagcggauggacagcuggugccgccgcuuacuaugugggcuaccugcagccuagaaccuuccugcugaaguacaacgagaacggcaccaucaccgacgccguggauugugcucuggauccucugagcgagacaaagugcacccugaaguccuucaccguggaaaagggcaucuaccagaccagcaacuuccgggugcagcccaccgaauccaucgugcgguuccccaauaucaccaaucugugccccuucggcgagguguucaaugccaccagauucgccucuguguacgccuggaaccggaagcggaucagcaauugcguggccgacuacuccgugcuguacaacuccgccagcuucagcaccuucaagugcuacggcguguccccuaccaagcugaacgaccugugcuucacaaacguguacgccgacagcuucgugauccggggagaugaagugcggcagauugccccuggacagacaggcaagaucgccgacuacaacuacaagcugcccgacgacuucaccggcugugugauugccuggaacagcaacaaccuggacuccaaagucggcggcaacuacaauuaccuguaccggcuguuccggaaguccaaucugaagcccuucgagcgggacaucagcaccgaaaucuaucaggccggcagcaccccuugcaacggcguggaaggcuucaacugcuacuucccacugcaguccuacggcuuucagcccacaaauggcgugggcuaucagcccuacagagugguggugcugagcuucgaacugcugcaugcuccugccacagugugcggcccuaagaaaagcaccaaucucgugaagaacaaaugcgugaacuucaacuucaacggccugaccggcaccggcgugcugacagagagcaacaagaaguuccugccauuccagcaguuuggccgggauaucgccgauaccacagacgccguuagagauccccagacacuggaaauccuggacaucaccccaugcagcuucggcggagugucugugaucaccccuggcaccaacaccagcaaucagguggcagugcuguaccaggacgugaacuguaccgaagugcccguggccauucacgccgaucagcugacaccuacauggcggguguacuccaccggcagcaauguguuucagaccagagccggcugucugaucggagccgagcacgugaacaauagcuacgagugcgacauccccaucggcgcuggcaucugugccagcuaccagacacagacaaacagccccagacgggcuagaagcguggccagccagagcaucauugccuacacaaugucucugggcgccgagaacagcguggccuacuccaacaacucuugcgcuauccccaccaacuucaccaucagcgugaccaccgagauccugccuguguccaugaccaagaccagcguggacugcaccauguacaucugcggcgauuccaccgagugcuccaaccugcugcugcaguacggcagcuucugcacccagcugaauagagcccugacagggaucgccguggaacaggacaagaacacccaagagguguucgcccaagugaagcaaaucuacaagaccccuccuaucaaggacuucggcggcuucaauuucagccagauucugcccgauccuagcaagcccagcaagcggagcuucaucgaggaccugcuguucaacaaagugacacuggccgacgccggcuucaucaagcaguauggcgauugucugggcgacauugccgccagggaucugauuugcgcccagaaguuuaacggacugacagugcugccuccucugcugaccgaugagaugaucgcccaguacacaucugcccugcuggccggcacaaucacaagcggcuggacauuuggagcuggcgccgcucugcagauccccuuugcuaugcagauggccuaccgguucaacggcaucggagugacccagaaugugcuguacgagaaccagaagcugaucgccaaccaguucaacagcgccaucggcaagauccaggacagccugagcagcacagcaagcgcccugggaaagcugcaggacguggucaaccagaaugcccaggcacugaacacccuggucaagcagcuguccuccaacuucggcgccaucagcucugugcugaacgauauccugagcagacuggacaaggucgaggccgaggugcagaucgacagacugaucacaggcagacugcagagccuccagacauacgugacccagcagcugaucagagccgccgagauuagagccucugccaaucuggccgccaccaagaugucugagugugugcugggccagagcaagagaguggacuuuugcggcaagggcuaccaccugaugagcuucccucagucugccccucacggcgugguguuucugcacgugacauaugugcccgcucaagagaagaauuucaccugugcuccagccaucugccacgacggcaaagcccacuuuccuagagaaggcguguucguguccaacggcacccauugguucgugacacagcggaacuucuacgagccccagaucaucaccaccgacaacaccuucgugucuggcaacugcgacguugugaucggcauugugaacaauaccguguacgacccucugcagcccgagcuggacagcggcggaggaucuggcggaggacagaucuacgagggcaagcugacagccgagggccugagauuuggaaucguggccagccgguucaaucacgcccugguggauagacugguggaaggcgccaucgaugccauugucagacacggcggcagagaagaggacaucacccucguuagagugcccggcucuugggagauuccuguggcugcuggcgagcuggcccggaaagaagauaucgacgccguuaucgccaucggcgugcugaucagaggcgccacaccucacuucgacuauaucgccagcgagguguccaaaggccuggccgaucugagccuggaacugagaaagcccaucaccuucggcgugaucaccgcugacacacuggaacaggccauugagagagccggcaccaagcacggcaacaaaggaugggaagccgcucuguccgccaucgagauggccaaccuguucaagagccugcgguga

SEQ ID NO: 12150 - RNA, 3924 nt, Artificial Sequence
  SARS-CoV-2/Wuhan/WIV05/2019__EPI_ISL_402128 spike protein CDS gc mod (1-1147)(I714C_Y1110C) LumSynth construct
auguucguguuucuggugcugcugccccugguguccagccagugugugaaccugaccaccagaacacagcugccuccagccuacaccaacagcuucaccagaggcguguacuaccccgacaagguguucagauccagcgugcugcacucuacccaggaccuguuccugccuuucuucagcaacgugaccugguuccacgccauccacguguccggcaccaauggcaccaagagauucgacaaccccgugcugcccuucaacgacgggguguacuuugccagcaccgagaaguccaacaucaucagaggcuggaucuucggcaccacacuggacagcaagacccagagccugcugaucgugaacaacgccaccaacguggucaucaaagugugcgaguuccaguucugcaacgaccccuuccugggcgucuacuaccacaagaacaacaagagcuggauggaaagcgaguuccggguguacagcagcgccaacaacugcaccuucgaguacgugucccagccuuuccugauggaccuggaaggcaagcagggcaacuucaagaaccugcgcgaguucguguucaagaacaucgacggcuacuucaaaaucuacagcaagcacaccccuaucaaccucgugcgggaucugccucagggcuucucugcucuggaaccccugguggaucugcccaucggcaucaacaucacccgguuucagacacugcuggcccugcacagaagcuaccugacaccuggcgauagcagcagcggauggacagcuggugccgccgcuuacuaugugggcuaccugcagccuagaaccuuccugcugaaguacaacgagaacggcaccaucaccgacgccguggauugugcucuggauccucugagcgagacaaagugcacccugaaguccuucaccguggaaaagggcaucuaccagaccagcaacuuccgggugcagcccaccgaauccaucgugcgguuccccaauaucaccaaucugugccccuucggcgagguguucaaugccaccagauucgccucuguguacgccuggaaccggaagcggaucagcaauugcguggccgacuacuccgugcuguacaacuccgccagcuucagcaccuucaagugcuacggcguguccccuaccaagcugaacgaccugugcuucacaaacguguacgccgacagcuucgugauccggggagaugaagugcggcagauugccccuggacagacaggcaagaucgccgacuacaacuacaagcugcccgacgacuucaccggcugugugauugccuggaacagcaacaaccuggacuccaaagucggcggcaacuacaauuaccuguaccggcuguuccggaaguccaaucugaagcccuucgagcgggacaucagcaccgaaaucuaucaggccggcagcaccccuugcaacggcguggaaggcuucaacugcuacuucccacugcaguccuacggcuuucagcccacaaauggcgugggcuaucagcccuacagagugguggugcugagcuucgaacugcugcaugcuccugccacagugugcggcccuaagaaaagcaccaaucucgugaagaacaaaugcgugaacuucaacuucaacggccugaccggcaccggcgugcugacagagagcaacaagaaguuccugccauuccagcaguuuggccgggauaucgccgauaccacagacgccguuagagauccccagacacuggaaauccuggacaucaccccaugcagcuucggcggagugucugugaucaccccuggcaccaacaccagcaaucagguggcagugcuguaccaggacgugaacuguaccgaagugcccguggccauucacgccgaucagcugacaccuacauggcggguguacuccaccggcagcaauguguuucagaccagagccggcugucugaucggagccgagcacgugaacaauagcuacgagugcgacauccccaucggcgcuggcaucugugccagcuaccagacacagacaaacagccccagacgggcuagaagcguggccagccagagcaucauugccuacacaaugucucugggcgccgagaacagcguggccuacuccaacaacucuaucgcuugccccaccaacuucaccaucagcgugaccaccgagauccugccuguguccaugaccaagaccagcguggacugcaccauguacaucugcggcgauuccaccgagugcuccaaccugcugcugcaguacggcagcuucugcacccagcugaauagagcccugacagggaucgccguggaacaggacaagaacacccaagagguguucgcccaagugaagcaaaucuacaagaccccuccuaucaaggacuucggcggcuucaauuucagccagauucugcccgauccuagcaagcccagcaagcggagcuucaucgaggaccugcuguucaacaaagugacacuggccgacgccggcuucaucaagcaguauggcgauugucugggcgacauugccgccagggaucugauuugcgcccagaaguuuaacggacugacagugcugccuccucugcugaccgaugagaugaucgcccaguacacaucugcccugcuggccggcacaaucacaagcggcuggacauuuggagcuggcgccgcucugcagauccccuuugcuaugcagauggccuaccgguucaacggcaucggagugacccagaaugugcuguacgagaaccagaagcugaucgccaaccaguucaacagcgccaucggcaagauccaggacagccugagcagcacagcaagcgcccugggaaagcugcaggacguggucaaccagaaugcccaggcacugaacacccuggucaagcagcuguccuccaacuucggcgccaucagcucugugcugaacgauauccugagcagacuggacaaggucgaggccgaggugcagaucgacagacugaucacaggcagacugcagagccuccagacauacgugacccagcagcugaucagagccgccgagauuagagccucugccaaucuggccgccaccaagaugucugagugugugcugggccagagcaagagaguggacuuuugcggcaagggcuaccaccugaugagcuucccucagucugccccucacggcgugguguuucugcacgugacauaugugcccgcucaagagaagaauuucaccaccgcuccagccaucugccacgacggcaaagcccacuuuccuagagaaggcguguucguguccaacggcacccauugguucgugacacagcggaacuucugugagccccagaucaucaccaccgacaacaccuucgugucuggcaacugcgacguugugaucggcauugugaacaauaccguguacgacccucugcagcccgagcuggacagcggcggaggaucuggcggaggacagaucuacgagggcaagcugacagccgagggccugagauuuggaaucguggccagccgguucaaucacgcccugguggauagacugguggaaggcgccaucgaugccauugucagacacggcggcagagaagaggacaucacccucguuagagugcccggcucuugggagauuccuguggcugcuggcgagcuggcccggaaagaagauaucgacgccguuaucgccaucggcgugcugaucagaggcgccacaccucacuucgacuauaucgccagcgagguguccaaaggccuggccgaucugagccuggaacugagaaagcccaucaccuucggcgugaucaccgcugacacacuggaacaggccauugagagagccggcaccaagcacggcaacaaaggaugggaagccgcucuguccgccaucgagauggccaaccuguucaagagccugcgguga

SEQ ID NO: 12151 - RNA, 3924 nt, Artificial Sequence
  SARS-CoV-2/Wuhan/WIV05/2019__EPI_ISL_402128 spike protein CDS gc mod (1-1147)(P715C_P1069C) LumSynth construct
auguucguguuucuggugcugcugccccugguguccagccagugugugaaccugaccaccagaacacagcugccuccagccuacaccaacagcuucaccagaggcguguacuaccccgacaagguguucagauccagcgugcugcacucuacccaggaccuguuccugccuuucuucagcaacgugaccugguuccacgccauccacguguccggcaccaauggcaccaagagauucgacaaccccgugcugcccuucaacgacgggguguacuuugccagcaccgagaaguccaacaucaucagaggcuggaucuucggcaccacacuggacagcaagacccagagccugcugaucgugaacaacgccaccaacguggucaucaaagugugcgaguuccaguucugcaacgaccccuuccugggcgucuacuaccacaagaacaacaagagcuggauggaaagcgaguuccggguguacagcagcgccaacaacugcaccuucgaguacgugucccagccuuuccugauggaccuggaaggcaagcagggcaacuucaagaaccugcgcgaguucguguucaagaacaucgacggcuacuucaaaaucuacagcaagcacaccccuaucaaccucgugcgggaucugccucagggcuucucugcucuggaaccccugguggaucugcccaucggcaucaacaucacccgguuucagacacugcuggcccugcacagaagcuaccugacaccuggcgauagcagcagcggauggacagcuggugccgccgcuuacuaugugggcuaccugcagccuagaaccuuccugcugaaguacaacgagaacggcaccaucaccgacgccguggauugugcucuggauccucugagcgagacaaagugcacccugaaguccuucaccguggaaaagggcaucuaccagaccagcaacuuccgggugcagcccaccgaauccaucgugcgguuccccaauaucaccaaucugugccccuucggcgagguguucaaugccaccagauucgccucuguguacgccuggaaccggaagcggaucagcaauugcguggccgacuacuccgugcuguacaacuccgccagcuucagcaccuucaagugcuacggcguguccccuaccaagcugaacgaccugugcuucacaaacguguacgccgacagcuucgugauccggggagaugaagugcggcagauugccccuggacagacaggcaagaucgccgacuacaacuacaagcugcccgacgacuucaccggcugugugauugccuggaacagcaacaaccuggacuccaaagucggcggcaacuacaauuaccuguaccggcuguuccggaaguccaaucugaagcccuucgagcgggacaucagcaccgaaaucuaucaggccggcagcaccccuugcaacggcguggaaggcuucaacugcuacuucccacugcaguccuacggcuuucagcccacaaauggcgugggcuaucagcccuacagagugguggugcugagcuucgaacugcugcaugcuccugccacagugugcggcccuaagaaaagcaccaaucucgugaagaacaaaugcgugaacuucaacuucaacggccugaccggcaccggcgugcugacagagagcaacaagaaguuccugccauuccagcaguuuggccgggauaucgccgauaccacagacgccguuagagauccccagacacuggaaauccuggacaucaccccaugcagcuucggcggagugucugugaucaccccuggcaccaacaccagcaaucagguggcagugcuguaccaggacgugaacuguaccgaagugcccguggccauucacgccgaucagcugacaccuacauggcggguguacuccaccggcagcaauguguuucagaccagagccggcugucugaucggagccgagcacgugaacaauagcuacgagugcgacauccccaucggcgcuggcaucugugccagcuaccagacacagacaaacagccccagacgggcuagaagcguggccagccagagcaucauugccuacacaaugucucugggcgccgagaacagcguggccuacuccaacaacucuaucgcuaucugcaccaacuucaccaucagcgugaccaccgagauccugccuguguccaugaccaagaccagcguggacugcaccauguacaucugcggcgauuccaccgagugcuccaaccugcugcugcaguacggcagcuucugcacccagcugaauagagcccugacagggaucgccguggaacaggacaagaacacccaagagguguucgcccaagugaagcaaaucuacaagaccccuccuaucaaggacuucggcggcuucaauuucagccagauucugcccgauccuagcaagcccagcaagcggagcuucaucgaggaccugcuguucaacaaagugacacuggccgacgccggcuucaucaagcaguauggcgauugucugggcgacauugccgccagggaucugauuugcgcccagaaguuuaacggacugacagugcugccuccucugcugaccgaugagaugaucgcccaguacacaucugcccugcuggccggcacaaucacaagcggcuggacauuuggagcuggcgccgcucugcagauccccuuugcuaugcagauggccuaccgguucaacggcaucggagugacccagaaugugcuguacgagaaccagaagcugaucgccaaccaguucaacagcgccaucggcaagauccaggacagccugagcagcacagcaagcgcccugggaaagcugcaggacguggucaaccagaaugcccaggcacugaacacccuggucaagcagcuguccuccaacuucggcgccaucagcucugugcugaacgauauccugagcagacuggacaaggucgaggccgaggugcagaucgacagacugaucacaggcagacugcagagccuccagacauacgugacccagcagcugaucagagccgccgagauuagagccucugccaaucuggccgccaccaagaugucugagugugugcugggccagagcaagagaguggacuuuugcggcaagggcuaccaccugaugagcuucccucagucugccccucacggcgugguguuucugcacgugacauaugugugugcucaagagaagaauuucaccaccgcuccagccaucugccacgacggcaaagcccacuuuccuagagaaggcguguucguguccaacggcacccauugguucgugacacagcggaacuucuacgagccccagaucaucaccaccgacaacaccuucgugucuggcaacugcgacguugugaucggcauugugaacaauaccguguacgacccucugcagcccgagcuggacagcggcggaggaucuggcggaggacagaucuacgagggcaagcugacagccgagggccugagauuuggaaucguggccagccgguucaaucacgcccugguggauagacugguggaaggcgccaucgaugccauugucagacacggcggcagagaagaggacaucacccucguuagagugcccggcucuugggagauuccuguggcugcuggcgagcuggcccggaaagaagauaucgacgccguuaucgccaucggcgugcugaucagaggcgccacaccucacuucgacuauaucgccagcgagguguccaaaggccuggccgaucugagccuggaacugagaaagcccaucaccuucggcgugaucaccgcugacacacuggaacaggccauugagagagccggcaccaagcacggcaacaaaggaugggaagccgcucuguccgccaucgagauggccaaccuguucaagagccugcgguga

SEQ ID NO: 12152 - RNA, 3924 nt, Artificial Sequence
  SARS-CoV-2/Wuhan/WIV05/2019__EPI_ISL_402128 spike protein CDS gc mod (1-1147)(G889C_L1034C) LumSynth construct
auguucguguuucuggugcugcugccccugguguccagccagugugugaaccugaccaccagaacacagcugccuccagccuacaccaacagcuucaccagaggcguguacuaccccgacaagguguucagauccagcgugcugcacucuacccaggaccuguuccugccuuucuucagcaacgugaccugguuccacgccauccacguguccggcaccaauggcaccaagagauucgacaaccccgugcugcccuucaacgacgggguguacuuugccagcaccgagaaguccaacaucaucagaggcuggaucuucggcaccacacuggacagcaagacccagagccugcugaucgugaacaacgccaccaacguggucaucaaagugugcgaguuccaguucugcaacgaccccuuccugggcgucuacuaccacaagaacaacaagagcuggauggaaagcgaguuccggguguacagcagcgccaacaacugcaccuucgaguacgugucccagccuuuccugauggaccuggaaggcaagcagggcaacuucaagaaccugcgcgaguucguguucaagaacaucgacggcuacuucaaaaucuacagcaagcacaccccuaucaaccucgugcgggaucugccucagggcuucucugcucuggaaccccugguggaucugcccaucggcaucaacaucacccgguuucagacacugcuggcccugcacagaagcuaccugacaccuggcgauagcagcagcggauggacagcuggugccgccgcuuacuaugugggcuaccugcagccuagaaccuuccugcugaaguacaacgagaacggcaccaucaccgacgccguggauugugcucuggauccucugagcgagacaaagugcacccugaaguccuucaccguggaaaagggcaucuaccagaccagcaacuuccgggugcagcccaccgaauccaucgugcgguuccccaauaucaccaaucugugccccuucggcgagguguucaaugccaccagauucgccucuguguacgccuggaaccggaagcggaucagcaauugcguggccgacuacuccgugcuguacaacuccgccagcuucagcaccuucaagugcuacggcguguccccuaccaagcugaacgaccugugcuucacaaacguguacgccgacagcuucgugauccggggagaugaagugcggcagauugccccuggacagacaggcaagaucgccgacuacaacuacaagcugcccgacgacuucaccggcugugugauugccuggaacagcaacaaccuggacuccaaagucggcggcaacuacaauuaccuguaccggcuguuccggaaguccaaucugaagcccuucgagcgggacaucagcaccgaaaucuaucaggccggcagcaccccuugcaacggcguggaaggcuucaacugcuacuucccacugcaguccuacggcuuucagcccacaaauggcgugggcuaucagcccuacagagugguggugcugagcuucgaacugcugcaugcuccugccacagugugcggcccuaagaaaagcaccaaucucgugaagaacaaaugcgugaacuucaacuucaacggccugaccggcaccggcgugcugacagagagcaacaagaaguuccugccauuccagcaguuuggccgggauaucgccgauaccacagacgccguuagagauccccagacacuggaaauccuggacaucaccccaugcagcuucggcggagugucugugaucaccccuggcaccaacaccagcaaucagguggcagugcuguaccaggacgugaacuguaccgaagugcccguggccauucacgccgaucagcugacaccuacauggcggguguacuccaccggcagcaauguguuucagaccagagccggcugucugaucggagccgagcacgugaacaauagcuacgagugcgacauccccaucggcgcuggcaucugugccagcuaccagacacagacaaacagccccagacgggcuagaagcguggccagccagagcaucauugccuacacaaugucucugggcgccgagaacagcguggccuacuccaacaacucuaucgcuauccccaccaacuucaccaucagcgugaccaccgagauccugccuguguccaugaccaagaccagcguggacugcaccauguacaucugcggcgauuccaccgagugcuccaaccugcugcugcaguacggcagcuucugcacccagcugaauagagcccugacagggaucgccguggaacaggacaagaacacccaagagguguucgcccaagugaagcaaaucuacaagaccccuccuaucaaggacuucggcggcuucaauuucagccagauucugcccgauccuagcaagcccagcaagcggagcuucaucgaggaccugcuguucaacaaagugacacuggccgacgccggcuucaucaagcaguauggcgauugucugggcgacauugccgccagggaucugauuugcgcccagaaguuuaacggacugacagugcugccuccucugcugaccgaugagaugaucgcccaguacacaucugcccugcuggccggcacaaucacaagcggcuggacauuuugcgcuggcgccgcucugcagauccccuuugcuaugcagauggccuaccgguucaacggcaucggagugacccagaaugugcuguacgagaaccagaagcugaucgccaaccaguucaacagcgccaucggcaagauccaggacagccugagcagcacagcaagcgcccugggaaagcugcaggacguggucaaccagaaugcccaggcacugaacacccuggucaagcagcuguccuccaacuucggcgccaucagcucugugcugaacgauauccugagcagacuggacaaggucgaggccgaggugcagaucgacagacugaucacaggcagacugcagagccuccagacauacgugacccagcagcugaucagagccgccgagauuagagccucugccaaucuggccgccaccaagaugucugaguguguguguggccagagcaagagaguggacuuuugcggcaagggcuaccaccugaugagcuucccucagucugccccucacggcgugguguuucugcacgugacauaugugcccgcucaagagaagaauuucaccaccgcuccagccaucugccacgacggcaaagcccacuuuccuagagaaggcguguucguguccaacggcacccauugguucgugacacagcggaacuucuacgagccccagaucaucaccaccgacaacaccuucgugucuggcaacugcgacguugugaucggcauugugaacaauaccguguacgacccucugcagcccgagcuggacagcggcggaggaucuggcggaggacagaucuacgagggcaagcugacagccgagggccugagauuuggaaucguggccagccgguucaaucacgcccugguggauagacugguggaaggcgccaucgaugccauugucagacacggcggcagagaagaggacaucacccucguuagagugcccggcucuugggagauuccuguggcugcuggcgagcuggcccggaaagaagauaucgacgccguuaucgccaucggcgugcugaucagaggcgccacaccucacuucgacuauaucgccagcgagguguccaaaggccuggccgaucugagccuggaacugagaaagcccaucaccuucggcgugaucaccgcugacacacuggaacaggccauugagagagccggcaccaagcacggcaacaaaggaugggaagccgcucuguccgccaucgagauggccaaccuguucaagagccugcgguga

SEQ ID NO: 12153 - RNA, 3924 nt, Artificial Sequence
  SARS-CoV-2/Wuhan/WIV05/2019__EPI_ISL_402128 spike protein CDS gc mod (1-1147)(I909C_Y1047C) LumSynth construct
auguucguguuucuggugcugcugccccugguguccagccagugugugaaccugaccaccagaacacagcugccuccagccuacaccaacagcuucaccagaggcguguacuaccccgacaagguguucagauccagcgugcugcacucuacccaggaccuguuccugccuuucuucagcaacgugaccugguuccacgccauccacguguccggcaccaauggcaccaagagauucgacaaccccgugcugcccuucaacgacgggguguacuuugccagcaccgagaaguccaacaucaucagaggcuggaucuucggcaccacacuggacagcaagacccagagccugcugaucgugaacaacgccaccaacguggucaucaaagugugcgaguuccaguucugcaacgaccccuuccugggcgucuacuaccacaagaacaacaagagcuggauggaaagcgaguuccggguguacagcagcgccaacaacugcaccuucgaguacgugucccagccuuuccugauggaccuggaaggcaagcagggcaacuucaagaaccugcgcgaguucguguucaagaacaucgacggcuacuucaaaaucuacagcaagcacaccccuaucaaccucgugcgggaucugccucagggcuucucugcucuggaaccccugguggaucugcccaucggcaucaacaucacccgguuucagacacugcuggcccugcacagaagcuaccugacaccuggcgauagcagcagcggauggacagcuggugccgccgcuuacuaugugggcuaccugcagccuagaaccuuccugcugaaguacaacgagaacggcaccaucaccgacgccguggauugugcucuggauccucugagcgagacaaagugcacccugaaguccuucaccguggaaaagggcaucuaccagaccagcaacuuccgggugcagcccaccgaauccaucgugcgguuccccaauaucaccaaucugugccccuucggcgagguguucaaugccaccagauucgccucuguguacgccuggaaccggaagcggaucagcaauugcguggccgacuacuccgugcuguacaacuccgccagcuucagcaccuucaagugcuacggcguguccccuaccaagcugaacgaccugugcuucacaaacguguacgccgacagcuucgugauccggggagaugaagugcggcagauugccccuggacagacaggcaagaucgccgacuacaacuacaagcugcccgacgacuucaccggcugugugauugccuggaacagcaacaaccuggacuccaaagucggcggcaacuacaauuaccuguaccggcuguuccggaaguccaaucugaagcccuucgagcgggacaucagcaccgaaaucuaucaggccggcagcaccccuugcaacggcguggaaggcuucaacugcuacuucccacugcaguccuacggcuuucagcccacaaauggcgugggcuaucagcccuacagagugguggugcugagcuucgaacugcugcaugcuccugccacagugugcggcccuaagaaaagcaccaaucucgugaagaacaaaugcgugaacuucaacuucaacggccugaccggcaccggcgugcugacagagagcaacaagaaguuccugccauuccagcaguuuggccgggauaucgccgauaccacagacgccguuagagauccccagacacuggaaauccuggacaucaccccaugcagcuucggcggagugucugugaucaccccuggcaccaacaccagcaaucagguggcagugcuguaccaggacgugaacuguaccgaagugcccguggccauucacgccgaucagcugacaccuacauggcggguguacuccaccggcagcaauguguuucagaccagagccggcugucugaucggagccgagcacgugaacaauagcuacgagugcgacauccccaucggcgcuggcaucugugccagcuaccagacacagacaaacagccccagacgggcuagaagcguggccagccagagcaucauugccuacacaaugucucugggcgccgagaacagcguggccuacuccaacaacucuaucgcuauccccaccaacuucaccaucagcgugaccaccgagauccugccuguguccaugaccaagaccagcguggacugcaccauguacaucugcggcgauuccaccgagugcuccaaccugcugcugcaguacggcagcuucugcacccagcugaauagagcccugacagggaucgccguggaacaggacaagaacacccaagagguguucgcccaagugaagcaaaucuacaagaccccuccuaucaaggacuucggcggcuucaauuucagccagauucugcccgauccuagcaagcccagcaagcggagcuucaucgaggaccugcuguucaacaaagugacacuggccgacgccggcuucaucaagcaguauggcgauugucugggcgacauugccgccagggaucugauuugcgcccagaaguuuaacggacugacagugcugccuccucugcugaccgaugagaugaucgcccaguacacaucugcccugcuggccggcacaaucacaagcggcuggacauuuggagcuggcgccgcucugcagauccccuuugcuaugcagauggccuaccgguucaacggcugcggagugacccagaaugugcuguacgagaaccagaagcugaucgccaaccaguucaacagcgccaucggcaagauccaggacagccugagcagcacagcaagcgcccugggaaagcugcaggacguggucaaccagaaugcccaggcacugaacacccuggucaagcagcuguccuccaacuucggcgccaucagcucugugcugaacgauauccugagcagacuggacaaggucgaggccgaggugcagaucgacagacugaucacaggcagacugcagagccuccagacauacgugacccagcagcugaucagagccgccgagauuagagccucugccaaucuggccgccaccaagaugucugagugugugcugggccagagcaagagaguggacuuuugcggcaagggcugucaccugaugagcuucccucagucugccccucacggcgugguguuucugcacgugacauaugugcccgcucaagagaagaauuucaccaccgcuccagccaucugccacgacggcaaagcccacuuuccuagagaaggcguguucguguccaacggcacccauugguucgugacacagcggaacuucuacgagccccagaucaucaccaccgacaacaccuucgugucuggcaacugcgacguugugaucggcauugugaacaauaccguguacgacccucugcagcccgagcuggacagcggcggaggaucuggcggaggacagaucuacgagggcaagcugacagccgagggccugagauuuggaaucguggccagccgguucaaucacgcccugguggauagacugguggaaggcgccaucgaugccauugucagacacggcggcagagaagaggacaucacccucguuagagugcccggcucuugggagauuccuguggcugcuggcgagcuggcccggaaagaagauaucgacgccguuaucgccaucggcgugcugaucagaggcgccacaccucacuucgacuauaucgccagcgagguguccaaaggccuggccgaucugagccuggaacugagaaagcccaucaccuucggcgugaucaccgcugacacacuggaacaggccauugagagagccggcaccaagcacggcaacaaaggaugggaagccgcucuguccgccaucgagauggccaaccuguucaagagccugcgguga

SEQ ID NO: 12154 - RNA, 3924 nt, Artificial Sequence
  SARS-CoV-2/Wuhan/WIV05/2019__EPI_ISL_402128 spike protein CDS gc mod (1-1147)(Q965C_S1003C) LumSynth construct
auguucguguuucuggugcugcugccccugguguccagccagugugugaaccugaccaccagaacacagcugccuccagccuacaccaacagcuucaccagaggcguguacuaccccgacaagguguucagauccagcgugcugcacucuacccaggaccuguuccugccuuucuucagcaacgugaccugguuccacgccauccacguguccggcaccaauggcaccaagagauucgacaaccccgugcugcccuucaacgacgggguguacuuugccagcaccgagaaguccaacaucaucagaggcuggaucuucggcaccacacuggacagcaagacccagagccugcugaucgugaacaacgccaccaacguggucaucaaagugugcgaguuccaguucugcaacgaccccuuccugggcgucuacuaccacaagaacaacaagagcuggauggaaagcgaguuccggguguacagcagcgccaacaacugcaccuucgaguacgugucccagccuuuccugauggaccuggaaggcaagcagggcaacuucaagaaccugcgcgaguucguguucaagaacaucgacggcuacuucaaaaucuacagcaagcacaccccuaucaaccucgugcgggaucugccucagggcuucucugcucuggaaccccugguggaucugcccaucggcaucaacaucacccgguuucagacacugcuggcccugcacagaagcuaccugacaccuggcgauagcagcagcggauggacagcuggugccgccgcuuacuaugugggcuaccugcagccuagaaccuuccugcugaaguacaacgagaacggcaccaucaccgacgccguggauugugcucuggauccucugagcgagacaaagugcacccugaaguccuucaccguggaaaagggcaucuaccagaccagcaacuuccgggugcagcccaccgaauccaucgugcgguuccccaauaucaccaaucugugccccuucggcgagguguucaaugccaccagauucgccucuguguacgccuggaaccggaagcggaucagcaauugcguggccgacuacuccgugcuguacaacuccgccagcuucagcaccuucaagugcuacggcguguccccuaccaagcugaacgaccugugcuucacaaacguguacgccgacagcuucgugauccggggagaugaagugcggcagauugccccuggacagacaggcaagaucgccgacuacaacuacaagcugcccgacgacuucaccggcugugugauugccuggaacagcaacaaccuggacuccaaagucggcggcaacuacaauuaccuguaccggcuguuccggaaguccaaucugaagcccuucgagcgggacaucagcaccgaaaucuaucaggccggcagcaccccuugcaacggcguggaaggcuucaacugcuacuucccacugcaguccuacggcuuucagcccacaaauggcgugggcuaucagcccuacagagugguggugcugagcuucgaacugcugcaugcuccugccacagugugcggcccuaagaaaagcaccaaucucgugaagaacaaaugcgugaacuucaacuucaacggccugaccggcaccggcgugcugacagagagcaacaagaaguuccugccauuccagcaguuuggccgggauaucgccgauaccacagacgccguuagagauccccagacacuggaaauccuggacaucaccccaugcagcuucggcggagugucugugaucaccccuggcaccaacaccagcaaucagguggcagugcuguaccaggacgugaacuguaccgaagugcccguggccauucacgccgaucagcugacaccuacauggcggguguacuccaccggcagcaauguguuucagaccagagccggcugucugaucggagccgagcacgugaacaauagcuacgagugcgacauccccaucggcgcuggcaucugugccagcuaccagacacagacaaacagccccagacgggcuagaagcguggccagccagagcaucauugccuacacaaugucucugggcgccgagaacagcguggccuacuccaacaacucuaucgcuauccccaccaacuucaccaucagcgugaccaccgagauccugccuguguccaugaccaagaccagcguggacugcaccauguacaucugcggcgauuccaccgagugcuccaaccugcugcugcaguacggcagcuucugcacccagcugaauagagcccugacagggaucgccguggaacaggacaagaacacccaagagguguucgcccaagugaagcaaaucuacaagaccccuccuaucaaggacuucggcggcuucaauuucagccagauucugcccgauccuagcaagcccagcaagcggagcuucaucgaggaccugcuguucaacaaagugacacuggccgacgccggcuucaucaagcaguauggcgauugucugggcgacauugccgccagggaucugauuugcgcccagaaguuuaacggacugacagugcugccuccucugcugaccgaugagaugaucgcccaguacacaucugcccugcuggccggcacaaucacaagcggcuggacauuuggagcuggcgccgcucugcagauccccuuugcuaugcagauggccuaccgguucaacggcaucggagugacccagaaugugcuguacgagaaccagaagcugaucgccaaccaguucaacagcgccaucggcaagauccaggacagccugagcagcacagcaagcgcccugggaaagcugcaggacguggucaaccagaaugcccaggcacugaacacccuggucaagugccuguccuccaacuucggcgccaucagcucugugcugaacgauauccugagcagacuggacaaggucgaggccgaggugcagaucgacagacugaucacaggcagacugcagugucuccagacauacgugacccagcagcugaucagagccgccgagauuagagccucugccaaucuggccgccaccaagaugucugagugugugcugggccagagcaagagaguggacuuuugcggcaagggcuaccaccugaugagcuucccucagucugccccucacggcgugguguuucugcacgugacauaugugcccgcucaagagaagaauuucaccaccgcuccagccaucugccacgacggcaaagcccacuuuccuagagaaggcguguucguguccaacggcacccauugguucgugacacagcggaacuucuacgagccccagaucaucaccaccgacaacaccuucgugucuggcaacugcgacguugugaucggcauugugaacaauaccguguacgacccucugcagcccgagcuggacagcggcggaggaucuggcggaggacagaucuacgagggcaagcugacagccgagggccugagauuuggaaucguggccagccgguucaaucacgcccugguggauagacugguggaaggcgccaucgaugccauugucagacacggcggcagagaagaggacaucacccucguuagagugcccggcucuugggagauuccuguggcugcuggcgagcuggcccggaaagaagauaucgacgccguuaucgccaucggcgugcugaucagaggcgccacaccucacuucgacuauaucgccagcgagguguccaaaggccuggccgaucugagccuggaacugagaaagcccaucaccuucggcgugaucaccgcugacacacuggaacaggccauugagagagccggcaccaagcacggcaacaaaggaugggaagccgcucuguccgccaucgagauggccaaccuguucaagagccugcgguga

SEQ ID NO: 12155 - RNA, 3924 nt, Artificial Sequence
  SARS-CoV-2/Wuhan/WIV05/2019__EPI_ISL_402128 spike protein CDS gc mod (1-1147)(F970C_G999C) LumSynth construct
auguucguguuucuggugcugcugccccugguguccagccagugugugaaccugaccaccagaacacagcugccuccagccuacaccaacagcuucaccagaggcguguacuaccccgacaagguguucagauccagcgugcugcacucuacccaggaccuguuccugccuuucuucagcaacgugaccugguuccacgccauccacguguccggcaccaauggcaccaagagauucgacaaccccgugcugcccuucaacgacgggguguacuuugccagcaccgagaaguccaacaucaucagaggcuggaucuucggcaccacacuggacagcaagacccagagccugcugaucgugaacaacgccaccaacguggucaucaaagugugcgaguuccaguucugcaacgaccccuuccugggcgucuacuaccacaagaacaacaagagcuggauggaaagcgaguuccggguguacagcagcgccaacaacugcaccuucgaguacgugucccagccuuuccugauggaccuggaaggcaagcagggcaacuucaagaaccugcgcgaguucguguucaagaacaucgacggcuacuucaaaaucuacagcaagcacaccccuaucaaccucgugcgggaucugccucagggcuucucugcucuggaaccccugguggaucugcccaucggcaucaacaucacccgguuucagacacugcuggcccugcacagaagcuaccugacaccuggcgauagcagcagcggauggacagcuggugccgccgcuuacuaugugggcuaccugcagccuagaaccuuccugcugaaguacaacgagaacggcaccaucaccgacgccguggauugugcucuggauccucugagcgagacaaagugcacccugaaguccuucaccguggaaaagggcaucuaccagaccagcaacuuccgggugcagcccaccgaauccaucgugcgguuccccaauaucaccaaucugugccccuucggcgagguguucaaugccaccagauucgccucuguguacgccuggaaccggaagcggaucagcaauugcguggccgacuacuccgugcuguacaacuccgccagcuucagcaccuucaagugcuacggcguguccccuaccaagcugaacgaccugugcuucacaaacguguacgccgacagcuucgugauccggggagaugaagugcggcagauugccccuggacagacaggcaagaucgccgacuacaacuacaagcugcccgacgacuucaccggcugugugauugccuggaacagcaacaaccuggacuccaaagucggcggcaacuacaauuaccuguaccggcuguuccggaaguccaaucugaagcccuucgagcgggacaucagcaccgaaaucuaucaggccggcagcaccccuugcaacggcguggaaggcuucaacugcuacuucccacugcaguccuacggcuuucagcccacaaauggcgugggcuaucagcccuacagagugguggugcugagcuucgaacugcugcaugcuccugccacagugugcggcccuaagaaaagcaccaaucucgugaagaacaaaugcgugaacuucaacuucaacggccugaccggcaccggcgugcugacagagagcaacaagaaguuccugccauuccagcaguuuggccgggauaucgccgauaccacagacgccguuagagauccccagacacuggaaauccuggacaucaccccaugcagcuucggcggagugucugugaucaccccuggcaccaacaccagcaaucagguggcagugcuguaccaggacgugaacuguaccgaagugcccguggccauucacgccgaucagcugacaccuacauggcggguguacuccaccggcagcaauguguuucagaccagagccggcugucugaucggagccgagcacgugaacaauagcuacgagugcgacauccccaucggcgcuggcaucugugccagcuaccagacacagacaaacagccccagacgggcuagaagcguggccagccagagcaucauugccuacacaaugucucugggcgccgagaacagcguggccuacuccaacaacucuaucgcuauccccaccaacuucaccaucagcgugaccaccgagauccugccuguguccaugaccaagaccagcguggacugcaccauguacaucugcggcgauuccaccgagugcuccaaccugcugcugcaguacggcagcuucugcacccagcugaauagagcccugacagggaucgccguggaacaggacaagaacacccaagagguguucgcccaagugaagcaaaucuacaagaccccuccuaucaaggacuucggcggcuucaauuucagccagauucugcccgauccuagcaagcccagcaagcggagcuucaucgaggaccugcuguucaacaaagugacacuggccgacgccggcuucaucaagcaguauggcgauugucugggcgacauugccgccagggaucugauuugcgcccagaaguuuaacggacugacagugcugccuccucugcugaccgaugagaugaucgcccaguacacaucugcccugcuggccggcacaaucacaagcggcuggacauuuggagcuggcgccgcucugcagauccccuuugcuaugcagauggccuaccgguucaacggcaucggagugacccagaaugugcuguacgagaaccagaagcugaucgccaaccaguucaacagcgccaucggcaagauccaggacagccugagcagcacagcaagcgcccugggaaagcugcaggacguggucaaccagaaugcccaggcacugaacacccuggucaagcagcuguccuccaacugcggcgccaucagcucugugcugaacgauauccugagcagacuggacaaggucgaggccgaggugcagaucgacagacugaucacauguagacugcagagccuccagacauacgugacccagcagcugaucagagccgccgagauuagagccucugccaaucuggccgccaccaagaugucugagugugugcugggccagagcaagagaguggacuuuugcggcaagggcuaccaccugaugagcuucccucagucugccccucacggcgugguguuucugcacgugacauaugugcccgcucaagagaagaauuucaccaccgcuccagccaucugccacgacggcaaagcccacuuuccuagagaaggcguguucguguccaacggcacccauugguucgugacacagcggaacuucuacgagccccagaucaucaccaccgacaacaccuucgugucuggcaacugcgacguugugaucggcauugugaacaauaccguguacgacccucugcagcccgagcuggacagcggcggaggaucuggcggaggacagaucuacgagggcaagcugacagccgagggccugagauuuggaaucguggccagccgguucaaucacgcccugguggauagacugguggaaggcgccaucgaugccauugucagacacggcggcagagaagaggacaucacccucguuagagugcccggcucuugggagauuccuguggcugcuggcgagcuggcccggaaagaagauaucgacgccguuaucgccaucggcgugcugaucagaggcgccacaccucacuucgacuauaucgccagcgagguguccaaaggccuggccgaucugagccuggaacugagaaagcccaucaccuucggcgugaucaccgcugacacacuggaacaggccauugagagagccggcaccaagcacggcaacaaaggaugggaagccgcucuguccgccaucgagauggccaaccuguucaagagccugcgguga

SEQ ID NO: 12156 - RNA, 3924 nt, Artificial Sequence
  SARS-CoV-2/Wuhan/WIV05/2019__EPI_ISL_402128 spike protein CDS gc mod (1-1147)(A972C_R995C) LumSynth construct
auguucguguuucuggugcugcugccccugguguccagccagugugugaaccugaccaccagaacacagcugccuccagccuacaccaacagcuucaccagaggcguguacuaccccgacaagguguucagauccagcgugcugcacucuacccaggaccuguuccugccuuucuucagcaacgugaccugguuccacgccauccacguguccggcaccaauggcaccaagagauucgacaaccccgugcugcccuucaacgacgggguguacuuugccagcaccgagaaguccaacaucaucagaggcuggaucuucggcaccacacuggacagcaagacccagagccugcugaucgugaacaacgccaccaacguggucaucaaagugugcgaguuccaguucugcaacgaccccuuccugggcgucuacuaccacaagaacaacaagagcuggauggaaagcgaguuccggguguacagcagcgccaacaacugcaccuucgaguacgugucccagccuuuccugauggaccuggaaggcaagcagggcaacuucaagaaccugcgcgaguucguguucaagaacaucgacggcuacuucaaaaucuacagcaagcacaccccuaucaaccucgugcgggaucugccucagggcuucucugcucuggaaccccugguggaucugcccaucggcaucaacaucacccgguuucagacacugcuggcccugcacagaagcuaccugacaccuggcgauagcagcagcggauggacagcuggugccgccgcuuacuaugugggcuaccugcagccuagaaccuuccugcugaaguacaacgagaacggcaccaucaccgacgccguggauugugcucuggauccucugagcgagacaaagugcacccugaaguccuucaccguggaaaagggcaucuaccagaccagcaacuuccgggugcagcccaccgaauccaucgugcgguuccccaauaucaccaaucugugccccuucggcgagguguucaaugccaccagauucgccucuguguacgccuggaaccggaagcggaucagcaauugcguggccgacuacuccgugcuguacaacuccgccagcuucagcaccuucaagugcuacggcguguccccuaccaagcugaacgaccugugcuucacaaacguguacgccgacagcuucgugauccggggagaugaagugcggcagauugccccuggacagacaggcaagaucgccgacuacaacuacaagcugcccgacgacuucaccggcugugugauugccuggaacagcaacaaccuggacuccaaagucggcggcaacuacaauuaccuguaccggcuguuccggaaguccaaucugaagcccuucgagcgggacaucagcaccgaaaucuaucaggccggcagcaccccuugcaacggcguggaaggcuucaacugcuacuucccacugcaguccuacggcuuucagcccacaaauggcgugggcuaucagcccuacagagugguggugcugagcuucgaacugcugcaugcuccugccacagugugcggcccuaagaaaagcaccaaucucgugaagaacaaaugcgugaacuucaacuucaacggccugaccggcaccggcgugcugacagagagcaacaagaaguuccugccauuccagcaguuuggccgggauaucgccgauaccacagacgccguuagagauccccagacacuggaaauccuggacaucaccccaugcagcuucggcggagugucugugaucaccccuggcaccaacaccagcaaucagguggcagugcuguaccaggacgugaacuguaccgaagugcccguggccauucacgccgaucagcugacaccuacauggcggguguacuccaccggcagcaauguguuucagaccagagccggcugucugaucggagccgagcacgugaacaauagcuacgagugcgacauccccaucggcgcuggcaucugugccagcuaccagacacagacaaacagccccagacgggcuagaagcguggccagccagagcaucauugccuacacaaugucucugggcgccgagaacagcguggccuacuccaacaacucuaucgcuauccccaccaacuucaccaucagcgugaccaccgagauccugccuguguccaugaccaagaccagcguggacugcaccauguacaucugcggcgauuccaccgagugcuccaaccugcugcugcaguacggcagcuucugcacccagcugaauagagcccugacagggaucgccguggaacaggacaagaacacccaagagguguucgcccaagugaagcaaaucuacaagaccccuccuaucaaggacuucggcggcuucaauuucagccagauucugcccgauccuagcaagcccagcaagcggagcuucaucgaggaccugcuguucaacaaagugacacuggccgacgccggcuucaucaagcaguauggcgauugucugggcgacauugccgccagggaucugauuugcgcccagaaguuuaacggacugacagugcugccuccucugcugaccgaugagaugaucgcccaguacacaucugcccugcuggccggcacaaucacaagcggcuggacauuuggagcuggcgccgcucugcagauccccuuugcuaugcagauggccuaccgguucaacggcaucggagugacccagaaugugcuguacgagaaccagaagcugaucgccaaccaguucaacagcgccaucggcaagauccaggacagccugagcagcacagcaagcgcccugggaaagcugcaggacguggucaaccagaaugcccaggcacugaacacccuggucaagcagcuguccuccaacuucggcugcaucagcucugugcugaacgauauccugagcagacuggacaaggucgaggccgaggugcagaucgacugucugaucacaggcagacugcagagccuccagacauacgugacccagcagcugaucagagccgccgagauuagagccucugccaaucuggccgccaccaagaugucugagugugugcugggccagagcaagagaguggacuuuugcggcaagggcuaccaccugaugagcuucccucagucugccccucacggcgugguguuucugcacgugacauaugugcccgcucaagagaagaauuucaccaccgcuccagccaucugccacgacggcaaagcccacuuuccuagagaaggcguguucguguccaacggcacccauugguucgugacacagcggaacuucuacgagccccagaucaucaccaccgacaacaccuucgugucuggcaacugcgacguugugaucggcauugugaacaauaccguguacgacccucugcagcccgagcuggacagcggcggaggaucuggcggaggacagaucuacgagggcaagcugacagccgagggccugagauuuggaaucguggccagccgguucaaucacgcccugguggauagacugguggaaggcgccaucgaugccauugucagacacggcggcagagaagaggacaucacccucguuagagugcccggcucuugggagauuccuguggcugcuggcgagcuggcccggaaagaagauaucgacgccguuaucgccaucggcgugcugaucagaggcgccacaccucacuucgacuauaucgccagcgagguguccaaaggccuggccgaucugagccuggaacugagaaagcccaucaccuucggcgugaucaccgcugacacacuggaacaggccauugagagagccggcaccaagcacggcaacaaaggaugggaagccgcucuguccgccaucgagauggccaaccuguucaagagccugcgguga

SEQ ID NO: 12157 - RNA, 3924 nt, Artificial Sequence
  SARS-CoV-2/Wuhan/WIV05/2019__EPI_ISL_402128 spike protein CDS gc mod (1-1147)(A890C_V1040C) LumSynth construct
auguucguguuucuggugcugcugccccugguguccagccagugugugaaccugaccaccagaacacagcugccuccagccuacaccaacagcuucaccagaggcguguacuaccccgacaagguguucagauccagcgugcugcacucuacccaggaccuguuccugccuuucuucagcaacgugaccugguuccacgccauccacguguccggcaccaauggcaccaagagauucgacaaccccgugcugcccuucaacgacgggguguacuuugccagcaccgagaaguccaacaucaucagaggcuggaucuucggcaccacacuggacagcaagacccagagccugcugaucgugaacaacgccaccaacguggucaucaaagugugcgaguuccaguucugcaacgaccccuuccugggcgucuacuaccacaagaacaacaagagcuggauggaaagcgaguuccggguguacagcagcgccaacaacugcaccuucgaguacgugucccagccuuuccugauggaccuggaaggcaagcagggcaacuucaagaaccugcgcgaguucguguucaagaacaucgacggcuacuucaaaaucuacagcaagcacaccccuaucaaccucgugcgggaucugccucagggcuucucugcucuggaaccccugguggaucugcccaucggcaucaacaucacccgguuucagacacugcuggcccugcacagaagcuaccugacaccuggcgauagcagcagcggauggacagcuggugccgccgcuuacuaugugggcuaccugcagccuagaaccuuccugcugaaguacaacgagaacggcaccaucaccgacgccguggauugugcucuggauccucugagcgagacaaagugcacccugaaguccuucaccguggaaaagggcaucuaccagaccagcaacuuccgggugcagcccaccgaauccaucgugcgguuccccaauaucaccaaucugugccccuucggcgagguguucaaugccaccagauucgccucuguguacgccuggaaccggaagcggaucagcaauugcguggccgacuacuccgugcuguacaacuccgccagcuucagcaccuucaagugcuacggcguguccccuaccaagcugaacgaccugugcuucacaaacguguacgccgacagcuucgugauccggggagaugaagugcggcagauugccccuggacagacaggcaagaucgccgacuacaacuacaagcugcccgacgacuucaccggcugugugauugccuggaacagcaacaaccuggacuccaaagucggcggcaacuacaauuaccuguaccggcuguuccggaaguccaaucugaagcccuucgagcgggacaucagcaccgaaaucuaucaggccggcagcaccccuugcaacggcguggaaggcuucaacugcuacuucccacugcaguccuacggcuuucagcccacaaauggcgugggcuaucagcccuacagagugguggugcugagcuucgaacugcugcaugcuccugccacagugugcggcccuaagaaaagcaccaaucucgugaagaacaaaugcgugaacuucaacuucaacggccugaccggcaccggcgugcugacagagagcaacaagaaguuccugccauuccagcaguuuggccgggauaucgccgauaccacagacgccguuagagauccccagacacuggaaauccuggacaucaccccaugcagcuucggcggagugucugugaucaccccuggcaccaacaccagcaaucagguggcagugcuguaccaggacgugaacuguaccgaagugcccguggccauucacgccgaucagcugacaccuacauggcggguguacuccaccggcagcaauguguuucagaccagagccggcugucugaucggagccgagcacgugaacaauagcuacgagugcgacauccccaucggcgcuggcaucugugccagcuaccagacacagacaaacagccccagacgggcuagaagcguggccagccagagcaucauugccuacacaaugucucugggcgccgagaacagcguggccuacuccaacaacucuaucgcuauccccaccaacuucaccaucagcgugaccaccgagauccugccuguguccaugaccaagaccagcguggacugcaccauguacaucugcggcgauuccaccgagugcuccaaccugcugcugcaguacggcagcuucugcacccagcugaauagagcccugacagggaucgccguggaacaggacaagaacacccaagagguguucgcccaagugaagcaaaucuacaagaccccuccuaucaaggacuucggcggcuucaauuucagccagauucugcccgauccuagcaagcccagcaagcggagcuucaucgaggaccugcuguucaacaaagugacacuggccgacgccggcuucaucaagcaguauggcgauugucugggcgacauugccgccagggaucugauuugcgcccagaaguuuaacggacugacagugcugccuccucugcugaccgaugagaugaucgcccaguacacaucugcccugcuggccggcacaaucacaagcggcuggacauuuggaugcggcgccgcucugcagauccccuuugcuaugcagauggccuaccgguucaacggcaucggagugacccagaaugugcuguacgagaaccagaagcugaucgccaaccaguucaacagcgccaucggcaagauccaggacagccugagcagcacagcaagcgcccugggaaagcugcaggacguggucaaccagaaugcccaggcacugaacacccuggucaagcagcuguccuccaacuucggcgccaucagcucugugcugaacgauauccugagcagacuggacaaggucgaggccgaggugcagaucgacagacugaucacaggcagacugcagagccuccagacauacgugacccagcagcugaucagagccgccgagauuagagccucugccaaucuggccgccaccaagaugucugagugugugcugggccagagcaagagaugugacuuuugcggcaagggcuaccaccugaugagcuucccucagucugccccucacggcgugguguuucugcacgugacauaugugcccgcucaagagaagaauuucaccaccgcuccagccaucugccacgacggcaaagcccacuuuccuagagaaggcguguucguguccaacggcacccauugguucgugacacagcggaacuucuacgagccccagaucaucaccaccgacaacaccuucgugucuggcaacugcgacguugugaucggcauugugaacaauaccguguacgacccucugcagcccgagcuggacagcggcggaggaucuggcggaggacagaucuacgagggcaagcugacagccgagggccugagauuuggaaucguggccagccgguucaaucacgcccugguggauagacugguggaaggcgccaucgaugccauugucagacacggcggcagagaagaggacaucacccucguuagagugcccggcucuugggagauuccuguggcugcuggcgagcuggcccggaaagaagauaucgacgccguuaucgccaucggcgugcugaucagaggcgccacaccucacuucgacuauaucgccagcgagguguccaaaggccuggccgaucugagccuggaacugagaaagcccaucaccuucggcgugaucaccgcugacacacuggaacaggccauugagagagccggcaccaagcacggcaacaaaggaugggaagccgcucuguccgccaucgagauggccaaccuguucaagagccugcgguga

SEQ ID NO: 12158 - RNA, 3924 nt, Artificial Sequence
  SARS-CoV-2/Wuhan/WIV05/2019__EPI_ISL_402128 spike protein CDS gc mod (1-1147)(T874C_S1055C) LumSynth construct
auguucguguuucuggugcugcugccccugguguccagccagugugugaaccugaccaccagaacacagcugccuccagccuacaccaacagcuucaccagaggcguguacuaccccgacaagguguucagauccagcgugcugcacucuacccaggaccuguuccugccuuucuucagcaacgugaccugguuccacgccauccacguguccggcaccaauggcaccaagagauucgacaaccccgugcugcccuucaacgacgggguguacuuugccagcaccgagaaguccaacaucaucagaggcuggaucuucggcaccacacuggacagcaagacccagagccugcugaucgugaacaacgccaccaacguggucaucaaagugugcgaguuccaguucugcaacgaccccuuccugggcgucuacuaccacaagaacaacaagagcuggauggaaagcgaguuccggguguacagcagcgccaacaacugcaccuucgaguacgugucccagccuuuccugauggaccuggaaggcaagcagggcaacuucaagaaccugcgcgaguucguguucaagaacaucgacggcuacuucaaaaucuacagcaagcacaccccuaucaaccucgugcgggaucugccucagggcuucucugcucuggaaccccugguggaucugcccaucggcaucaacaucacccgguuucagacacugcuggcccugcacagaagcuaccugacaccuggcgauagcagcagcggauggacagcuggugccgccgcuuacuaugugggcuaccugcagccuagaaccuuccugcugaaguacaacgagaacggcaccaucaccgacgccguggauugugcucuggauccucugagcgagacaaagugcacccugaaguccuucaccguggaaaagggcaucuaccagaccagcaacuuccgggugcagcccaccgaauccaucgugcgguuccccaauaucaccaaucugugccccuucggcgagguguucaaugccaccagauucgccucuguguacgccuggaaccggaagcggaucagcaauugcguggccgacuacuccgugcuguacaacuccgccagcuucagcaccuucaagugcuacggcguguccccuaccaagcugaacgaccugugcuucacaaacguguacgccgacagcuucgugauccggggagaugaagugcggcagauugccccuggacagacaggcaagaucgccgacuacaacuacaagcugcccgacgacuucaccggcugugugauugccuggaacagcaacaaccuggacuccaaagucggcggcaacuacaauuaccuguaccggcuguuccggaaguccaaucugaagcccuucgagcgggacaucagcaccgaaaucuaucaggccggcagcaccccuugcaacggcguggaaggcuucaacugcuacuucccacugcaguccuacggcuuucagcccacaaauggcgugggcuaucagcccuacagagugguggugcugagcuucgaacugcugcaugcuccugccacagugugcggcccuaagaaaagcaccaaucucgugaagaacaaaugcgugaacuucaacuucaacggccugaccggcaccggcgugcugacagagagcaacaagaaguuccugccauuccagcaguuuggccgggauaucgccgauaccacagacgccguuagagauccccagacacuggaaauccuggacaucaccccaugcagcuucggcggagugucugugaucaccccuggcaccaacaccagcaaucagguggcagugcuguaccaggacgugaacuguaccgaagugcccguggccauucacgccgaucagcugacaccuacauggcggguguacuccaccggcagcaauguguuucagaccagagccggcugucugaucggagccgagcacgugaacaauagcuacgagugcgacauccccaucggcgcuggcaucugugccagcuaccagacacagacaaacagccccagacgggcuagaagcguggccagccagagcaucauugccuacacaaugucucugggcgccgagaacagcguggccuacuccaacaacucuaucgcuauccccaccaacuucaccaucagcgugaccaccgagauccugccuguguccaugaccaagaccagcguggacugcaccauguacaucugcggcgauuccaccgagugcuccaaccugcugcugcaguacggcagcuucugcacccagcugaauagagcccugacagggaucgccguggaacaggacaagaacacccaagagguguucgcccaagugaagcaaaucuacaagaccccuccuaucaaggacuucggcggcuucaauuucagccagauucugcccgauccuagcaagcccagcaagcggagcuucaucgaggaccugcuguucaacaaagugacacuggccgacgccggcuucaucaagcaguauggcgauugucugggcgacauugccgccagggaucugauuugcgcccagaaguuuaacggacugacagugcugccuccucugcugaccgaugagaugaucgcccaguacugcucugcccugcuggccggcacaaucacaagcggcuggacauuuggagcuggcgccgcucugcagauccccuuugcuaugcagauggccuaccgguucaacggcaucggagugacccagaaugugcuguacgagaaccagaagcugaucgccaaccaguucaacagcgccaucggcaagauccaggacagccugagcagcacagcaagcgcccugggaaagcugcaggacguggucaaccagaaugcccaggcacugaacacccuggucaagcagcuguccuccaacuucggcgccaucagcucugugcugaacgauauccugagcagacuggacaaggucgaggccgaggugcagaucgacagacugaucacaggcagacugcagagccuccagacauacgugacccagcagcugaucagagccgccgagauuagagccucugccaaucuggccgccaccaagaugucugagugugugcugggccagagcaagagaguggacuuuugcggcaagggcuaccaccugaugagcuucccucagugcgccccucacggcgugguguuucugcacgugacauaugugcccgcucaagagaagaauuucaccaccgcuccagccaucugccacgacggcaaagcccacuuuccuagagaaggcguguucguguccaacggcacccauugguucgugacacagcggaacuucuacgagccccagaucaucaccaccgacaacaccuucgugucuggcaacugcgacguugugaucggcauugugaacaauaccguguacgacccucugcagcccgagcuggacagcggcggaggaucuggcggaggacagaucuacgagggcaagcugacagccgagggccugagauuuggaaucguggccagccgguucaaucacgcccugguggauagacugguggaaggcgccaucgaugccauugucagacacggcggcagagaagaggacaucacccucguuagagugcccggcucuugggagauuccuguggcugcuggcgagcuggcccggaaagaagauaucgacgccguuaucgccaucggcgugcugaucagaggcgccacaccucacuucgacuauaucgccagcgagguguccaaaggccuggccgaucugagccuggaacugagaaagcccaucaccuucggcgugaucaccgcugacacacuggaacaggccauugagagagccggcaccaagcacggcaacaaaggaugggaagccgcucuguccgccaucgagauggccaaccuguucaagagccugcgguga

SEQ ID NO: 12159 - RNA, 3948 nt, Artificial Sequence
  SARS-CoV-2/Wuhan/WIV05/2019__EPI_ISL_402128 spike protein CDS gc mod (1-1147) Ferritin construct
auguucguguuucuggugcugcugccccugguguccagccagugugugaaccugaccaccagaacacagcugccuccagccuacaccaacagcuucaccagaggcguguacuaccccgacaagguguucagauccagcgugcugcacucuacccaggaccuguuccugccuuucuucagcaacgugaccugguuccacgccauccacguguccggcaccaauggcaccaagagauucgacaaccccgugcugcccuucaacgacgggguguacuuugccagcaccgagaaguccaacaucaucagaggcuggaucuucggcaccacacuggacagcaagacccagagccugcugaucgugaacaacgccaccaacguggucaucaaagugugcgaguuccaguucugcaacgaccccuuccugggcgucuacuaccacaagaacaacaagagcuggauggaaagcgaguuccggguguacagcagcgccaacaacugcaccuucgaguacgugucccagccuuuccugauggaccuggaaggcaagcagggcaacuucaagaaccugcgcgaguucguguucaagaacaucgacggcuacuucaaaaucuacagcaagcacaccccuaucaaccucgugcgggaucugccucagggcuucucugcucuggaaccccugguggaucugcccaucggcaucaacaucacccgguuucagacacugcuggcccugcacagaagcuaccugacaccuggcgauagcagcagcggauggacagcuggugccgccgcuuacuaugugggcuaccugcagccuagaaccuuccugcugaaguacaacgagaacggcaccaucaccgacgccguggauugugcucuggauccucugagcgagacaaagugcacccugaaguccuucaccguggaaaagggcaucuaccagaccagcaacuuccgggugcagcccaccgaauccaucgugcgguuccccaauaucaccaaucugugccccuucggcgagguguucaaugccaccagauucgccucuguguacgccuggaaccggaagcggaucagcaauugcguggccgacuacuccgugcuguacaacuccgccagcuucagcaccuucaagugcuacggcguguccccuaccaagcugaacgaccugugcuucacaaacguguacgccgacagcuucgugauccggggagaugaagugcggcagauugccccuggacagacaggcaagaucgccgacuacaacuacaagcugcccgacgacuucaccggcugugugauugccuggaacagcaacaaccuggacuccaaagucggcggcaacuacaauuaccuguaccggcuguuccggaaguccaaucugaagcccuucgagcgggacaucagcaccgaaaucuaucaggccggcagcaccccuugcaacggcguggaaggcuucaacugcuacuucccacugcaguccuacggcuuucagcccacaaauggcgugggcuaucagcccuacagagugguggugcugagcuucgaacugcugcaugcuccugccacagugugcggcccuaagaaaagcaccaaucucgugaagaacaaaugcgugaacuucaacuucaacggccugaccggcaccggcgugcugacagagagcaacaagaaguuccugccauuccagcaguuuggccgggauaucgccgauaccacagacgccguuagagauccccagacacuggaaauccuggacaucaccccaugcagcuucggcggagugucugugaucaccccuggcaccaacaccagcaaucagguggcagugcuguaccaggacgugaacuguaccgaagugcccguggccauucacgccgaucagcugacaccuacauggcggguguacuccaccggcagcaauguguuucagaccagagccggcugucugaucggagccgagcacgugaacaauagcuacgagugcgacauccccaucggcgcuggcaucugugccagcuaccagacacagacaaacagccccagacgggcuagaagcguggccagccagagcaucauugccuacacaaugucucugggcgccgagaacagcguggccuacuccaacaacucuaucgcuauccccaccaacuucaccaucagcgugaccaccgagauccugccuguguccaugaccaagaccagcguggacugcaccauguacaucugcggcgauuccaccgagugcuccaaccugcugcugcaguacggcagcuucugcacccagcugaauagagcccugacagggaucgccguggaacaggacaagaacacccaagagguguucgcccaagugaagcaaaucuacaagaccccuccuaucaaggacuucggcggcuucaauuucagccagauucugcccgauccuagcaagcccagcaagcggagcuucaucgaggaccugcuguucaacaaagugacacuggccgacgccggcuucaucaagcaguauggcgauugucugggcgacauugccgccagggaucugauuugcgcccagaaguuuaacggacugacagugcugccuccucugcugaccgaugagaugaucgcccaguacacaucugcccugcuggccggcacaaucacaagcggcuggacauuuggagcuggcgccgcucugcagauccccuuugcuaugcagauggccuaccgguucaacggcaucggagugacccagaaugugcuguacgagaaccagaagcugaucgccaaccaguucaacagcgccaucggcaagauccaggacagccugagcagcacagcaagcgcccugggaaagcugcaggacguggucaaccagaaugcccaggcacugaacacccuggucaagcagcuguccuccaacuucggcgccaucagcucugugcugaacgauauccugagcagacuggacaaggucgaggccgaggugcagaucgacagacugaucacaggcagacugcagagccuccagacauacgugacccagcagcugaucagagccgccgagauuagagccucugccaaucuggccgccaccaagaugucugagugugugcugggccagagcaagagaguggacuuuugcggcaagggcuaccaccugaugagcuucccucagucugccccucacggcgugguguuucugcacgugacauaugugcccgcucaagagaagaauuucaccaccgcuccagccaucugccacgacggcaaagcccacuuuccuagagaaggcguguucguguccaacggcacccauugguucgugacacagcggaacuucuacgagccccagaucaucaccaccgacaacaccuucgugucuggcaacugcgacguugugaucggcauugugaacaauaccguguacgacccucugcagcccgagcuggacagcggaggcggaggaucugacaucaucaagcugcugaacgagcaagugaacaaagagaugcagagcagcaaccuguacaugagcaugagcagcuggugcuacacccacagccuugauggcgccggacuguuccuguuugaucacgccgccgaggaauacgagcacgccaagaagcugaucaucuuccugaacgagaacaacgugcccgugcagcugaccagcauuucugccccugagcacaaguucgagggccugacacagaucuuccagaaggccuacgaacacgagcagcacaucagcgagagcaucaacaacaucguggaccacgccauuaagagcaaggaucacgccaccuucaacuuucugcagugguacguggccgaacagcacgaggaagaggugcuguucaaggacauccuggacaagaucgagcugaucggcaacgagaaccacggccuguaucuggccgaccaguacgugaagggaaucgccaagagcagaaagagcuga

SEQ ID NO: 12160 - RNA, 3948 nt, Artificial Sequence
  SARS-CoV-2/Wuhan/WIV05/2019__EPI_ISL_402128 spike protein CDS gc mod (1-1147)(K986P_V987P) Ferritin construct
auguucguguuucuggugcugcugccccugguguccagccagugugugaaccugaccaccagaacacagcugccuccagccuacaccaacagcuucaccagaggcguguacuaccccgacaagguguucagauccagcgugcugcacucuacccaggaccuguuccugccuuucuucagcaacgugaccugguuccacgccauccacguguccggcaccaauggcaccaagagauucgacaaccccgugcugcccuucaacgacgggguguacuuugccagcaccgagaaguccaacaucaucagaggcuggaucuucggcaccacacuggacagcaagacccagagccugcugaucgugaacaacgccaccaacguggucaucaaagugugcgaguuccaguucugcaacgaccccuuccugggcgucuacuaccacaagaacaacaagagcuggauggaaagcgaguuccggguguacagcagcgccaacaacugcaccuucgaguacgugucccagccuuuccugauggaccuggaaggcaagcagggcaacuucaagaaccugcgcgaguucguguucaagaacaucgacggcuacuucaaaaucuacagcaagcacaccccuaucaaccucgugcgggaucugccucagggcuucucugcucuggaaccccugguggaucugcccaucggcaucaacaucacccgguuucagacacugcuggcccugcacagaagcuaccugacaccuggcgauagcagcagcggauggacagcuggugccgccgcuuacuaugugggcuaccugcagccuagaaccuuccugcugaaguacaacgagaacggcaccaucaccgacgccguggauugugcucuggauccucugagcgagacaaagugcacccugaaguccuucaccguggaaaagggcaucuaccagaccagcaacuuccgggugcagcccaccgaauccaucgugcgguuccccaauaucaccaaucugugccccuucggcgagguguucaaugccaccagauucgccucuguguacgccuggaaccggaagcggaucagcaauugcguggccgacuacuccgugcuguacaacuccgccagcuucagcaccuucaagugcuacggcguguccccuaccaagcugaacgaccugugcuucacaaacguguacgccgacagcuucgugauccggggagaugaagugcggcagauugccccuggacagacaggcaagaucgccgacuacaacuacaagcugcccgacgacuucaccggcugugugauugccuggaacagcaacaaccuggacuccaaagucggcggcaacuacaauuaccuguaccggcuguuccggaaguccaaucugaagcccuucgagcgggacaucagcaccgaaaucuaucaggccggcagcaccccuugcaacggcguggaaggcuucaacugcuacuucccacugcaguccuacggcuuucagcccacaaauggcgugggcuaucagcccuacagagugguggugcugagcuucgaacugcugcaugcuccugccacagugugcggcccuaagaaaagcaccaaucucgugaagaacaaaugcgugaacuucaacuucaacggccugaccggcaccggcgugcugacagagagcaacaagaaguuccugccauuccagcaguuuggccgggauaucgccgauaccacagacgccguuagagauccccagacacuggaaauccuggacaucaccccaugcagcuucggcggagugucugugaucaccccuggcaccaacaccagcaaucagguggcagugcuguaccaggacgugaacuguaccgaagugcccguggccauucacgccgaucagcugacaccuacauggcggguguacuccaccggcagcaauguguuucagaccagagccggcugucugaucggagccgagcacgugaacaauagcuacgagugcgacauccccaucggcgcuggcaucugugccagcuaccagacacagacaaacagccccagacgggcuagaagcguggccagccagagcaucauugccuacacaaugucucugggcgccgagaacagcguggccuacuccaacaacucuaucgcuauccccaccaacuucaccaucagcgugaccaccgagauccugccuguguccaugaccaagaccagcguggacugcaccauguacaucugcggcgauuccaccgagugcuccaaccugcugcugcaguacggcagcuucugcacccagcugaauagagcccugacagggaucgccguggaacaggacaagaacacccaagagguguucgcccaagugaagcaaaucuacaagaccccuccuaucaaggacuucggcggcuucaauuucagccagauucugcccgauccuagcaagcccagcaagcggagcuucaucgaggaccugcuguucaacaaagugacacuggccgacgccggcuucaucaagcaguauggcgauugucugggcgacauugccgccagggaucugauuugcgcccagaaguuuaacggacugacagugcugccuccucugcugaccgaugagaugaucgcccaguacacaucugcccugcuggccggcacaaucacaagcggcuggacauuuggagcuggcgccgcucugcagauccccuuugcuaugcagauggccuaccgguucaacggcaucggagugacccagaaugugcuguacgagaaccagaagcugaucgccaaccaguucaacagcgccaucggcaagauccaggacagccugagcagcacagcaagcgcccugggaaagcugcaggacguggucaaccagaaugcccaggcacugaacacccuggucaagcagcuguccuccaacuucggcgccaucagcucugugcugaacgauauccugagcagacuggacccuccugaggccgaggugcagaucgacagacugaucacaggcagacugcagagccuccagacauacgugacccagcagcugaucagagccgccgagauuagagccucugccaaucuggccgccaccaagaugucugagugugugcugggccagagcaagagaguggacuuuugcggcaagggcuaccaccugaugagcuucccucagucugccccucacggcgugguguuucugcacgugacauaugugcccgcucaagagaagaauuucaccaccgcuccagccaucugccacgacggcaaagcccacuuuccuagagaaggcguguucguguccaacggcacccauugguucgugacacagcggaacuucuacgagccccagaucaucaccaccgacaacaccuucgugucuggcaacugcgacguugugaucggcauugugaacaauaccguguacgacccucugcagcccgagcuggacagcggaggcggaggaucugacaucaucaagcugcugaacgagcaagugaacaaagagaugcagagcagcaaccuguacaugagcaugagcagcuggugcuacacccacagccuugauggcgccggacuguuccuguuugaucacgccgccgaggaauacgagcacgccaagaagcugaucaucuuccugaacgagaacaacgugcccgugcagcugaccagcauuucugccccugagcacaaguucgagggccugacacagaucuuccagaaggccuacgaacacgagcagcacaucagcgagagcaucaacaacaucguggaccacgccauuaagagcaaggaucacgccaccuucaacuuucugcagugguacguggccgaacagcacgaggaagaggugcuguucaaggacauccuggacaagaucgagcugaucggcaacgagaaccacggccuguaucuggccgaccaguacgugaagggaaucgccaagagcagaaagagcuga

SEQ ID NO: 12161 - RNA, 3948 nt, Artificial Sequence
  SARS-CoV-2/Wuhan/WIV05/2019__EPI_ISL_402128 spike protein CDS gc mod (1-1147)(K986P_V987P_T887WN_A1020W) Ferritin construct
auguucguguuucuggugcugcugccccugguguccagccagugugugaaccugaccaccagaacacagcugccuccagccuacaccaacagcuucaccagaggcguguacuaccccgacaagguguucagauccagcgugcugcacucuacccaggaccuguuccugccuuucuucagcaacgugaccugguuccacgccauccacguguccggcaccaauggcaccaagagauucgacaaccccgugcugcccuucaacgacgggguguacuuugccagcaccgagaaguccaacaucaucagaggcuggaucuucggcaccacacuggacagcaagacccagagccugcugaucgugaacaacgccaccaacguggucaucaaagugugcgaguuccaguucugcaacgaccccuuccugggcgucuacuaccacaagaacaacaagagcuggauggaaagcgaguuccggguguacagcagcgccaacaacugcaccuucgaguacgugucccagccuuuccugauggaccuggaaggcaagcagggcaacuucaagaaccugcgcgaguucguguucaagaacaucgacggcuacuucaaaaucuacagcaagcacaccccuaucaaccucgugcgggaucugccucagggcuucucugcucuggaaccccugguggaucugcccaucggcaucaacaucacccgguuucagacacugcuggcccugcacagaagcuaccugacaccuggcgauagcagcagcggauggacagcuggugccgccgcuuacuaugugggcuaccugcagccuagaaccuuccugcugaaguacaacgagaacggcaccaucaccgacgccguggauugugcucuggauccucugagcgagacaaagugcacccugaaguccuucaccguggaaaagggcaucuaccagaccagcaacuuccgggugcagcccaccgaauccaucgugcgguuccccaauaucaccaaucugugccccuucggcgagguguucaaugccaccagauucgccucuguguacgccuggaaccggaagcggaucagcaauugcguggccgacuacuccgugcuguacaacuccgccagcuucagcaccuucaagugcuacggcguguccccuaccaagcugaacgaccugugcuucacaaacguguacgccgacagcuucgugauccggggagaugaagugcggcagauugccccuggacagacaggcaagaucgccgacuacaacuacaagcugcccgacgacuucaccggcugugugauugccuggaacagcaacaaccuggacuccaaagucggcggcaacuacaauuaccuguaccggcuguuccggaaguccaaucugaagcccuucgagcgggacaucagcaccgaaaucuaucaggccggcagcaccccuugcaacggcguggaaggcuucaacugcuacuucccacugcaguccuacggcuuucagcccacaaauggcgugggcuaucagcccuacagagugguggugcugagcuucgaacugcugcaugcuccugccacagugugcggcccuaagaaaagcaccaaucucgugaagaacaaaugcgugaacuucaacuucaacggccugaccggcaccggcgugcugacagagagcaacaagaaguuccugccauuccagcaguuuggccgggauaucgccgauaccacagacgccguuagagauccccagacacuggaaauccuggacaucaccccaugcagcuucggcggagugucugugaucaccccuggcaccaacaccagcaaucagguggcagugcuguaccaggacgugaacuguaccgaagugcccguggccauucacgccgaucagcugacaccuacauggcggguguacuccaccggcagcaauguguuucagaccagagccggcugucugaucggagccgagcacgugaacaauagcuacgagugcgacauccccaucggcgcuggcaucugugccagcuaccagacacagacaaacagccccagacgggcuagaagcguggccagccagagcaucauugccuacacaaugucucugggcgccgagaacagcguggccuacuccaacaacucuaucgcuauccccaccaacuucaccaucagcgugaccaccgagauccugccuguguccaugaccaagaccagcguggacugcaccauguacaucugcggcgauuccaccgagugcuccaaccugcugcugcaguacggcagcuucugcacccagcugaauagagcccugacagggaucgccguggaacaggacaagaacacccaagagguguucgcccaagugaagcaaaucuacaagaccccuccuaucaaggacuucggcggcuucaauuucagccagauucugcccgauccuagcaagcccagcaagcggagcuucaucgaggaccugcuguucaacaaagugacacuggccgacgccggcuucaucaagcaguauggcgauugucugggcgacauugccgccagggaucugauuugcgcccagaaguuuaacggacugacagugcugccuccucugcugaccgaugagaugaucgcccaguacacaucugcccugcuggccggcacaaucacaagcggcuggugguuuggagcuggcgccgcucugcagauccccuuugcuaugcagauggccuaccgguucaacggcaucggagugacccagaaugugcuguacgagaaccagaagcugaucgccaaccaguucaacagcgccaucggcaagauccaggacagccugagcagcacagcaagcgcccugggaaagcugcaggacguggucaaccagaaugcccaggcacugaacacccuggucaagcagcuguccuccaacuucggcgccaucagcucugugcugaacgauauccugagcagacuggacccuccugaggccgaggugcagaucgacagacugaucacaggcagacugcagagccuccagacauacgugacccagcagcugaucagagccgccgagauuagauggucugccaaucuggccgccaccaagaugucugagugugugcugggccagagcaagagaguggacuuuugcggcaagggcuaccaccugaugagcuucccucagucugccccucacggcgugguguuucugcacgugacauaugugcccgcucaagagaagaauuucaccaccgcuccagccaucugccacgacggcaaagcccacuuuccuagagaaggcguguucguguccaacggcacccauugguucgugacacagcggaacuucuacgagccccagaucaucaccaccgacaacaccuucgugucuggcaacugcgacguugugaucggcauugugaacaauaccguguacgacccucugcagcccgagcuggacagcggaggcggaggaucugacaucaucaagcugcugaacgagcaagugaacaaagagaugcagagcagcaaccuguacaugagcaugagcagcuggugcuacacccacagccuugauggcgccggacuguuccuguuugaucacgccgccgaggaauacgagcacgccaagaagcugaucaucuuccugaacgagaacaacgugcccgugcagcugaccagcauuucugccccugagcacaaguucgagggccugacacagaucuuccagaaggccuacgaacacgagcagcacaucagcgagagcaucaacaacaucguggaccacgccauuaagagcaaggaucacgccaccuucaacuuucugcagugguacguggccgaacagcacgaggaagaggugcuguucaaggacauccuggacaagaucgagcugaucggcaacgagaaccacggccuguaucuggccgaccaguacgugaagggaaucgccaagagcagaaagagcuga

SEQ ID NO: 12162 - RNA, 3948 nt, Artificial Sequence
  SARS-CoV-2/Wuhan/WIV05/2019__EPI_ISL_402128 spike protein CDS gc mod (1-1147)(K986P_V987P_P1069F) Ferritin construct
auguucguguuucuggugcugcugccccugguguccagccagugugugaaccugaccaccagaacacagcugccuccagccuacaccaacagcuucaccagaggcguguacuaccccgacaagguguucagauccagcgugcugcacucuacccaggaccuguuccugccuuucuucagcaacgugaccugguuccacgccauccacguguccggcaccaauggcaccaagagauucgacaaccccgugcugcccuucaacgacgggguguacuuugccagcaccgagaaguccaacaucaucagaggcuggaucuucggcaccacacuggacagcaagacccagagccugcugaucgugaacaacgccaccaacguggucaucaaagugugcgaguuccaguucugcaacgaccccuuccugggcgucuacuaccacaagaacaacaagagcuggauggaaagcgaguuccggguguacagcagcgccaacaacugcaccuucgaguacgugucccagccuuuccugauggaccuggaaggcaagcagggcaacuucaagaaccugcgcgaguucguguucaagaacaucgacggcuacuucaaaaucuacagcaagcacaccccuaucaaccucgugcgggaucugccucagggcuucucugcucuggaaccccugguggaucugcccaucggcaucaacaucacccgguuucagacacugcuggcccugcacagaagcuaccugacaccuggcgauagcagcagcggauggacagcuggugccgccgcuuacuaugugggcuaccugcagccuagaaccuuccugcugaaguacaacgagaacggcaccaucaccgacgccguggauugugcucuggauccucugagcgagacaaagugcacccugaaguccuucaccguggaaaagggcaucuaccagaccagcaacuuccgggugcagcccaccgaauccaucgugcgguuccccaauaucaccaaucugugccccuucggcgagguguucaaugccaccagauucgccucuguguacgccuggaaccggaagcggaucagcaauugcguggccgacuacuccgugcuguacaacuccgccagcuucagcaccuucaagugcuacggcguguccccuaccaagcugaacgaccugugcuucacaaacguguacgccgacagcuucgugauccggggagaugaagugcggcagauugccccuggacagacaggcaagaucgccgacuacaacuacaagcugcccgacgacuucaccggcugugugauugccuggaacagcaacaaccuggacuccaaagucggcggcaacuacaauuaccuguaccggcuguuccggaaguccaaucugaagcccuucgagcgggacaucagcaccgaaaucuaucaggccggcagcaccccuugcaacggcguggaaggcuucaacugcuacuucccacugcaguccuacggcuuucagcccacaaauggcgugggcuaucagcccuacagagugguggugcugagcuucgaacugcugcaugcuccugccacagugugcggcccuaagaaaagcaccaaucucgugaagaacaaaugcgugaacuucaacuucaacggccugaccggcaccggcgugcugacagagagcaacaagaaguuccugccauuccagcaguuuggccgggauaucgccgauaccacagacgccguuagagauccccagacacuggaaauccuggacaucaccccaugcagcuucggcggagugucugugaucaccccuggcaccaacaccagcaaucagguggcagugcuguaccaggacgugaacuguaccgaagugcccguggccauucacgccgaucagcugacaccuacauggcggguguacuccaccggcagcaauguguuucagaccagagccggcugucugaucggagccgagcacgugaacaauagcuacgagugcgacauccccaucggcgcuggcaucugugccagcuaccagacacagacaaacagccccagacgggcuagaagcguggccagccagagcaucauugccuacacaaugucucugggcgccgagaacagcguggccuacuccaacaacucuaucgcuauccccaccaacuucaccaucagcgugaccaccgagauccugccuguguccaugaccaagaccagcguggacugcaccauguacaucugcggcgauuccaccgagugcuccaaccugcugcugcaguacggcagcuucugcacccagcugaauagagcccugacagggaucgccguggaacaggacaagaacacccaagagguguucgcccaagugaagcaaaucuacaagaccccuccuaucaaggacuucggcggcuucaauuucagccagauucugcccgauccuagcaagcccagcaagcggagcuucaucgaggaccugcuguucaacaaagugacacuggccgacgccggcuucaucaagcaguauggcgauugucugggcgacauugccgccagggaucugauuugcgcccagaaguuuaacggacugacagugcugccuccucugcugaccgaugagaugaucgcccaguacacaucugcccugcuggccggcacaaucacaagcggcuggacauuuggagcuggcgccgcucugcagauccccuuugcuaugcagauggccuaccgguucaacggcaucggagugacccagaaugugcuguacgagaaccagaagcugaucgccaaccaguucaacagcgccaucggcaagauccaggacagccugagcagcacagcaagcgcccugggaaagcugcaggacguggucaaccagaaugcccaggcacugaacacccuggucaagcagcuguccuccaacuucggcgccaucagcucugugcugaacgauauccugagcagacuggacccuccugaggccgaggugcagaucgacagacugaucacaggcagacugcagagccuccagacauacgugacccagcagcugaucagagccgccgagauuagagccucugccaaucuggccgccaccaagaugucugagugugugcugggccagagcaagagaguggacuuuugcggcaagggcuaccaccugaugagcuucccucagucugccccucacggcgugguguuucugcacgugacauauguguucgcucaagagaagaauuucaccaccgcuccagccaucugccacgacggcaaagcccacuuuccuagagaaggcguguucguguccaacggcacccauugguucgugacacagcggaacuucuacgagccccagaucaucaccaccgacaacaccuucgugucuggcaacugcgacguugugaucggcauugugaacaauaccguguacgacccucugcagcccgagcuggacagcggaggcggaggaucugacaucaucaagcugcugaacgagcaagugaacaaagagaugcagagcagcaaccuguacaugagcaugagcagcuggugcuacacccacagccuugauggcgccggacuguuccuguuugaucacgccgccgaggaauacgagcacgccaagaagcugaucaucuuccugaacgagaacaacgugcccgugcagcugaccagcauuucugccccugagcacaaguucgagggccugacacagaucuuccagaaggccuacgaacacgagcagcacaucagcgagagcaucaacaacaucguggaccacgccauuaagagcaaggaucacgccaccuucaacuuucugcagugguacguggccgaacagcacgaggaagaggugcuguucaaggacauccuggacaagaucgagcugaucggcaacgagaaccacggccuguaucuggccgaccaguacgugaagggaaucgccaagagcagaaagagcuga

SEQ ID NO: 12163 - RNA, 3948 nt, Artificial Sequence
  SARS-CoV-2/Wuhan/WIV05/2019__EPI_ISL_402128 spike protein CDS gc mod (1-1147)(K986P_V987P_ H1048Q_H1064N_ H1083N_H1101N) Ferritin construct
auguucguguuucuggugcugcugccccugguguccagccagugugugaaccugaccaccagaacacagcugccuccagccuacaccaacagcuucaccagaggcguguacuaccccgacaagguguucagauccagcgugcugcacucuacccaggaccuguuccugccuuucuucagcaacgugaccugguuccacgccauccacguguccggcaccaauggcaccaagagauucgacaaccccgugcugcccuucaacgacgggguguacuuugccagcaccgagaaguccaacaucaucagaggcuggaucuucggcaccacacuggacagcaagacccagagccugcugaucgugaacaacgccaccaacguggucaucaaagugugcgaguuccaguucugcaacgaccccuuccugggcgucuacuaccacaagaacaacaagagcuggauggaaagcgaguuccggguguacagcagcgccaacaacugcaccuucgaguacgugucccagccuuuccugauggaccuggaaggcaagcagggcaacuucaagaaccugcgcgaguucguguucaagaacaucgacggcuacuucaaaaucuacagcaagcacaccccuaucaaccucgugcgggaucugccucagggcuucucugcucuggaaccccugguggaucugcccaucggcaucaacaucacccgguuucagacacugcuggcccugcacagaagcuaccugacaccuggcgauagcagcagcggauggacagcuggugccgccgcuuacuaugugggcuaccugcagccuagaaccuuccugcugaaguacaacgagaacggcaccaucaccgacgccguggauugugcucuggauccucugagcgagacaaagugcacccugaaguccuucaccguggaaaagggcaucuaccagaccagcaacuuccgggugcagcccaccgaauccaucgugcgguuccccaauaucaccaaucugugccccuucggcgagguguucaaugccaccagauucgccucuguguacgccuggaaccggaagcggaucagcaauugcguggccgacuacuccgugcuguacaacuccgccagcuucagcaccuucaagugcuacggcguguccccuaccaagcugaacgaccugugcuucacaaacguguacgccgacagcuucgugauccggggagaugaagugcggcagauugccccuggacagacaggcaagaucgccgacuacaacuacaagcugcccgacgacuucaccggcugugugauugccuggaacagcaacaaccuggacuccaaagucggcggcaacuacaauuaccuguaccggcuguuccggaaguccaaucugaagcccuucgagcgggacaucagcaccgaaaucuaucaggccggcagcaccccuugcaacggcguggaaggcuucaacugcuacuucccacugcaguccuacggcuuucagcccacaaauggcgugggcuaucagcccuacagagugguggugcugagcuucgaacugcugcaugcuccugccacagugugcggcccuaagaaaagcaccaaucucgugaagaacaaaugcgugaacuucaacuucaacggccugaccggcaccggcgugcugacagagagcaacaagaaguuccugccauuccagcaguuuggccgggauaucgccgauaccacagacgccguuagagauccccagacacuggaaauccuggacaucaccccaugcagcuucggcggagugucugugaucaccccuggcaccaacaccagcaaucagguggcagugcuguaccaggacgugaacuguaccgaagugcccguggccauucacgccgaucagcugacaccuacauggcggguguacuccaccggcagcaauguguuucagaccagagccggcugucugaucggagccgagcacgugaacaauagcuacgagugcgacauccccaucggcgcuggcaucugugccagcuaccagacacagacaaacagccccagacgggcuagaagcguggccagccagagcaucauugccuacacaaugucucugggcgccgagaacagcguggccuacuccaacaacucuaucgcuauccccaccaacuucaccaucagcgugaccaccgagauccugccuguguccaugaccaagaccagcguggacugcaccauguacaucugcggcgauuccaccgagugcuccaaccugcugcugcaguacggcagcuucugcacccagcugaauagagcccugacagggaucgccguggaacaggacaagaacacccaagagguguucgcccaagugaagcaaaucuacaagaccccuccuaucaaggacuucggcggcuucaauuucagccagauucugcccgauccuagcaagcccagcaagcggagcuucaucgaggaccugcuguucaacaaagugacacuggccgacgccggcuucaucaagcaguauggcgauugucugggcgacauugccgccagggaucugauuugcgcccagaaguuuaacggacugacagugcugccuccucugcugaccgaugagaugaucgcccaguacacaucugcccugcuggccggcacaaucacaagcggcuggacauuuggagcuggcgccgcucugcagauccccuuugcuaugcagauggccuaccgguucaacggcaucggagugacccagaaugugcuguacgagaaccagaagcugaucgccaaccaguucaacagcgccaucggcaagauccaggacagccugagcagcacagcaagcgcccugggaaagcugcaggacguggucaaccagaaugcccaggcacugaacacccuggucaagcagcuguccuccaacuucggcgccaucagcucugugcugaacgauauccugagcagacuggacccuccugaggccgaggugcagaucgacagacugaucacaggcagacugcagagccuccagacauacgugacccagcagcugaucagagccgccgagauuagagccucugccaaucuggccgccaccaagaugucugagugugugcugggccagagcaagagaguggacuuuugcggcaagggcuaccagcugaugagcuucccucagucugccccucacggcgugguguuucugaacgugacauaugugcccgcucaagagaagaauuucaccaccgcuccagccaucugcaacgacggcaaagcccacuuuccuagagaaggcguguucguguccaacggcaccaacugguucgugacacagcggaacuucuacgagccccagaucaucaccaccgacaacaccuucgugucuggcaacugcgacguugugaucggcauugugaacaauaccguguacgacccucugcagcccgagcuggacagcggaggcggaggaucugacaucaucaagcugcugaacgagcaagugaacaaagagaugcagagcagcaaccuguacaugagcaugagcagcuggugcuacacccacagccuugauggcgccggacuguuccuguuugaucacgccgccgaggaauacgagcacgccaagaagcugaucaucuuccugaacgagaacaacgugcccgugcagcugaccagcauuucugccccugagcacaaguucgagggccugacacagaucuuccagaaggccuacgaacacgagcagcacaucagcgagagcaucaacaacaucguggaccacgccauuaagagcaaggaucacgccaccuucaacuuucugcagugguacguggccgaacagcacgaggaagaggugcuguucaaggacauccuggacaagaucgagcugaucggcaacgagaaccacggccuguaucuggccgaccaguacgugaagggaaucgccaagagcagaaagagcuga

SEQ ID NO: 12164 - RNA, 3948 nt, Artificial Sequence
  SARS-CoV-2/Wuhan/WIV05/2019__EPI_ISL_402128 spike protein CDS gc mod (1-1147)(I712C_T1077C) Ferritin construct
auguucguguuucuggugcugcugccccugguguccagccagugugugaaccugaccaccagaacacagcugccuccagccuacaccaacagcuucaccagaggcguguacuaccccgacaagguguucagauccagcgugcugcacucuacccaggaccuguuccugccuuucuucagcaacgugaccugguuccacgccauccacguguccggcaccaauggcaccaagagauucgacaaccccgugcugcccuucaacgacgggguguacuuugccagcaccgagaaguccaacaucaucagaggcuggaucuucggcaccacacuggacagcaagacccagagccugcugaucgugaacaacgccaccaacguggucaucaaagugugcgaguuccaguucugcaacgaccccuuccugggcgucuacuaccacaagaacaacaagagcuggauggaaagcgaguuccggguguacagcagcgccaacaacugcaccuucgaguacgugucccagccuuuccugauggaccuggaaggcaagcagggcaacuucaagaaccugcgcgaguucguguucaagaacaucgacggcuacuucaaaaucuacagcaagcacaccccuaucaaccucgugcgggaucugccucagggcuucucugcucuggaaccccugguggaucugcccaucggcaucaacaucacccgguuucagacacugcuggcccugcacagaagcuaccugacaccuggcgauagcagcagcggauggacagcuggugccgccgcuuacuaugugggcuaccugcagccuagaaccuuccugcugaaguacaacgagaacggcaccaucaccgacgccguggauugugcucuggauccucugagcgagacaaagugcacccugaaguccuucaccguggaaaagggcaucuaccagaccagcaacuuccgggugcagcccaccgaauccaucgugcgguuccccaauaucaccaaucugugccccuucggcgagguguucaaugccaccagauucgccucuguguacgccuggaaccggaagcggaucagcaauugcguggccgacuacuccgugcuguacaacuccgccagcuucagcaccuucaagugcuacggcguguccccuaccaagcugaacgaccugugcuucacaaacguguacgccgacagcuucgugauccggggagaugaagugcggcagauugccccuggacagacaggcaagaucgccgacuacaacuacaagcugcccgacgacuucaccggcugugugauugccuggaacagcaacaaccuggacuccaaagucggcggcaacuacaauuaccuguaccggcuguuccggaaguccaaucugaagcccuucgagcgggacaucagcaccgaaaucuaucaggccggcagcaccccuugcaacggcguggaaggcuucaacugcuacuucccacugcaguccuacggcuuucagcccacaaauggcgugggcuaucagcccuacagagugguggugcugagcuucgaacugcugcaugcuccugccacagugugcggcccuaagaaaagcaccaaucucgugaagaacaaaugcgugaacuucaacuucaacggccugaccggcaccggcgugcugacagagagcaacaagaaguuccugccauuccagcaguuuggccgggauaucgccgauaccacagacgccguuagagauccccagacacuggaaauccuggacaucaccccaugcagcuucggcggagugucugugaucaccccuggcaccaacaccagcaaucagguggcagugcuguaccaggacgugaacuguaccgaagugcccguggccauucacgccgaucagcugacaccuacauggcggguguacuccaccggcagcaauguguuucagaccagagccggcugucugaucggagccgagcacgugaacaauagcuacgagugcgacauccccaucggcgcuggcaucugugccagcuaccagacacagacaaacagccccagacgggcuagaagcguggccagccagagcaucauugccuacacaaugucucugggcgccgagaacagcguggccuacuccaacaacucuugcgcuauccccaccaacuucaccaucagcgugaccaccgagauccugccuguguccaugaccaagaccagcguggacugcaccauguacaucugcggcgauuccaccgagugcuccaaccugcugcugcaguacggcagcuucugcacccagcugaauagagcccugacagggaucgccguggaacaggacaagaacacccaagagguguucgcccaagugaagcaaaucuacaagaccccuccuaucaaggacuucggcggcuucaauuucagccagauucugcccgauccuagcaagcccagcaagcggagcuucaucgaggaccugcuguucaacaaagugacacuggccgacgccggcuucaucaagcaguauggcgauugucugggcgacauugccgccagggaucugauuugcgcccagaaguuuaacggacugacagugcugccuccucugcugaccgaugagaugaucgcccaguacacaucugcccugcuggccggcacaaucacaagcggcuggacauuuggagcuggcgccgcucugcagauccccuuugcuaugcagauggccuaccgguucaacggcaucggagugacccagaaugugcuguacgagaaccagaagcugaucgccaaccaguucaacagcgccaucggcaagauccaggacagccugagcagcacagcaagcgcccugggaaagcugcaggacguggucaaccagaaugcccaggcacugaacacccuggucaagcagcuguccuccaacuucggcgccaucagcucugugcugaacgauauccugagcagacuggacaaggucgaggccgaggugcagaucgacagacugaucacaggcagacugcagagccuccagacauacgugacccagcagcugaucagagccgccgagauuagagccucugccaaucuggccgccaccaagaugucugagugugugcugggccagagcaagagaguggacuuuugcggcaagggcuaccaccugaugagcuucccucagucugccccucacggcgugguguuucugcacgugacauaugugcccgcucaagagaagaauuucaccugugcuccagccaucugccacgacggcaaagcccacuuuccuagagaaggcguguucguguccaacggcacccauugguucgugacacagcggaacuucuacgagccccagaucaucaccaccgacaacaccuucgugucuggcaacugcgacguugugaucggcauugugaacaauaccguguacgacccucugcagcccgagcuggacagcggaggcggaggaucugacaucaucaagcugcugaacgagcaagugaacaaagagaugcagagcagcaaccuguacaugagcaugagcagcuggugcuacacccacagccuugauggcgccggacuguuccuguuugaucacgccgccgaggaauacgagcacgccaagaagcugaucaucuuccugaacgagaacaacgugcccgugcagcugaccagcauuucugccccugagcacaaguucgagggccugacacagaucuuccagaaggccuacgaacacgagcagcacaucagcgagagcaucaacaacaucguggaccacgccauuaagagcaaggaucacgccaccuucaacuuucugcagugguacguggccgaacagcacgaggaagaggugcuguucaaggacauccuggacaagaucgagcugaucggcaacgagaaccacggccuguaucuggccgaccaguacgugaagggaaucgccaagagcagaaagagcuga

SEQ ID NO: 12165 - RNA, 3948 nt, Artificial Sequence
  SARS-CoV-2/Wuhan/WIV05/2019__EPI_ISL_402128 spike protein CDS gc mod (1-1147)(I714C_Y1110C) Ferritin construct
auguucguguuucuggugcugcugccccugguguccagccagugugugaaccugaccaccagaacacagcugccuccagccuacaccaacagcuucaccagaggcguguacuaccccgacaagguguucagauccagcgugcugcacucuacccaggaccuguuccugccuuucuucagcaacgugaccugguuccacgccauccacguguccggcaccaauggcaccaagagauucgacaaccccgugcugcccuucaacgacgggguguacuuugccagcaccgagaaguccaacaucaucagaggcuggaucuucggcaccacacuggacagcaagacccagagccugcugaucgugaacaacgccaccaacguggucaucaaagugugcgaguuccaguucugcaacgaccccuuccugggcgucuacuaccacaagaacaacaagagcuggauggaaagcgaguuccggguguacagcagcgccaacaacugcaccuucgaguacgugucccagccuuuccugauggaccuggaaggcaagcagggcaacuucaagaaccugcgcgaguucguguucaagaacaucgacggcuacuucaaaaucuacagcaagcacaccccuaucaaccucgugcgggaucugccucagggcuucucugcucuggaaccccugguggaucugcccaucggcaucaacaucacccgguuucagacacugcuggcccugcacagaagcuaccugacaccuggcgauagcagcagcggauggacagcuggugccgccgcuuacuaugugggcuaccugcagccuagaaccuuccugcugaaguacaacgagaacggcaccaucaccgacgccguggauugugcucuggauccucugagcgagacaaagugcacccugaaguccuucaccguggaaaagggcaucuaccagaccagcaacuuccgggugcagcccaccgaauccaucgugcgguuccccaauaucaccaaucugugccccuucggcgagguguucaaugccaccagauucgccucuguguacgccuggaaccggaagcggaucagcaauugcguggccgacuacuccgugcuguacaacuccgccagcuucagcaccuucaagugcuacggcguguccccuaccaagcugaacgaccugugcuucacaaacguguacgccgacagcuucgugauccggggagaugaagugcggcagauugccccuggacagacaggcaagaucgccgacuacaacuacaagcugcccgacgacuucaccggcugugugauugccuggaacagcaacaaccuggacuccaaagucggcggcaacuacaauuaccuguaccggcuguuccggaaguccaaucugaagcccuucgagcgggacaucagcaccgaaaucuaucaggccggcagcaccccuugcaacggcguggaaggcuucaacugcuacuucccacugcaguccuacggcuuucagcccacaaauggcgugggcuaucagcccuacagagugguggugcugagcuucgaacugcugcaugcuccugccacagugugcggcccuaagaaaagcaccaaucucgugaagaacaaaugcgugaacuucaacuucaacggccugaccggcaccggcgugcugacagagagcaacaagaaguuccugccauuccagcaguuuggccgggauaucgccgauaccacagacgccguuagagauccccagacacuggaaauccuggacaucaccccaugcagcuucggcggagugucugugaucaccccuggcaccaacaccagcaaucagguggcagugcuguaccaggacgugaacuguaccgaagugcccguggccauucacgccgaucagcugacaccuacauggcggguguacuccaccggcagcaauguguuucagaccagagccggcugucugaucggagccgagcacgugaacaauagcuacgagugcgacauccccaucggcgcuggcaucugugccagcuaccagacacagacaaacagccccagacgggcuagaagcguggccagccagagcaucauugccuacacaaugucucugggcgccgagaacagcguggccuacuccaacaacucuaucgcuugccccaccaacuucaccaucagcgugaccaccgagauccugccuguguccaugaccaagaccagcguggacugcaccauguacaucugcggcgauuccaccgagugcuccaaccugcugcugcaguacggcagcuucugcacccagcugaauagagcccugacagggaucgccguggaacaggacaagaacacccaagagguguucgcccaagugaagcaaaucuacaagaccccuccuaucaaggacuucggcggcuucaauuucagccagauucugcccgauccuagcaagcccagcaagcggagcuucaucgaggaccugcuguucaacaaagugacacuggccgacgccggcuucaucaagcaguauggcgauugucugggcgacauugccgccagggaucugauuugcgcccagaaguuuaacggacugacagugcugccuccucugcugaccgaugagaugaucgcccaguacacaucugcccugcuggccggcacaaucacaagcggcuggacauuuggagcuggcgccgcucugcagauccccuuugcuaugcagauggccuaccgguucaacggcaucggagugacccagaaugugcuguacgagaaccagaagcugaucgccaaccaguucaacagcgccaucggcaagauccaggacagccugagcagcacagcaagcgcccugggaaagcugcaggacguggucaaccagaaugcccaggcacugaacacccuggucaagcagcuguccuccaacuucggcgccaucagcucugugcugaacgauauccugagcagacuggacaaggucgaggccgaggugcagaucgacagacugaucacaggcagacugcagagccuccagacauacgugacccagcagcugaucagagccgccgagauuagagccucugccaaucuggccgccaccaagaugucugagugugugcugggccagagcaagagaguggacuuuugcggcaagggcuaccaccugaugagcuucccucagucugccccucacggcgugguguuucugcacgugacauaugugcccgcucaagagaagaauuucaccaccgcuccagccaucugccacgacggcaaagcccacuuuccuagagaaggcguguucguguccaacggcacccauugguucgugacacagcggaacuucugugagccccagaucaucaccaccgacaacaccuucgugucuggcaacugcgacguugugaucggcauugugaacaauaccguguacgacccucugcagcccgagcuggacagcggaggcggaggaucugacaucaucaagcugcugaacgagcaagugaacaaagagaugcagagcagcaaccuguacaugagcaugagcagcuggugcuacacccacagccuugauggcgccggacuguuccuguuugaucacgccgccgaggaauacgagcacgccaagaagcugaucaucuuccugaacgagaacaacgugcccgugcagcugaccagcauuucugccccugagcacaaguucgagggccugacacagaucuuccagaaggccuacgaacacgagcagcacaucagcgagagcaucaacaacaucguggaccacgccauuaagagcaaggaucacgccaccuucaacuuucugcagugguacguggccgaacagcacgaggaagaggugcuguucaaggacauccuggacaagaucgagcugaucggcaacgagaaccacggccuguaucuggccgaccaguacgugaagggaaucgccaagagcagaaagagcuga

SEQ ID NO: 12166 - RNA, 3948 nt, Artificial Sequence
  SARS-CoV-2/Wuhan/WIV05/2019__EPI_ISL_402128 spike protein CDS gc mod (1-1147)(P715C_P1069C) Ferritin construct
auguucguguuucuggugcugcugccccugguguccagccagugugugaaccugaccaccagaacacagcugccuccagccuacaccaacagcuucaccagaggcguguacuaccccgacaagguguucagauccagcgugcugcacucuacccaggaccuguuccugccuuucuucagcaacgugaccugguuccacgccauccacguguccggcaccaauggcaccaagagauucgacaaccccgugcugcccuucaacgacgggguguacuuugccagcaccgagaaguccaacaucaucagaggcuggaucuucggcaccacacuggacagcaagacccagagccugcugaucgugaacaacgccaccaacguggucaucaaagugugcgaguuccaguucugcaacgaccccuuccugggcgucuacuaccacaagaacaacaagagcuggauggaaagcgaguuccggguguacagcagcgccaacaacugcaccuucgaguacgugucccagccuuuccugauggaccuggaaggcaagcagggcaacuucaagaaccugcgcgaguucguguucaagaacaucgacggcuacuucaaaaucuacagcaagcacaccccuaucaaccucgugcgggaucugccucagggcuucucugcucuggaaccccugguggaucugcccaucggcaucaacaucacccgguuucagacacugcuggcccugcacagaagcuaccugacaccuggcgauagcagcagcggauggacagcuggugccgccgcuuacuaugugggcuaccugcagccuagaaccuuccugcugaaguacaacgagaacggcaccaucaccgacgccguggauugugcucuggauccucugagcgagacaaagugcacccugaaguccuucaccguggaaaagggcaucuaccagaccagcaacuuccgggugcagcccaccgaauccaucgugcgguuccccaauaucaccaaucugugccccuucggcgagguguucaaugccaccagauucgccucuguguacgccuggaaccggaagcggaucagcaauugcguggccgacuacuccgugcuguacaacuccgccagcuucagcaccuucaagugcuacggcguguccccuaccaagcugaacgaccugugcuucacaaacguguacgccgacagcuucgugauccggggagaugaagugcggcagauugccccuggacagacaggcaagaucgccgacuacaacuacaagcugcccgacgacuucaccggcugugugauugccuggaacagcaacaaccuggacuccaaagucggcggcaacuacaauuaccuguaccggcuguuccggaaguccaaucugaagcccuucgagcgggacaucagcaccgaaaucuaucaggccggcagcaccccuugcaacggcguggaaggcuucaacugcuacuucccacugcaguccuacggcuuucagcccacaaauggcgugggcuaucagcccuacagagugguggugcugagcuucgaacugcugcaugcuccugccacagugugcggcccuaagaaaagcaccaaucucgugaagaacaaaugcgugaacuucaacuucaacggccugaccggcaccggcgugcugacagagagcaacaagaaguuccugccauuccagcaguuuggccgggauaucgccgauaccacagacgccguuagagauccccagacacuggaaauccuggacaucaccccaugcagcuucggcggagugucugugaucaccccuggcaccaacaccagcaaucagguggcagugcuguaccaggacgugaacuguaccgaagugcccguggccauucacgccgaucagcugacaccuacauggcggguguacuccaccggcagcaauguguuucagaccagagccggcugucugaucggagccgagcacgugaacaauagcuacgagugcgacauccccaucggcgcuggcaucugugccagcuaccagacacagacaaacagccccagacgggcuagaagcguggccagccagagcaucauugccuacacaaugucucugggcgccgagaacagcguggccuacuccaacaacucuaucgcuaucugcaccaacuucaccaucagcgugaccaccgagauccugccuguguccaugaccaagaccagcguggacugcaccauguacaucugcggcgauuccaccgagugcuccaaccugcugcugcaguacggcagcuucugcacccagcugaauagagcccugacagggaucgccguggaacaggacaagaacacccaagagguguucgcccaagugaagcaaaucuacaagaccccuccuaucaaggacuucggcggcuucaauuucagccagauucugcccgauccuagcaagcccagcaagcggagcuucaucgaggaccugcuguucaacaaagugacacuggccgacgccggcuucaucaagcaguauggcgauugucugggcgacauugccgccagggaucugauuugcgcccagaaguuuaacggacugacagugcugccuccucugcugaccgaugagaugaucgcccaguacacaucugcccugcuggccggcacaaucacaagcggcuggacauuuggagcuggcgccgcucugcagauccccuuugcuaugcagauggccuaccgguucaacggcaucggagugacccagaaugugcuguacgagaaccagaagcugaucgccaaccaguucaacagcgccaucggcaagauccaggacagccugagcagcacagcaagcgcccugggaaagcugcaggacguggucaaccagaaugcccaggcacugaacacccuggucaagcagcuguccuccaacuucggcgccaucagcucugugcugaacgauauccugagcagacuggacaaggucgaggccgaggugcagaucgacagacugaucacaggcagacugcagagccuccagacauacgugacccagcagcugaucagagccgccgagauuagagccucugccaaucuggccgccaccaagaugucugagugugugcugggccagagcaagagaguggacuuuugcggcaagggcuaccaccugaugagcuucccucagucugccccucacggcgugguguuucugcacgugacauaugugugugcucaagagaagaauuucaccaccgcuccagccaucugccacgacggcaaagcccacuuuccuagagaaggcguguucguguccaacggcacccauugguucgugacacagcggaacuucuacgagccccagaucaucaccaccgacaacaccuucgugucuggcaacugcgacguugugaucggcauugugaacaauaccguguacgacccucugcagcccgagcuggacagcggaggcggaggaucugacaucaucaagcugcugaacgagcaagugaacaaagagaugcagagcagcaaccuguacaugagcaugagcagcuggugcuacacccacagccuugauggcgccggacuguuccuguuugaucacgccgccgaggaauacgagcacgccaagaagcugaucaucuuccugaacgagaacaacgugcccgugcagcugaccagcauuucugccccugagcacaaguucgagggccugacacagaucuuccagaaggccuacgaacacgagcagcacaucagcgagagcaucaacaacaucguggaccacgccauuaagagcaaggaucacgccaccuucaacuuucugcagugguacguggccgaacagcacgaggaagaggugcuguucaaggacauccuggacaagaucgagcugaucggcaacgagaaccacggccuguaucuggccgaccaguacgugaagggaaucgccaagagcagaaagagcuga

SEQ ID NO: 12167 - RNA, 3948 nt, Artificial Sequence
  SARS-CoV-2/Wuhan/WIV05/2019__EPI_ISL_402128 spike protein CDS gc mod (1-1147)(G889C_L1034C) Ferritin construct
auguucguguuucuggugcugcugccccugguguccagccagugugugaaccugaccaccagaacacagcugccuccagccuacaccaacagcuucaccagaggcguguacuaccccgacaagguguucagauccagcgugcugcacucuacccaggaccuguuccugccuuucuucagcaacgugaccugguuccacgccauccacguguccggcaccaauggcaccaagagauucgacaaccccgugcugcccuucaacgacgggguguacuuugccagcaccgagaaguccaacaucaucagaggcuggaucuucggcaccacacuggacagcaagacccagagccugcugaucgugaacaacgccaccaacguggucaucaaagugugcgaguuccaguucugcaacgaccccuuccugggcgucuacuaccacaagaacaacaagagcuggauggaaagcgaguuccggguguacagcagcgccaacaacugcaccuucgaguacgugucccagccuuuccugauggaccuggaaggcaagcagggcaacuucaagaaccugcgcgaguucguguucaagaacaucgacggcuacuucaaaaucuacagcaagcacaccccuaucaaccucgugcgggaucugccucagggcuucucugcucuggaaccccugguggaucugcccaucggcaucaacaucacccgguuucagacacugcuggcccugcacagaagcuaccugacaccuggcgauagcagcagcggauggacagcuggugccgccgcuuacuaugugggcuaccugcagccuagaaccuuccugcugaaguacaacgagaacggcaccaucaccgacgccguggauugugcucuggauccucugagcgagacaaagugcacccugaaguccuucaccguggaaaagggcaucuaccagaccagcaacuuccgggugcagcccaccgaauccaucgugcgguuccccaauaucaccaaucugugccccuucggcgagguguucaaugccaccagauucgccucuguguacgccuggaaccggaagcggaucagcaauugcguggccgacuacuccgugcuguacaacuccgccagcuucagcaccuucaagugcuacggcguguccccuaccaagcugaacgaccugugcuucacaaacguguacgccgacagcuucgugauccggggagaugaagugcggcagauugccccuggacagacaggcaagaucgccgacuacaacuacaagcugcccgacgacuucaccggcugugugauugccuggaacagcaacaaccuggacuccaaagucggcggcaacuacaauuaccuguaccggcuguuccggaaguccaaucugaagcccuucgagcgggacaucagcaccgaaaucuaucaggccggcagcaccccuugcaacggcguggaaggcuucaacugcuacuucccacugcaguccuacggcuuucagcccacaaauggcgugggcuaucagcccuacagagugguggugcugagcuucgaacugcugcaugcuccugccacagugugcggcccuaagaaaagcaccaaucucgugaagaacaaaugcgugaacuucaacuucaacggccugaccggcaccggcgugcugacagagagcaacaagaaguuccugccauuccagcaguuuggccgggauaucgccgauaccacagacgccguuagagauccccagacacuggaaauccuggacaucaccccaugcagcuucggcggagugucugugaucaccccuggcaccaacaccagcaaucagguggcagugcuguaccaggacgugaacuguaccgaagugcccguggccauucacgccgaucagcugacaccuacauggcggguguacuccaccggcagcaauguguuucagaccagagccggcugucugaucggagccgagcacgugaacaauagcuacgagugcgacauccccaucggcgcuggcaucugugccagcuaccagacacagacaaacagccccagacgggcuagaagcguggccagccagagcaucauugccuacacaaugucucugggcgccgagaacagcguggccuacuccaacaacucuaucgcuauccccaccaacuucaccaucagcgugaccaccgagauccugccuguguccaugaccaagaccagcguggacugcaccauguacaucugcggcgauuccaccgagugcuccaaccugcugcugcaguacggcagcuucugcacccagcugaauagagcccugacagggaucgccguggaacaggacaagaacacccaagagguguucgcccaagugaagcaaaucuacaagaccccuccuaucaaggacuucggcggcuucaauuucagccagauucugcccgauccuagcaagcccagcaagcggagcuucaucgaggaccugcuguucaacaaagugacacuggccgacgccggcuucaucaagcaguauggcgauugucugggcgacauugccgccagggaucugauuugcgcccagaaguuuaacggacugacagugcugccuccucugcugaccgaugagaugaucgcccaguacacaucugcccugcuggccggcacaaucacaagcggcuggacauuuugcgcuggcgccgcucugcagauccccuuugcuaugcagauggccuaccgguucaacggcaucggagugacccagaaugugcuguacgagaaccagaagcugaucgccaaccaguucaacagcgccaucggcaagauccaggacagccugagcagcacagcaagcgcccugggaaagcugcaggacguggucaaccagaaugcccaggcacugaacacccuggucaagcagcuguccuccaacuucggcgccaucagcucugugcugaacgauauccugagcagacuggacaaggucgaggccgaggugcagaucgacagacugaucacaggcagacugcagagccuccagacauacgugacccagcagcugaucagagccgccgagauuagagccucugccaaucuggccgccaccaagaugucugaguguguguguggccagagcaagagaguggacuuuugcggcaagggcuaccaccugaugagcuucccucagucugccccucacggcgugguguuucugcacgugacauaugugcccgcucaagagaagaauuucaccaccgcuccagccaucugccacgacggcaaagcccacuuuccuagagaaggcguguucguguccaacggcacccauugguucgugacacagcggaacuucuacgagccccagaucaucaccaccgacaacaccuucgugucuggcaacugcgacguugugaucggcauugugaacaauaccguguacgacccucugcagcccgagcuggacagcggaggcggaggaucugacaucaucaagcugcugaacgagcaagugaacaaagagaugcagagcagcaaccuguacaugagcaugagcagcuggugcuacacccacagccuugauggcgccggacuguuccuguuugaucacgccgccgaggaauacgagcacgccaagaagcugaucaucuuccugaacgagaacaacgugcccgugcagcugaccagcauuucugccccugagcacaaguucgagggccugacacagaucuuccagaaggccuacgaacacgagcagcacaucagcgagagcaucaacaacaucguggaccacgccauuaagagcaaggaucacgccaccuucaacuuucugcagugguacguggccgaacagcacgaggaagaggugcuguucaaggacauccuggacaagaucgagcugaucggcaacgagaaccacggccuguaucuggccgaccaguacgugaagggaaucgccaagagcagaaagagcuga

SEQ ID NO: 12168 - RNA, 3948 nt, Artificial Sequence
  SARS-CoV-2/Wuhan/WIV05/2019__EPI_ISL_402128 spike protein CDS gc mod (1-1147)(I909C_Y1047C) Ferritin construct
auguucguguuucuggugcugcugccccugguguccagccagugugugaaccugaccaccagaacacagcugccuccagccuacaccaacagcuucaccagaggcguguacuaccccgacaagguguucagauccagcgugcugcacucuacccaggaccuguuccugccuuucuucagcaacgugaccugguuccacgccauccacguguccggcaccaauggcaccaagagauucgacaaccccgugcugcccuucaacgacgggguguacuuugccagcaccgagaaguccaacaucaucagaggcuggaucuucggcaccacacuggacagcaagacccagagccugcugaucgugaacaacgccaccaacguggucaucaaagugugcgaguuccaguucugcaacgaccccuuccugggcgucuacuaccacaagaacaacaagagcuggauggaaagcgaguuccggguguacagcagcgccaacaacugcaccuucgaguacgugucccagccuuuccugauggaccuggaaggcaagcagggcaacuucaagaaccugcgcgaguucguguucaagaacaucgacggcuacuucaaaaucuacagcaagcacaccccuaucaaccucgugcgggaucugccucagggcuucucugcucuggaaccccugguggaucugcccaucggcaucaacaucacccgguuucagacacugcuggcccugcacagaagcuaccugacaccuggcgauagcagcagcggauggacagcuggugccgccgcuuacuaugugggcuaccugcagccuagaaccuuccugcugaaguacaacgagaacggcaccaucaccgacgccguggauugugcucuggauccucugagcgagacaaagugcacccugaaguccuucaccguggaaaagggcaucuaccagaccagcaacuuccgggugcagcccaccgaauccaucgugcgguuccccaauaucaccaaucugugccccuucggcgagguguucaaugccaccagauucgccucuguguacgccuggaaccggaagcggaucagcaauugcguggccgacuacuccgugcuguacaacuccgccagcuucagcaccuucaagugcuacggcguguccccuaccaagcugaacgaccugugcuucacaaacguguacgccgacagcuucgugauccggggagaugaagugcggcagauugccccuggacagacaggcaagaucgccgacuacaacuacaagcugcccgacgacuucaccggcugugugauugccuggaacagcaacaaccuggacuccaaagucggcggcaacuacaauuaccuguaccggcuguuccggaaguccaaucugaagcccuucgagcgggacaucagcaccgaaaucuaucaggccggcagcaccccuugcaacggcguggaaggcuucaacugcuacuucccacugcaguccuacggcuuucagcccacaaauggcgugggcuaucagcccuacagagugguggugcugagcuucgaacugcugcaugcuccugccacagugugcggcccuaagaaaagcaccaaucucgugaagaacaaaugcgugaacuucaacuucaacggccugaccggcaccggcgugcugacagagagcaacaagaaguuccugccauuccagcaguuuggccgggauaucgccgauaccacagacgccguuagagauccccagacacuggaaauccuggacaucaccccaugcagcuucggcggagugucugugaucaccccuggcaccaacaccagcaaucagguggcagugcuguaccaggacgugaacuguaccgaagugcccguggccauucacgccgaucagcugacaccuacauggcggguguacuccaccggcagcaauguguuucagaccagagccggcugucugaucggagccgagcacgugaacaauagcuacgagugcgacauccccaucggcgcuggcaucugugccagcuaccagacacagacaaacagccccagacgggcuagaagcguggccagccagagcaucauugccuacacaaugucucugggcgccgagaacagcguggccuacuccaacaacucuaucgcuauccccaccaacuucaccaucagcgugaccaccgagauccugccuguguccaugaccaagaccagcguggacugcaccauguacaucugcggcgauuccaccgagugcuccaaccugcugcugcaguacggcagcuucugcacccagcugaauagagcccugacagggaucgccguggaacaggacaagaacacccaagagguguucgcccaagugaagcaaaucuacaagaccccuccuaucaaggacuucggcggcuucaauuucagccagauucugcccgauccuagcaagcccagcaagcggagcuucaucgaggaccugcuguucaacaaagugacacuggccgacgccggcuucaucaagcaguauggcgauugucugggcgacauugccgccagggaucugauuugcgcccagaaguuuaacggacugacagugcugccuccucugcugaccgaugagaugaucgcccaguacacaucugcccugcuggccggcacaaucacaagcggcuggacauuuggagcuggcgccgcucugcagauccccuuugcuaugcagauggccuaccgguucaacggcugcggagugacccagaaugugcuguacgagaaccagaagcugaucgccaaccaguucaacagcgccaucggcaagauccaggacagccugagcagcacagcaagcgcccugggaaagcugcaggacguggucaaccagaaugcccaggcacugaacacccuggucaagcagcuguccuccaacuucggcgccaucagcucugugcugaacgauauccugagcagacuggacaaggucgaggccgaggugcagaucgacagacugaucacaggcagacugcagagccuccagacauacgugacccagcagcugaucagagccgccgagauuagagccucugccaaucuggccgccaccaagaugucugagugugugcugggccagagcaagagaguggacuuuugcggcaagggcugucaccugaugagcuucccucagucugccccucacggcgugguguuucugcacgugacauaugugcccgcucaagagaagaauuucaccaccgcuccagccaucugccacgacggcaaagcccacuuuccuagagaaggcguguucguguccaacggcacccauugguucgugacacagcggaacuucuacgagccccagaucaucaccaccgacaacaccuucgugucuggcaacugcgacguugugaucggcauugugaacaauaccguguacgacccucugcagcccgagcuggacagcggaggcggaggaucugacaucaucaagcugcugaacgagcaagugaacaaagagaugcagagcagcaaccuguacaugagcaugagcagcuggugcuacacccacagccuugauggcgccggacuguuccuguuugaucacgccgccgaggaauacgagcacgccaagaagcugaucaucuuccugaacgagaacaacgugcccgugcagcugaccagcauuucugccccugagcacaaguucgagggccugacacagaucuuccagaaggccuacgaacacgagcagcacaucagcgagagcaucaacaacaucguggaccacgccauuaagagcaaggaucacgccaccuucaacuuucugcagugguacguggccgaacagcacgaggaagaggugcuguucaaggacauccuggacaagaucgagcugaucggcaacgagaaccacggccuguaucuggccgaccaguacgugaagggaaucgccaagagcagaaagagcuga

SEQ ID NO: 12169 - RNA, 3948 nt, Artificial Sequence
  SARS-CoV-2/Wuhan/WIV05/2019__EPI_ISL_402128 spike protein CDS gc mod (1-1147)(Q965C_S1003C) Ferritin construct
auguucguguuucuggugcugcugccccugguguccagccagugugugaaccugaccaccagaacacagcugccuccagccuacaccaacagcuucaccagaggcguguacuaccccgacaagguguucagauccagcgugcugcacucuacccaggaccuguuccugccuuucuucagcaacgugaccugguuccacgccauccacguguccggcaccaauggcaccaagagauucgacaaccccgugcugcccuucaacgacgggguguacuuugccagcaccgagaaguccaacaucaucagaggcuggaucuucggcaccacacuggacagcaagacccagagccugcugaucgugaacaacgccaccaacguggucaucaaagugugcgaguuccaguucugcaacgaccccuuccugggcgucuacuaccacaagaacaacaagagcuggauggaaagcgaguuccggguguacagcagcgccaacaacugcaccuucgaguacgugucccagccuuuccugauggaccuggaaggcaagcagggcaacuucaagaaccugcgcgaguucguguucaagaacaucgacggcuacuucaaaaucuacagcaagcacaccccuaucaaccucgugcgggaucugccucagggcuucucugcucuggaaccccugguggaucugcccaucggcaucaacaucacccgguuucagacacugcuggcccugcacagaagcuaccugacaccuggcgauagcagcagcggauggacagcuggugccgccgcuuacuaugugggcuaccugcagccuagaaccuuccugcugaaguacaacgagaacggcaccaucaccgacgccguggauugugcucuggauccucugagcgagacaaagugcacccugaaguccuucaccguggaaaagggcaucuaccagaccagcaacuuccgggugcagcccaccgaauccaucgugcgguuccccaauaucaccaaucugugccccuucggcgagguguucaaugccaccagauucgccucuguguacgccuggaaccggaagcggaucagcaauugcguggccgacuacuccgugcuguacaacuccgccagcuucagcaccuucaagugcuacggcguguccccuaccaagcugaacgaccugugcuucacaaacguguacgccgacagcuucgugauccggggagaugaagugcggcagauugccccuggacagacaggcaagaucgccgacuacaacuacaagcugcccgacgacuucaccggcugugugauugccuggaacagcaacaaccuggacuccaaagucggcggcaacuacaauuaccuguaccggcuguuccggaaguccaaucugaagcccuucgagcgggacaucagcaccgaaaucuaucaggccggcagcaccccuugcaacggcguggaaggcuucaacugcuacuucccacugcaguccuacggcuuucagcccacaaauggcgugggcuaucagcccuacagagugguggugcugagcuucgaacugcugcaugcuccugccacagugugcggcccuaagaaaagcaccaaucucgugaagaacaaaugcgugaacuucaacuucaacggccugaccggcaccggcgugcugacagagagcaacaagaaguuccugccauuccagcaguuuggccgggauaucgccgauaccacagacgccguuagagauccccagacacuggaaauccuggacaucaccccaugcagcuucggcggagugucugugaucaccccuggcaccaacaccagcaaucagguggcagugcuguaccaggacgugaacuguaccgaagugcccguggccauucacgccgaucagcugacaccuacauggcggguguacuccaccggcagcaauguguuucagaccagagccggcugucugaucggagccgagcacgugaacaauagcuacgagugcgacauccccaucggcgcuggcaucugugccagcuaccagacacagacaaacagccccagacgggcuagaagcguggccagccagagcaucauugccuacacaaugucucugggcgccgagaacagcguggccuacuccaacaacucuaucgcuauccccaccaacuucaccaucagcgugaccaccgagauccugccuguguccaugaccaagaccagcguggacugcaccauguacaucugcggcgauuccaccgagugcuccaaccugcugcugcaguacggcagcuucugcacccagcugaauagagcccugacagggaucgccguggaacaggacaagaacacccaagagguguucgcccaagugaagcaaaucuacaagaccccuccuaucaaggacuucggcggcuucaauuucagccagauucugcccgauccuagcaagcccagcaagcggagcuucaucgaggaccugcuguucaacaaagugacacuggccgacgccggcuucaucaagcaguauggcgauugucugggcgacauugccgccagggaucugauuugcgcccagaaguuuaacggacugacagugcugccuccucugcugaccgaugagaugaucgcccaguacacaucugcccugcuggccggcacaaucacaagcggcuggacauuuggagcuggcgccgcucugcagauccccuuugcuaugcagauggccuaccgguucaacggcaucggagugacccagaaugugcuguacgagaaccagaagcugaucgccaaccaguucaacagcgccaucggcaagauccaggacagccugagcagcacagcaagcgcccugggaaagcugcaggacguggucaaccagaaugcccaggcacugaacacccuggucaagugccuguccuccaacuucggcgccaucagcucugugcugaacgauauccugagcagacuggacaaggucgaggccgaggugcagaucgacagacugaucacaggcagacugcagugucuccagacauacgugacccagcagcugaucagagccgccgagauuagagccucugccaaucuggccgccaccaagaugucugagugugugcugggccagagcaagagaguggacuuuugcggcaagggcuaccaccugaugagcuucccucagucugccccucacggcgugguguuucugcacgugacauaugugcccgcucaagagaagaauuucaccaccgcuccagccaucugccacgacggcaaagcccacuuuccuagagaaggcguguucguguccaacggcacccauugguucgugacacagcggaacuucuacgagccccagaucaucaccaccgacaacaccuucgugucuggcaacugcgacguugugaucggcauugugaacaauaccguguacgacccucugcagcccgagcuggacagcggaggcggaggaucugacaucaucaagcugcugaacgagcaagugaacaaagagaugcagagcagcaaccuguacaugagcaugagcagcuggugcuacacccacagccuugauggcgccggacuguuccuguuugaucacgccgccgaggaauacgagcacgccaagaagcugaucaucuuccugaacgagaacaacgugcccgugcagcugaccagcauuucugccccugagcacaaguucgagggccugacacagaucuuccagaaggccuacgaacacgagcagcacaucagcgagagcaucaacaacaucguggaccacgccauuaagagcaaggaucacgccaccuucaacuuucugcagugguacguggccgaacagcacgaggaagaggugcuguucaaggacauccuggacaagaucgagcugaucggcaacgagaaccacggccuguaucuggccgaccaguacgugaagggaaucgccaagagcagaaagagcuga

SEQ ID NO: 12170 - RNA, 3948 nt, Artificial Sequence
  SARS-CoV-2/Wuhan/WIV05/2019__EPI_ISL_402128 spike protein CDS gc mod (1-1147)(F970C_G999C) Ferritin construct
auguucguguuucuggugcugcugccccugguguccagccagugugugaaccugaccaccagaacacagcugccuccagccuacaccaacagcuucaccagaggcguguacuaccccgacaagguguucagauccagcgugcugcacucuacccaggaccuguuccugccuuucuucagcaacgugaccugguuccacgccauccacguguccggcaccaauggcaccaagagauucgacaaccccgugcugcccuucaacgacgggguguacuuugccagcaccgagaaguccaacaucaucagaggcuggaucuucggcaccacacuggacagcaagacccagagccugcugaucgugaacaacgccaccaacguggucaucaaagugugcgaguuccaguucugcaacgaccccuuccugggcgucuacuaccacaagaacaacaagagcuggauggaaagcgaguuccggguguacagcagcgccaacaacugcaccuucgaguacgugucccagccuuuccugauggaccuggaaggcaagcagggcaacuucaagaaccugcgcgaguucguguucaagaacaucgacggcuacuucaaaaucuacagcaagcacaccccuaucaaccucgugcgggaucugccucagggcuucucugcucuggaaccccugguggaucugcccaucggcaucaacaucacccgguuucagacacugcuggcccugcacagaagcuaccugacaccuggcgauagcagcagcggauggacagcuggugccgccgcuuacuaugugggcuaccugcagccuagaaccuuccugcugaaguacaacgagaacggcaccaucaccgacgccguggauugugcucuggauccucugagcgagacaaagugcacccugaaguccuucaccguggaaaagggcaucuaccagaccagcaacuuccgggugcagcccaccgaauccaucgugcgguuccccaauaucaccaaucugugccccuucggcgagguguucaaugccaccagauucgccucuguguacgccuggaaccggaagcggaucagcaauugcguggccgacuacuccgugcuguacaacuccgccagcuucagcaccuucaagugcuacggcguguccccuaccaagcugaacgaccugugcuucacaaacguguacgccgacagcuucgugauccggggagaugaagugcggcagauugccccuggacagacaggcaagaucgccgacuacaacuacaagcugcccgacgacuucaccggcugugugauugccuggaacagcaacaaccuggacuccaaagucggcggcaacuacaauuaccuguaccggcuguuccggaaguccaaucugaagcccuucgagcgggacaucagcaccgaaaucuaucaggccggcagcaccccuugcaacggcguggaaggcuucaacugcuacuucccacugcaguccuacggcuuucagcccacaaauggcgugggcuaucagcccuacagagugguggugcugagcuucgaacugcugcaugcuccugccacagugugcggcccuaagaaaagcaccaaucucgugaagaacaaaugcgugaacuucaacuucaacggccugaccggcaccggcgugcugacagagagcaacaagaaguuccugccauuccagcaguuuggccgggauaucgccgauaccacagacgccguuagagauccccagacacuggaaauccuggacaucaccccaugcagcuucggcggagugucugugaucaccccuggcaccaacaccagcaaucagguggcagugcuguaccaggacgugaacuguaccgaagugcccguggccauucacgccgaucagcugacaccuacauggcggguguacuccaccggcagcaauguguuucagaccagagccggcugucugaucggagccgagcacgugaacaauagcuacgagugcgacauccccaucggcgcuggcaucugugccagcuaccagacacagacaaacagccccagacgggcuagaagcguggccagccagagcaucauugccuacacaaugucucugggcgccgagaacagcguggccuacuccaacaacucuaucgcuauccccaccaacuucaccaucagcgugaccaccgagauccugccuguguccaugaccaagaccagcguggacugcaccauguacaucugcggcgauuccaccgagugcuccaaccugcugcugcaguacggcagcuucugcacccagcugaauagagcccugacagggaucgccguggaacaggacaagaacacccaagagguguucgcccaagugaagcaaaucuacaagaccccuccuaucaaggacuucggcggcuucaauuucagccagauucugcccgauccuagcaagcccagcaagcggagcuucaucgaggaccugcuguucaacaaagugacacuggccgacgccggcuucaucaagcaguauggcgauugucugggcgacauugccgccagggaucugauuugcgcccagaaguuuaacggacugacagugcugccuccucugcugaccgaugagaugaucgcccaguacacaucugcccugcuggccggcacaaucacaagcggcuggacauuuggagcuggcgccgcucugcagauccccuuugcuaugcagauggccuaccgguucaacggcaucggagugacccagaaugugcuguacgagaaccagaagcugaucgccaaccaguucaacagcgccaucggcaagauccaggacagccugagcagcacagcaagcgcccugggaaagcugcaggacguggucaaccagaaugcccaggcacugaacacccuggucaagcagcuguccuccaacugcggcgccaucagcucugugcugaacgauauccugagcagacuggacaaggucgaggccgaggugcagaucgacagacugaucacauguagacugcagagccuccagacauacgugacccagcagcugaucagagccgccgagauuagagccucugccaaucuggccgccaccaagaugucugagugugugcugggccagagcaagagaguggacuuuugcggcaagggcuaccaccugaugagcuucccucagucugccccucacggcgugguguuucugcacgugacauaugugcccgcucaagagaagaauuucaccaccgcuccagccaucugccacgacggcaaagcccacuuuccuagagaaggcguguucguguccaacggcacccauugguucgugacacagcggaacuucuacgagccccagaucaucaccaccgacaacaccuucgugucuggcaacugcgacguugugaucggcauugugaacaauaccguguacgacccucugcagcccgagcuggacagcggaggcggaggaucugacaucaucaagcugcugaacgagcaagugaacaaagagaugcagagcagcaaccuguacaugagcaugagcagcuggugcuacacccacagccuugauggcgccggacuguuccuguuugaucacgccgccgaggaauacgagcacgccaagaagcugaucaucuuccugaacgagaacaacgugcccgugcagcugaccagcauuucugccccugagcacaaguucgagggccugacacagaucuuccagaaggccuacgaacacgagcagcacaucagcgagagcaucaacaacaucguggaccacgccauuaagagcaaggaucacgccaccuucaacuuucugcagugguacguggccgaacagcacgaggaagaggugcuguucaaggacauccuggacaagaucgagcugaucggcaacgagaaccacggccuguaucuggccgaccaguacgugaagggaaucgccaagagcagaaagagcuga

SEQ ID NO: 12171 - RNA, 3948 nt, Artificial Sequence
  SARS-CoV-2/Wuhan/WIV05/2019__EPI_ISL_402128 spike protein CDS gc mod (1-1147)(A972C_R995C) Ferritin construct
auguucguguuucuggugcugcugccccugguguccagccagugugugaaccugaccaccagaacacagcugccuccagccuacaccaacagcuucaccagaggcguguacuaccccgacaagguguucagauccagcgugcugcacucuacccaggaccuguuccugccuuucuucagcaacgugaccugguuccacgccauccacguguccggcaccaauggcaccaagagauucgacaaccccgugcugcccuucaacgacgggguguacuuugccagcaccgagaaguccaacaucaucagaggcuggaucuucggcaccacacuggacagcaagacccagagccugcugaucgugaacaacgccaccaacguggucaucaaagugugcgaguuccaguucugcaacgaccccuuccugggcgucuacuaccacaagaacaacaagagcuggauggaaagcgaguuccggguguacagcagcgccaacaacugcaccuucgaguacgugucccagccuuuccugauggaccuggaaggcaagcagggcaacuucaagaaccugcgcgaguucguguucaagaacaucgacggcuacuucaaaaucuacagcaagcacaccccuaucaaccucgugcgggaucugccucagggcuucucugcucuggaaccccugguggaucugcccaucggcaucaacaucacccgguuucagacacugcuggcccugcacagaagcuaccugacaccuggcgauagcagcagcggauggacagcuggugccgccgcuuacuaugugggcuaccugcagccuagaaccuuccugcugaaguacaacgagaacggcaccaucaccgacgccguggauugugcucuggauccucugagcgagacaaagugcacccugaaguccuucaccguggaaaagggcaucuaccagaccagcaacuuccgggugcagcccaccgaauccaucgugcgguuccccaauaucaccaaucugugccccuucggcgagguguucaaugccaccagauucgccucuguguacgccuggaaccggaagcggaucagcaauugcguggccgacuacuccgugcuguacaacuccgccagcuucagcaccuucaagugcuacggcguguccccuaccaagcugaacgaccugugcuucacaaacguguacgccgacagcuucgugauccggggagaugaagugcggcagauugccccuggacagacaggcaagaucgccgacuacaacuacaagcugcccgacgacuucaccggcugugugauugccuggaacagcaacaaccuggacuccaaagucggcggcaacuacaauuaccuguaccggcuguuccggaaguccaaucugaagcccuucgagcgggacaucagcaccgaaaucuaucaggccggcagcaccccuugcaacggcguggaaggcuucaacugcuacuucccacugcaguccuacggcuuucagcccacaaauggcgugggcuaucagcccuacagagugguggugcugagcuucgaacugcugcaugcuccugccacagugugcggcccuaagaaaagcaccaaucucgugaagaacaaaugcgugaacuucaacuucaacggccugaccggcaccggcgugcugacagagagcaacaagaaguuccugccauuccagcaguuuggccgggauaucgccgauaccacagacgccguuagagauccccagacacuggaaauccuggacaucaccccaugcagcuucggcggagugucugugaucaccccuggcaccaacaccagcaaucagguggcagugcuguaccaggacgugaacuguaccgaagugcccguggccauucacgccgaucagcugacaccuacauggcggguguacuccaccggcagcaauguguuucagaccagagccggcugucugaucggagccgagcacgugaacaauagcuacgagugcgacauccccaucggcgcuggcaucugugccagcuaccagacacagacaaacagccccagacgggcuagaagcguggccagccagagcaucauugccuacacaaugucucugggcgccgagaacagcguggccuacuccaacaacucuaucgcuauccccaccaacuucaccaucagcgugaccaccgagauccugccuguguccaugaccaagaccagcguggacugcaccauguacaucugcggcgauuccaccgagugcuccaaccugcugcugcaguacggcagcuucugcacccagcugaauagagcccugacagggaucgccguggaacaggacaagaacacccaagagguguucgcccaagugaagcaaaucuacaagaccccuccuaucaaggacuucggcggcuucaauuucagccagauucugcccgauccuagcaagcccagcaagcggagcuucaucgaggaccugcuguucaacaaagugacacuggccgacgccggcuucaucaagcaguauggcgauugucugggcgacauugccgccagggaucugauuugcgcccagaaguuuaacggacugacagugcugccuccucugcugaccgaugagaugaucgcccaguacacaucugcccugcuggccggcacaaucacaagcggcuggacauuuggagcuggcgccgcucugcagauccccuuugcuaugcagauggccuaccgguucaacggcaucggagugacccagaaugugcuguacgagaaccagaagcugaucgccaaccaguucaacagcgccaucggcaagauccaggacagccugagcagcacagcaagcgcccugggaaagcugcaggacguggucaaccagaaugcccaggcacugaacacccuggucaagcagcuguccuccaacuucggcugcaucagcucugugcugaacgauauccugagcagacuggacaaggucgaggccgaggugcagaucgacugucugaucacaggcagacugcagagccuccagacauacgugacccagcagcugaucagagccgccgagauuagagccucugccaaucuggccgccaccaagaugucugagugugugcugggccagagcaagagaguggacuuuugcggcaagggcuaccaccugaugagcuucccucagucugccccucacggcgugguguuucugcacgugacauaugugcccgcucaagagaagaauuucaccaccgcuccagccaucugccacgacggcaaagcccacuuuccuagagaaggcguguucguguccaacggcacccauugguucgugacacagcggaacuucuacgagccccagaucaucaccaccgacaacaccuucgugucuggcaacugcgacguugugaucggcauugugaacaauaccguguacgacccucugcagcccgagcuggacagcggaggcggaggaucugacaucaucaagcugcugaacgagcaagugaacaaagagaugcagagcagcaaccuguacaugagcaugagcagcuggugcuacacccacagccuugauggcgccggacuguuccuguuugaucacgccgccgaggaauacgagcacgccaagaagcugaucaucuuccugaacgagaacaacgugcccgugcagcugaccagcauuucugccccugagcacaaguucgagggccugacacagaucuuccagaaggccuacgaacacgagcagcacaucagcgagagcaucaacaacaucguggaccacgccauuaagagcaaggaucacgccaccuucaacuuucugcagugguacguggccgaacagcacgaggaagaggugcuguucaaggacauccuggacaagaucgagcugaucggcaacgagaaccacggccuguaucuggccgaccaguacgugaagggaaucgccaagagcagaaagagcuga

SEQ ID NO: 12172 - RNA, 3948 nt, Artificial Sequence
  SARS-CoV-2/Wuhan/WIV05/2019__EPI_ISL_402128 spike protein CDS gc mod (1-1147)(A890C_V1040C) Ferritin construct
auguucguguuucuggugcugcugccccugguguccagccagugugugaaccugaccaccagaacacagcugccuccagccuacaccaacagcuucaccagaggcguguacuaccccgacaagguguucagauccagcgugcugcacucuacccaggaccuguuccugccuuucuucagcaacgugaccugguuccacgccauccacguguccggcaccaauggcaccaagagauucgacaaccccgugcugcccuucaacgacgggguguacuuugccagcaccgagaaguccaacaucaucagaggcuggaucuucggcaccacacuggacagcaagacccagagccugcugaucgugaacaacgccaccaacguggucaucaaagugugcgaguuccaguucugcaacgaccccuuccugggcgucuacuaccacaagaacaacaagagcuggauggaaagcgaguuccggguguacagcagcgccaacaacugcaccuucgaguacgugucccagccuuuccugauggaccuggaaggcaagcagggcaacuucaagaaccugcgcgaguucguguucaagaacaucgacggcuacuucaaaaucuacagcaagcacaccccuaucaaccucgugcgggaucugccucagggcuucucugcucuggaaccccugguggaucugcccaucggcaucaacaucacccgguuucagacacugcuggcccugcacagaagcuaccugacaccuggcgauagcagcagcggauggacagcuggugccgccgcuuacuaugugggcuaccugcagccuagaaccuuccugcugaaguacaacgagaacggcaccaucaccgacgccguggauugugcucuggauccucugagcgagacaaagugcacccugaaguccuucaccguggaaaagggcaucuaccagaccagcaacuuccgggugcagcccaccgaauccaucgugcgguuccccaauaucaccaaucugugccccuucggcgagguguucaaugccaccagauucgccucuguguacgccuggaaccggaagcggaucagcaauugcguggccgacuacuccgugcuguacaacuccgccagcuucagcaccuucaagugcuacggcguguccccuaccaagcugaacgaccugugcuucacaaacguguacgccgacagcuucgugauccggggagaugaagugcggcagauugccccuggacagacaggcaagaucgccgacuacaacuacaagcugcccgacgacuucaccggcugugugauugccuggaacagcaacaaccuggacuccaaagucggcggcaacuacaauuaccuguaccggcuguuccggaaguccaaucugaagcccuucgagcgggacaucagcaccgaaaucuaucaggccggcagcaccccuugcaacggcguggaaggcuucaacugcuacuucccacugcaguccuacggcuuucagcccacaaauggcgugggcuaucagcccuacagagugguggugcugagcuucgaacugcugcaugcuccugccacagugugcggcccuaagaaaagcaccaaucucgugaagaacaaaugcgugaacuucaacuucaacggccugaccggcaccggcgugcugacagagagcaacaagaaguuccugccauuccagcaguuuggccgggauaucgccgauaccacagacgccguuagagauccccagacacuggaaauccuggacaucaccccaugcagcuucggcggagugucugugaucaccccuggcaccaacaccagcaaucagguggcagugcuguaccaggacgugaacuguaccgaagugcccguggccauucacgccgaucagcugacaccuacauggcggguguacuccaccggcagcaauguguuucagaccagagccggcugucugaucggagccgagcacgugaacaauagcuacgagugcgacauccccaucggcgcuggcaucugugccagcuaccagacacagacaaacagccccagacgggcuagaagcguggccagccagagcaucauugccuacacaaugucucugggcgccgagaacagcguggccuacuccaacaacucuaucgcuauccccaccaacuucaccaucagcgugaccaccgagauccugccuguguccaugaccaagaccagcguggacugcaccauguacaucugcggcgauuccaccgagugcuccaaccugcugcugcaguacggcagcuucugcacccagcugaauagagcccugacagggaucgccguggaacaggacaagaacacccaagagguguucgcccaagugaagcaaaucuacaagaccccuccuaucaaggacuucggcggcuucaauuucagccagauucugcccgauccuagcaagcccagcaagcggagcuucaucgaggaccugcuguucaacaaagugacacuggccgacgccggcuucaucaagcaguauggcgauugucugggcgacauugccgccagggaucugauuugcgcccagaaguuuaacggacugacagugcugccuccucugcugaccgaugagaugaucgcccaguacacaucugcccugcuggccggcacaaucacaagcggcuggacauuuggaugcggcgccgcucugcagauccccuuugcuaugcagauggccuaccgguucaacggcaucggagugacccagaaugugcuguacgagaaccagaagcugaucgccaaccaguucaacagcgccaucggcaagauccaggacagccugagcagcacagcaagcgcccugggaaagcugcaggacguggucaaccagaaugcccaggcacugaacacccuggucaagcagcuguccuccaacuucggcgccaucagcucugugcugaacgauauccugagcagacuggacaaggucgaggccgaggugcagaucgacagacugaucacaggcagacugcagagccuccagacauacgugacccagcagcugaucagagccgccgagauuagagccucugccaaucuggccgccaccaagaugucugagugugugcugggccagagcaagagaugugacuuuugcggcaagggcuaccaccugaugagcuucccucagucugccccucacggcgugguguuucugcacgugacauaugugcccgcucaagagaagaauuucaccaccgcuccagccaucugccacgacggcaaagcccacuuuccuagagaaggcguguucguguccaacggcacccauugguucgugacacagcggaacuucuacgagccccagaucaucaccaccgacaacaccuucgugucuggcaacugcgacguugugaucggcauugugaacaauaccguguacgacccucugcagcccgagcuggacagcggaggcggaggaucugacaucaucaagcugcugaacgagcaagugaacaaagagaugcagagcagcaaccuguacaugagcaugagcagcuggugcuacacccacagccuugauggcgccggacuguuccuguuugaucacgccgccgaggaauacgagcacgccaagaagcugaucaucuuccugaacgagaacaacgugcccgugcagcugaccagcauuucugccccugagcacaaguucgagggccugacacagaucuuccagaaggccuacgaacacgagcagcacaucagcgagagcaucaacaacaucguggaccacgccauuaagagcaaggaucacgccaccuucaacuuucugcagugguacguggccgaacagcacgaggaagaggugcuguucaaggacauccuggacaagaucgagcugaucggcaacgagaaccacggccuguaucuggccgaccaguacgugaagggaaucgccaagagcagaaagagcuga

SEQ ID NO: 12173 - RNA, 3948 nt, Artificial Sequence
  SARS-CoV-2/Wuhan/WIV05/2019__EPI_ISL_402128 spike protein CDS gc mod (1-1147)(T874C_S1055C) Ferritin construct
auguucguguuucuggugcugcugccccugguguccagccagugugugaaccugaccaccagaacacagcugccuccagccuacaccaacagcuucaccagaggcguguacuaccccgacaagguguucagauccagcgugcugcacucuacccaggaccuguuccugccuuucuucagcaacgugaccugguuccacgccauccacguguccggcaccaauggcaccaagagauucgacaaccccgugcugcccuucaacgacgggguguacuuugccagcaccgagaaguccaacaucaucagaggcuggaucuucggcaccacacuggacagcaagacccagagccugcugaucgugaacaacgccaccaacguggucaucaaagugugcgaguuccaguucugcaacgaccccuuccugggcgucuacuaccacaagaacaacaagagcuggauggaaagcgaguuccggguguacagcagcgccaacaacugcaccuucgaguacgugucccagccuuuccugauggaccuggaaggcaagcagggcaacuucaagaaccugcgcgaguucguguucaagaacaucgacggcuacuucaaaaucuacagcaagcacaccccuaucaaccucgugcgggaucugccucagggcuucucugcucuggaaccccugguggaucugcccaucggcaucaacaucacccgguuucagacacugcuggcccugcacagaagcuaccugacaccuggcgauagcagcagcggauggacagcuggugccgccgcuuacuaugugggcuaccugcagccuagaaccuuccugcugaaguacaacgagaacggcaccaucaccgacgccguggauugugcucuggauccucugagcgagacaaagugcacccugaaguccuucaccguggaaaagggcaucuaccagaccagcaacuuccgggugcagcccaccgaauccaucgugcgguuccccaauaucaccaaucugugccccuucggcgagguguucaaugccaccagauucgccucuguguacgccuggaaccggaagcggaucagcaauugcguggccgacuacuccgugcuguacaacuccgccagcuucagcaccuucaagugcuacggcguguccccuaccaagcugaacgaccugugcuucacaaacguguacgccgacagcuucgugauccggggagaugaagugcggcagauugccccuggacagacaggcaagaucgccgacuacaacuacaagcugcccgacgacuucaccggcugugugauugccuggaacagcaacaaccuggacuccaaagucggcggcaacuacaauuaccuguaccggcuguuccggaaguccaaucugaagcccuucgagcgggacaucagcaccgaaaucuaucaggccggcagcaccccuugcaacggcguggaaggcuucaacugcuacuucccacugcaguccuacggcuuucagcccacaaauggcgugggcuaucagcccuacagagugguggugcugagcuucgaacugcugcaugcuccugccacagugugcggcccuaagaaaagcaccaaucucgugaagaacaaaugcgugaacuucaacuucaacggccugaccggcaccggcgugcugacagagagcaacaagaaguuccugccauuccagcaguuuggccgggauaucgccgauaccacagacgccguuagagauccccagacacuggaaauccuggacaucaccccaugcagcuucggcggagugucugugaucaccccuggcaccaacaccagcaaucagguggcagugcuguaccaggacgugaacuguaccgaagugcccguggccauucacgccgaucagcugacaccuacauggcggguguacuccaccggcagcaauguguuucagaccagagccggcugucugaucggagccgagcacgugaacaauagcuacgagugcgacauccccaucggcgcuggcaucugugccagcuaccagacacagacaaacagccccagacgggcuagaagcguggccagccagagcaucauugccuacacaaugucucugggcgccgagaacagcguggccuacuccaacaacucuaucgcuauccccaccaacuucaccaucagcgugaccaccgagauccugccuguguccaugaccaagaccagcguggacugcaccauguacaucugcggcgauuccaccgagugcuccaaccugcugcugcaguacggcagcuucugcacccagcugaauagagcccugacagggaucgccguggaacaggacaagaacacccaagagguguucgcccaagugaagcaaaucuacaagaccccuccuaucaaggacuucggcggcuucaauuucagccagauucugcccgauccuagcaagcccagcaagcggagcuucaucgaggaccugcuguucaacaaagugacacuggccgacgccggcuucaucaagcaguauggcgauugucugggcgacauugccgccagggaucugauuugcgcccagaaguuuaacggacugacagugcugccuccucugcugaccgaugagaugaucgcccaguacugcucugcccugcuggccggcacaaucacaagcggcuggacauuuggagcuggcgccgcucugcagauccccuuugcuaugcagauggccuaccgguucaacggcaucggagugacccagaaugugcuguacgagaaccagaagcugaucgccaaccaguucaacagcgccaucggcaagauccaggacagccugagcagcacagcaagcgcccugggaaagcugcaggacguggucaaccagaaugcccaggcacugaacacccuggucaagcagcuguccuccaacuucggcgccaucagcucugugcugaacgauauccugagcagacuggacaaggucgaggccgaggugcagaucgacagacugaucacaggcagacugcagagccuccagacauacgugacccagcagcugaucagagccgccgagauuagagccucugccaaucuggccgccaccaagaugucugagugugugcugggccagagcaagagaguggacuuuugcggcaagggcuaccaccugaugagcuucccucagugcgccccucacggcgugguguuucugcacgugacauaugugcccgcucaagagaagaauuucaccaccgcuccagccaucugccacgacggcaaagcccacuuuccuagagaaggcguguucguguccaacggcacccauugguucgugacacagcggaacuucuacgagccccagaucaucaccaccgacaacaccuucgugucuggcaacugcgacguugugaucggcauugugaacaauaccguguacgacccucugcagcccgagcuggacagcggaggcggaggaucugacaucaucaagcugcugaacgagcaagugaacaaagagaugcagagcagcaaccuguacaugagcaugagcagcuggugcuacacccacagccuugauggcgccggacuguuccuguuugaucacgccgccgaggaauacgagcacgccaagaagcugaucaucuuccugaacgagaacaacgugcccgugcagcugaccagcauuucugccccugagcacaaguucgagggccugacacagaucuuccagaaggccuacgaacacgagcagcacaucagcgagagcaucaacaacaucguggaccacgccauuaagagcaaggaucacgccaccuucaacuuucugcagugguacguggccgaacagcacgaggaagaggugcuguucaaggacauccuggacaagaucgagcugaucggcaacgagaaccacggccuguaucuggccgaccaguacgugaagggaaucgccaagagcagaaagagcuga

SEQ ID NO: 12174 - RNA, 3534 nt, Artificial Sequence
  SARS-CoV-2/Wuhan/WIV05/2019__EPI_ISL_402128 spike protein CDS gc mod (1-1147) Foldon construct
auguucguguuucuggugcugcugccccugguguccagccagugugugaaccugaccaccagaacacagcugccuccagccuacaccaacagcuucaccagaggcguguacuaccccgacaagguguucagauccagcgugcugcacucuacccaggaccuguuccugccuuucuucagcaacgugaccugguuccacgccauccacguguccggcaccaauggcaccaagagauucgacaaccccgugcugcccuucaacgacgggguguacuuugccagcaccgagaaguccaacaucaucagaggcuggaucuucggcaccacacuggacagcaagacccagagccugcugaucgugaacaacgccaccaacguggucaucaaagugugcgaguuccaguucugcaacgaccccuuccugggcgucuacuaccacaagaacaacaagagcuggauggaaagcgaguuccggguguacagcagcgccaacaacugcaccuucgaguacgugucccagccuuuccugauggaccuggaaggcaagcagggcaacuucaagaaccugcgcgaguucguguucaagaacaucgacggcuacuucaaaaucuacagcaagcacaccccuaucaaccucgugcgggaucugccucagggcuucucugcucuggaaccccugguggaucugcccaucggcaucaacaucacccgguuucagacacugcuggcccugcacagaagcuaccugacaccuggcgauagcagcagcggauggacagcuggugccgccgcuuacuaugugggcuaccugcagccuagaaccuuccugcugaaguacaacgagaacggcaccaucaccgacgccguggauugugcucuggauccucugagcgagacaaagugcacccugaaguccuucaccguggaaaagggcaucuaccagaccagcaacuuccgggugcagcccaccgaauccaucgugcgguuccccaauaucaccaaucugugccccuucggcgagguguucaaugccaccagauucgccucuguguacgccuggaaccggaagcggaucagcaauugcguggccgacuacuccgugcuguacaacuccgccagcuucagcaccuucaagugcuacggcguguccccuaccaagcugaacgaccugugcuucacaaacguguacgccgacagcuucgugauccggggagaugaagugcggcagauugccccuggacagacaggcaagaucgccgacuacaacuacaagcugcccgacgacuucaccggcugugugauugccuggaacagcaacaaccuggacuccaaagucggcggcaacuacaauuaccuguaccggcuguuccggaaguccaaucugaagcccuucgagcgggacaucagcaccgaaaucuaucaggccggcagcaccccuugcaacggcguggaaggcuucaacugcuacuucccacugcaguccuacggcuuucagcccacaaauggcgugggcuaucagcccuacagagugguggugcugagcuucgaacugcugcaugcuccugccacagugugcggcccuaagaaaagcaccaaucucgugaagaacaaaugcgugaacuucaacuucaacggccugaccggcaccggcgugcugacagagagcaacaagaaguuccugccauuccagcaguuuggccgggauaucgccgauaccacagacgccguuagagauccccagacacuggaaauccuggacaucaccccaugcagcuucggcggagugucugugaucaccccuggcaccaacaccagcaaucagguggcagugcuguaccaggacgugaacuguaccgaagugcccguggccauucacgccgaucagcugacaccuacauggcggguguacuccaccggcagcaauguguuucagaccagagccggcugucugaucggagccgagcacgugaacaauagcuacgagugcgacauccccaucggcgcuggcaucugugccagcuaccagacacagacaaacagccccagacgggcuagaagcguggccagccagagcaucauugccuacacaaugucucugggcgccgagaacagcguggccuacuccaacaacucuaucgcuauccccaccaacuucaccaucagcgugaccaccgagauccugccuguguccaugaccaagaccagcguggacugcaccauguacaucugcggcgauuccaccgagugcuccaaccugcugcugcaguacggcagcuucugcacccagcugaauagagcccugacagggaucgccguggaacaggacaagaacacccaagagguguucgcccaagugaagcaaaucuacaagaccccuccuaucaaggacuucggcggcuucaauuucagccagauucugcccgauccuagcaagcccagcaagcggagcuucaucgaggaccugcuguucaacaaagugacacuggccgacgccggcuucaucaagcaguauggcgauugucugggcgacauugccgccagggaucugauuugcgcccagaaguuuaacggacugacagugcugccuccucugcugaccgaugagaugaucgcccaguacacaucugcccugcuggccggcacaaucacaagcggcuggacauuuggagcuggcgccgcucugcagauccccuuugcuaugcagauggccuaccgguucaacggcaucggagugacccagaaugugcuguacgagaaccagaagcugaucgccaaccaguucaacagcgccaucggcaagauccaggacagccugagcagcacagcaagcgcccugggaaagcugcaggacguggucaaccagaaugcccaggcacugaacacccuggucaagcagcuguccuccaacuucggcgccaucagcucugugcugaacgauauccugagcagacuggacaaggucgaggccgaggugcagaucgacagacugaucacaggcagacugcagagccuccagacauacgugacccagcagcugaucagagccgccgagauuagagccucugccaaucuggccgccaccaagaugucugagugugugcugggccagagcaagagaguggacuuuugcggcaagggcuaccaccugaugagcuucccucagucugccccucacggcgugguguuucugcacgugacauaugugcccgcucaagagaagaauuucaccaccgcuccagccaucugccacgacggcaaagcccacuuuccuagagaaggcguguucguguccaacggcacccauugguucgugacacagcggaacuucuacgagccccagaucaucaccaccgacaacaccuucgugucuggcaacugcgacguugugaucggcauugugaacaauaccguguacgacccucugcagcccgagcuggacagcggaggaucuggcuauauccccgaggcuccuagagauggccaggccuauguucggaaggauggcgaaugggugcugcugagcaccuuccuuuga

SEQ ID NO: 12175 - RNA, 3534 nt, Artificial Sequence
  SARS-CoV-2/Wuhan/WIV05/2019__EPI_ISL_402128 spike protein CDS gc mod (1-1147)(K986P_V987P) Foldon construct
auguucguguuucuggugcugcugccccugguguccagccagugugugaaccugaccaccagaacacagcugccuccagccuacaccaacagcuucaccagaggcguguacuaccccgacaagguguucagauccagcgugcugcacucuacccaggaccuguuccugccuuucuucagcaacgugaccugguuccacgccauccacguguccggcaccaauggcaccaagagauucgacaaccccgugcugcccuucaacgacgggguguacuuugccagcaccgagaaguccaacaucaucagaggcuggaucuucggcaccacacuggacagcaagacccagagccugcugaucgugaacaacgccaccaacguggucaucaaagugugcgaguuccaguucugcaacgaccccuuccugggcgucuacuaccacaagaacaacaagagcuggauggaaagcgaguuccggguguacagcagcgccaacaacugcaccuucgaguacgugucccagccuuuccugauggaccuggaaggcaagcagggcaacuucaagaaccugcgcgaguucguguucaagaacaucgacggcuacuucaaaaucuacagcaagcacaccccuaucaaccucgugcgggaucugccucagggcuucucugcucuggaaccccugguggaucugcccaucggcaucaacaucacccgguuucagacacugcuggcccugcacagaagcuaccugacaccuggcgauagcagcagcggauggacagcuggugccgccgcuuacuaugugggcuaccugcagccuagaaccuuccugcugaaguacaacgagaacggcaccaucaccgacgccguggauugugcucuggauccucugagcgagacaaagugcacccugaaguccuucaccguggaaaagggcaucuaccagaccagcaacuuccgggugcagcccaccgaauccaucgugcgguuccccaauaucaccaaucugugccccuucggcgagguguucaaugccaccagauucgccucuguguacgccuggaaccggaagcggaucagcaauugcguggccgacuacuccgugcuguacaacuccgccagcuucagcaccuucaagugcuacggcguguccccuaccaagcugaacgaccugugcuucacaaacguguacgccgacagcuucgugauccggggagaugaagugcggcagauugccccuggacagacaggcaagaucgccgacuacaacuacaagcugcccgacgacuucaccggcugugugauugccuggaacagcaacaaccuggacuccaaagucggcggcaacuacaauuaccuguaccggcuguuccggaaguccaaucugaagcccuucgagcgggacaucagcaccgaaaucuaucaggccggcagcaccccuugcaacggcguggaaggcuucaacugcuacuucccacugcaguccuacggcuuucagcccacaaauggcgugggcuaucagcccuacagagugguggugcugagcuucgaacugcugcaugcuccugccacagugugcggcccuaagaaaagcaccaaucucgugaagaacaaaugcgugaacuucaacuucaacggccugaccggcaccggcgugcugacagagagcaacaagaaguuccugccauuccagcaguuuggccgggauaucgccgauaccacagacgccguuagagauccccagacacuggaaauccuggacaucaccccaugcagcuucggcggagugucugugaucaccccuggcaccaacaccagcaaucagguggcagugcuguaccaggacgugaacuguaccgaagugcccguggccauucacgccgaucagcugacaccuacauggcggguguacuccaccggcagcaauguguuucagaccagagccggcugucugaucggagccgagcacgugaacaauagcuacgagugcgacauccccaucggcgcuggcaucugugccagcuaccagacacagacaaacagccccagacgggcuagaagcguggccagccagagcaucauugccuacacaaugucucugggcgccgagaacagcguggccuacuccaacaacucuaucgcuauccccaccaacuucaccaucagcgugaccaccgagauccugccuguguccaugaccaagaccagcguggacugcaccauguacaucugcggcgauuccaccgagugcuccaaccugcugcugcaguacggcagcuucugcacccagcugaauagagcccugacagggaucgccguggaacaggacaagaacacccaagagguguucgcccaagugaagcaaaucuacaagaccccuccuaucaaggacuucggcggcuucaauuucagccagauucugcccgauccuagcaagcccagcaagcggagcuucaucgaggaccugcuguucaacaaagugacacuggccgacgccggcuucaucaagcaguauggcgauugucugggcgacauugccgccagggaucugauuugcgcccagaaguuuaacggacugacagugcugccuccucugcugaccgaugagaugaucgcccaguacacaucugcccugcuggccggcacaaucacaagcggcuggacauuuggagcuggcgccgcucugcagauccccuuugcuaugcagauggccuaccgguucaacggcaucggagugacccagaaugugcuguacgagaaccagaagcugaucgccaaccaguucaacagcgccaucggcaagauccaggacagccugagcagcacagcaagcgcccugggaaagcugcaggacguggucaaccagaaugcccaggcacugaacacccuggucaagcagcuguccuccaacuucggcgccaucagcucugugcugaacgauauccugagcagacuggacccuccugaggccgaggugcagaucgacagacugaucacaggcagacugcagagccuccagacauacgugacccagcagcugaucagagccgccgagauuagagccucugccaaucuggccgccaccaagaugucugagugugugcugggccagagcaagagaguggacuuuugcggcaagggcuaccaccugaugagcuucccucagucugccccucacggcgugguguuucugcacgugacauaugugcccgcucaagagaagaauuucaccaccgcuccagccaucugccacgacggcaaagcccacuuuccuagagaaggcguguucguguccaacggcacccauugguucgugacacagcggaacuucuacgagccccagaucaucaccaccgacaacaccuucgugucuggcaacugcgacguugugaucggcauugugaacaauaccguguacgacccucugcagcccgagcuggacagcggaggaucuggcuauauccccgaggcuccuagagauggccaggccuauguucggaaggauggcgaaugggugcugcugagcaccuuccuuuga

SEQ ID NO: 12176 - RNA, 3534 nt, Artificial Sequence
  SARS-CoV-2/Wuhan/WIV05/2019__EPI_ISL_402128 spike protein CDS gc mod (1-1147)(K986P_V987P_T887WN_A1020W) Foldon construct
auguucguguuucuggugcugcugccccugguguccagccagugugugaaccugaccaccagaacacagcugccuccagccuacaccaacagcuucaccagaggcguguacuaccccgacaagguguucagauccagcgugcugcacucuacccaggaccuguuccugccuuucuucagcaacgugaccugguuccacgccauccacguguccggcaccaauggcaccaagagauucgacaaccccgugcugcccuucaacgacgggguguacuuugccagcaccgagaaguccaacaucaucagaggcuggaucuucggcaccacacuggacagcaagacccagagccugcugaucgugaacaacgccaccaacguggucaucaaagugugcgaguuccaguucugcaacgaccccuuccugggcgucuacuaccacaagaacaacaagagcuggauggaaagcgaguuccggguguacagcagcgccaacaacugcaccuucgaguacgugucccagccuuuccugauggaccuggaaggcaagcagggcaacuucaagaaccugcgcgaguucguguucaagaacaucgacggcuacuucaaaaucuacagcaagcacaccccuaucaaccucgugcgggaucugccucagggcuucucugcucuggaaccccugguggaucugcccaucggcaucaacaucacccgguuucagacacugcuggcccugcacagaagcuaccugacaccuggcgauagcagcagcggauggacagcuggugccgccgcuuacuaugugggcuaccugcagccuagaaccuuccugcugaaguacaacgagaacggcaccaucaccgacgccguggauugugcucuggauccucugagcgagacaaagugcacccugaaguccuucaccguggaaaagggcaucuaccagaccagcaacuuccgggugcagcccaccgaauccaucgugcgguuccccaauaucaccaaucugugccccuucggcgagguguucaaugccaccagauucgccucuguguacgccuggaaccggaagcggaucagcaauugcguggccgacuacuccgugcuguacaacuccgccagcuucagcaccuucaagugcuacggcguguccccuaccaagcugaacgaccugugcuucacaaacguguacgccgacagcuucgugauccggggagaugaagugcggcagauugccccuggacagacaggcaagaucgccgacuacaacuacaagcugcccgacgacuucaccggcugugugauugccuggaacagcaacaaccuggacuccaaagucggcggcaacuacaauuaccuguaccggcuguuccggaaguccaaucugaagcccuucgagcgggacaucagcaccgaaaucuaucaggccggcagcaccccuugcaacggcguggaaggcuucaacugcuacuucccacugcaguccuacggcuuucagcccacaaauggcgugggcuaucagcccuacagagugguggugcugagcuucgaacugcugcaugcuccugccacagugugcggcccuaagaaaagcaccaaucucgugaagaacaaaugcgugaacuucaacuucaacggccugaccggcaccggcgugcugacagagagcaacaagaaguuccugccauuccagcaguuuggccgggauaucgccgauaccacagacgccguuagagauccccagacacuggaaauccuggacaucaccccaugcagcuucggcggagugucugugaucaccccuggcaccaacaccagcaaucagguggcagugcuguaccaggacgugaacuguaccgaagugcccguggccauucacgccgaucagcugacaccuacauggcggguguacuccaccggcagcaauguguuucagaccagagccggcugucugaucggagccgagcacgugaacaauagcuacgagugcgacauccccaucggcgcuggcaucugugccagcuaccagacacagacaaacagccccagacgggcuagaagcguggccagccagagcaucauugccuacacaaugucucugggcgccgagaacagcguggccuacuccaacaacucuaucgcuauccccaccaacuucaccaucagcgugaccaccgagauccugccuguguccaugaccaagaccagcguggacugcaccauguacaucugcggcgauuccaccgagugcuccaaccugcugcugcaguacggcagcuucugcacccagcugaauagagcccugacagggaucgccguggaacaggacaagaacacccaagagguguucgcccaagugaagcaaaucuacaagaccccuccuaucaaggacuucggcggcuucaauuucagccagauucugcccgauccuagcaagcccagcaagcggagcuucaucgaggaccugcuguucaacaaagugacacuggccgacgccggcuucaucaagcaguauggcgauugucugggcgacauugccgccagggaucugauuugcgcccagaaguuuaacggacugacagugcugccuccucugcugaccgaugagaugaucgcccaguacacaucugcccugcuggccggcacaaucacaagcggcuggugguuuggagcuggcgccgcucugcagauccccuuugcuaugcagauggccuaccgguucaacggcaucggagugacccagaaugugcuguacgagaaccagaagcugaucgccaaccaguucaacagcgccaucggcaagauccaggacagccugagcagcacagcaagcgcccugggaaagcugcaggacguggucaaccagaaugcccaggcacugaacacccuggucaagcagcuguccuccaacuucggcgccaucagcucugugcugaacgauauccugagcagacuggacccuccugaggccgaggugcagaucgacagacugaucacaggcagacugcagagccuccagacauacgugacccagcagcugaucagagccgccgagauuagauggucugccaaucuggccgccaccaagaugucugagugugugcugggccagagcaagagaguggacuuuugcggcaagggcuaccaccugaugagcuucccucagucugccccucacggcgugguguuucugcacgugacauaugugcccgcucaagagaagaauuucaccaccgcuccagccaucugccacgacggcaaagcccacuuuccuagagaaggcguguucguguccaacggcacccauugguucgugacacagcggaacuucuacgagccccagaucaucaccaccgacaacaccuucgugucuggcaacugcgacguugugaucggcauugugaacaauaccguguacgacccucugcagcccgagcuggacagcggaggaucuggcuauauccccgaggcuccuagagauggccaggccuauguucggaaggauggcgaaugggugcugcugagcaccuuccuuuga

SEQ ID NO: 12177 - RNA, 3534 nt, Artificial Sequence
  SARS-CoV-2/Wuhan/WIV05/2019__EPI_ISL_402128 spike protein CDS gc mod (1-1147)(K986P_V987P_P1069F) Foldon construct
auguucguguuucuggugcugcugccccugguguccagccagugugugaaccugaccaccagaacacagcugccuccagccuacaccaacagcuucaccagaggcguguacuaccccgacaagguguucagauccagcgugcugcacucuacccaggaccuguuccugccuuucuucagcaacgugaccugguuccacgccauccacguguccggcaccaauggcaccaagagauucgacaaccccgugcugcccuucaacgacgggguguacuuugccagcaccgagaaguccaacaucaucagaggcuggaucuucggcaccacacuggacagcaagacccagagccugcugaucgugaacaacgccaccaacguggucaucaaagugugcgaguuccaguucugcaacgaccccuuccugggcgucuacuaccacaagaacaacaagagcuggauggaaagcgaguuccggguguacagcagcgccaacaacugcaccuucgaguacgugucccagccuuuccugauggaccuggaaggcaagcagggcaacuucaagaaccugcgcgaguucguguucaagaacaucgacggcuacuucaaaaucuacagcaagcacaccccuaucaaccucgugcgggaucugccucagggcuucucugcucuggaaccccugguggaucugcccaucggcaucaacaucacccgguuucagacacugcuggcccugcacagaagcuaccugacaccuggcgauagcagcagcggauggacagcuggugccgccgcuuacuaugugggcuaccugcagccuagaaccuuccugcugaaguacaacgagaacggcaccaucaccgacgccguggauugugcucuggauccucugagcgagacaaagugcacccugaaguccuucaccguggaaaagggcaucuaccagaccagcaacuuccgggugcagcccaccgaauccaucgugcgguuccccaauaucaccaaucugugccccuucggcgagguguucaaugccaccagauucgccucuguguacgccuggaaccggaagcggaucagcaauugcguggccgacuacuccgugcuguacaacuccgccagcuucagcaccuucaagugcuacggcguguccccuaccaagcugaacgaccugugcuucacaaacguguacgccgacagcuucgugauccggggagaugaagugcggcagauugccccuggacagacaggcaagaucgccgacuacaacuacaagcugcccgacgacuucaccggcugugugauugccuggaacagcaacaaccuggacuccaaagucggcggcaacuacaauuaccuguaccggcuguuccggaaguccaaucugaagcccuucgagcgggacaucagcaccgaaaucuaucaggccggcagcaccccuugcaacggcguggaaggcuucaacugcuacuucccacugcaguccuacggcuuucagcccacaaauggcgugggcuaucagcccuacagagugguggugcugagcuucgaacugcugcaugcuccugccacagugugcggcccuaagaaaagcaccaaucucgugaagaacaaaugcgugaacuucaacuucaacggccugaccggcaccggcgugcugacagagagcaacaagaaguuccugccauuccagcaguuuggccgggauaucgccgauaccacagacgccguuagagauccccagacacuggaaauccuggacaucaccccaugcagcuucggcggagugucugugaucaccccuggcaccaacaccagcaaucagguggcagugcuguaccaggacgugaacuguaccgaagugcccguggccauucacgccgaucagcugacaccuacauggcggguguacuccaccggcagcaauguguuucagaccagagccggcugucugaucggagccgagcacgugaacaauagcuacgagugcgacauccccaucggcgcuggcaucugugccagcuaccagacacagacaaacagccccagacgggcuagaagcguggccagccagagcaucauugccuacacaaugucucugggcgccgagaacagcguggccuacuccaacaacucuaucgcuauccccaccaacuucaccaucagcgugaccaccgagauccugccuguguccaugaccaagaccagcguggacugcaccauguacaucugcggcgauuccaccgagugcuccaaccugcugcugcaguacggcagcuucugcacccagcugaauagagcccugacagggaucgccguggaacaggacaagaacacccaagagguguucgcccaagugaagcaaaucuacaagaccccuccuaucaaggacuucggcggcuucaauuucagccagauucugcccgauccuagcaagcccagcaagcggagcuucaucgaggaccugcuguucaacaaagugacacuggccgacgccggcuucaucaagcaguauggcgauugucugggcgacauugccgccagggaucugauuugcgcccagaaguuuaacggacugacagugcugccuccucugcugaccgaugagaugaucgcccaguacacaucugcccugcuggccggcacaaucacaagcggcuggacauuuggagcuggcgccgcucugcagauccccuuugcuaugcagauggccuaccgguucaacggcaucggagugacccagaaugugcuguacgagaaccagaagcugaucgccaaccaguucaacagcgccaucggcaagauccaggacagccugagcagcacagcaagcgcccugggaaagcugcaggacguggucaaccagaaugcccaggcacugaacacccuggucaagcagcuguccuccaacuucggcgccaucagcucugugcugaacgauauccugagcagacuggacccuccugaggccgaggugcagaucgacagacugaucacaggcagacugcagagccuccagacauacgugacccagcagcugaucagagccgccgagauuagagccucugccaaucuggccgccaccaagaugucugagugugugcugggccagagcaagagaguggacuuuugcggcaagggcuaccaccugaugagcuucccucagucugccccucacggcgugguguuucugcacgugacauauguguucgcucaagagaagaauuucaccaccgcuccagccaucugccacgacggcaaagcccacuuuccuagagaaggcguguucguguccaacggcacccauugguucgugacacagcggaacuucuacgagccccagaucaucaccaccgacaacaccuucgugucuggcaacugcgacguugugaucggcauugugaacaauaccguguacgacccucugcagcccgagcuggacagcggaggaucuggcuauauccccgaggcuccuagagauggccaggccuauguucggaaggauggcgaaugggugcugcugagcaccuuccuuuga

SEQ ID NO: 12178 - RNA, 3534 nt, Artificial Sequence
  SARS-CoV-2/Wuhan/WIV05/2019__EPI_ISL_402128 spike protein CDS gc mod (1-1147)(K986P_V987P_ H1048Q_H1064N_ H1083N_H1101N) Foldon construct
auguucguguuucuggugcugcugccccugguguccagccagugugugaaccugaccaccagaacacagcugccuccagccuacaccaacagcuucaccagaggcguguacuaccccgacaagguguucagauccagcgugcugcacucuacccaggaccuguuccugccuuucuucagcaacgugaccugguuccacgccauccacguguccggcaccaauggcaccaagagauucgacaaccccgugcugcccuucaacgacgggguguacuuugccagcaccgagaaguccaacaucaucagaggcuggaucuucggcaccacacuggacagcaagacccagagccugcugaucgugaacaacgccaccaacguggucaucaaagugugcgaguuccaguucugcaacgaccccuuccugggcgucuacuaccacaagaacaacaagagcuggauggaaagcgaguuccggguguacagcagcgccaacaacugcaccuucgaguacgugucccagccuuuccugauggaccuggaaggcaagcagggcaacuucaagaaccugcgcgaguucguguucaagaacaucgacggcuacuucaaaaucuacagcaagcacaccccuaucaaccucgugcgggaucugccucagggcuucucugcucuggaaccccugguggaucugcccaucggcaucaacaucacccgguuucagacacugcuggcccugcacagaagcuaccugacaccuggcgauagcagcagcggauggacagcuggugccgccgcuuacuaugugggcuaccugcagccuagaaccuuccugcugaaguacaacgagaacggcaccaucaccgacgccguggauugugcucuggauccucugagcgagacaaagugcacccugaaguccuucaccguggaaaagggcaucuaccagaccagcaacuuccgggugcagcccaccgaauccaucgugcgguuccccaauaucaccaaucugugccccuucggcgagguguucaaugccaccagauucgccucuguguacgccuggaaccggaagcggaucagcaauugcguggccgacuacuccgugcuguacaacuccgccagcuucagcaccuucaagugcuacggcguguccccuaccaagcugaacgaccugugcuucacaaacguguacgccgacagcuucgugauccggggagaugaagugcggcagauugccccuggacagacaggcaagaucgccgacuacaacuacaagcugcccgacgacuucaccggcugugugauugccuggaacagcaacaaccuggacuccaaagucggcggcaacuacaauuaccuguaccggcuguuccggaaguccaaucugaagcccuucgagcgggacaucagcaccgaaaucuaucaggccggcagcaccccuugcaacggcguggaaggcuucaacugcuacuucccacugcaguccuacggcuuucagcccacaaauggcgugggcuaucagcccuacagagugguggugcugagcuucgaacugcugcaugcuccugccacagugugcggcccuaagaaaagcaccaaucucgugaagaacaaaugcgugaacuucaacuucaacggccugaccggcaccggcgugcugacagagagcaacaagaaguuccugccauuccagcaguuuggccgggauaucgccgauaccacagacgccguuagagauccccagacacuggaaauccuggacaucaccccaugcagcuucggcggagugucugugaucaccccuggcaccaacaccagcaaucagguggcagugcuguaccaggacgugaacuguaccgaagugcccguggccauucacgccgaucagcugacaccuacauggcggguguacuccaccggcagcaauguguuucagaccagagccggcugucugaucggagccgagcacgugaacaauagcuacgagugcgacauccccaucggcgcuggcaucugugccagcuaccagacacagacaaacagccccagacgggcuagaagcguggccagccagagcaucauugccuacacaaugucucugggcgccgagaacagcguggccuacuccaacaacucuaucgcuauccccaccaacuucaccaucagcgugaccaccgagauccugccuguguccaugaccaagaccagcguggacugcaccauguacaucugcggcgauuccaccgagugcuccaaccugcugcugcaguacggcagcuucugcacccagcugaauagagcccugacagggaucgccguggaacaggacaagaacacccaagagguguucgcccaagugaagcaaaucuacaagaccccuccuaucaaggacuucggcggcuucaauuucagccagauucugcccgauccuagcaagcccagcaagcggagcuucaucgaggaccugcuguucaacaaagugacacuggccgacgccggcuucaucaagcaguauggcgauugucugggcgacauugccgccagggaucugauuugcgcccagaaguuuaacggacugacagugcugccuccucugcugaccgaugagaugaucgcccaguacacaucugcccugcuggccggcacaaucacaagcggcuggacauuuggagcuggcgccgcucugcagauccccuuugcuaugcagauggccuaccgguucaacggcaucggagugacccagaaugugcuguacgagaaccagaagcugaucgccaaccaguucaacagcgccaucggcaagauccaggacagccugagcagcacagcaagcgcccugggaaagcugcaggacguggucaaccagaaugcccaggcacugaacacccuggucaagcagcuguccuccaacuucggcgccaucagcucugugcugaacgauauccugagcagacuggacccuccugaggccgaggugcagaucgacagacugaucacaggcagacugcagagccuccagacauacgugacccagcagcugaucagagccgccgagauuagagccucugccaaucuggccgccaccaagaugucugagugugugcugggccagagcaagagaguggacuuuugcggcaagggcuaccagcugaugagcuucccucagucugccccucacggcgugguguuucugaacgugacauaugugcccgcucaagagaagaauuucaccaccgcuccagccaucugcaacgacggcaaagcccacuuuccuagagaaggcguguucguguccaacggcaccaacugguucgugacacagcggaacuucuacgagccccagaucaucaccaccgacaacaccuucgugucuggcaacugcgacguugugaucggcauugugaacaauaccguguacgacccucugcagcccgagcuggacagcggaggaucuggcuauauccccgaggcuccuagagauggccaggccuauguucggaaggauggcgaaugggugcugcugagcaccuuccuuuga

SEQ ID NO: 12179 - RNA, 3534 nt, Artificial Sequence
  SARS-CoV-2/Wuhan/WIV05/2019__EPI_ISL_402128 spike protein CDS gc mod (1-1147)(I712C_T1077C) Foldon construct
auguucguguuucuggugcugcugccccugguguccagccagugugugaaccugaccaccagaacacagcugccuccagccuacaccaacagcuucaccagaggcguguacuaccccgacaagguguucagauccagcgugcugcacucuacccaggaccuguuccugccuuucuucagcaacgugaccugguuccacgccauccacguguccggcaccaauggcaccaagagauucgacaaccccgugcugcccuucaacgacgggguguacuuugccagcaccgagaaguccaacaucaucagaggcuggaucuucggcaccacacuggacagcaagacccagagccugcugaucgugaacaacgccaccaacguggucaucaaagugugcgaguuccaguucugcaacgaccccuuccugggcgucuacuaccacaagaacaacaagagcuggauggaaagcgaguuccggguguacagcagcgccaacaacugcaccuucgaguacgugucccagccuuuccugauggaccuggaaggcaagcagggcaacuucaagaaccugcgcgaguucguguucaagaacaucgacggcuacuucaaaaucuacagcaagcacaccccuaucaaccucgugcgggaucugccucagggcuucucugcucuggaaccccugguggaucugcccaucggcaucaacaucacccgguuucagacacugcuggcccugcacagaagcuaccugacaccuggcgauagcagcagcggauggacagcuggugccgccgcuuacuaugugggcuaccugcagccuagaaccuuccugcugaaguacaacgagaacggcaccaucaccgacgccguggauugugcucuggauccucugagcgagacaaagugcacccugaaguccuucaccguggaaaagggcaucuaccagaccagcaacuuccgggugcagcccaccgaauccaucgugcgguuccccaauaucaccaaucugugccccuucggcgagguguucaaugccaccagauucgccucuguguacgccuggaaccggaagcggaucagcaauugcguggccgacuacuccgugcuguacaacuccgccagcuucagcaccuucaagugcuacggcguguccccuaccaagcugaacgaccugugcuucacaaacguguacgccgacagcuucgugauccggggagaugaagugcggcagauugccccuggacagacaggcaagaucgccgacuacaacuacaagcugcccgacgacuucaccggcugugugauugccuggaacagcaacaaccuggacuccaaagucggcggcaacuacaauuaccuguaccggcuguuccggaaguccaaucugaagcccuucgagcgggacaucagcaccgaaaucuaucaggccggcagcaccccuugcaacggcguggaaggcuucaacugcuacuucccacugcaguccuacggcuuucagcccacaaauggcgugggcuaucagcccuacagagugguggugcugagcuucgaacugcugcaugcuccugccacagugugcggcccuaagaaaagcaccaaucucgugaagaacaaaugcgugaacuucaacuucaacggccugaccggcaccggcgugcugacagagagcaacaagaaguuccugccauuccagcaguuuggccgggauaucgccgauaccacagacgccguuagagauccccagacacuggaaauccuggacaucaccccaugcagcuucggcggagugucugugaucaccccuggcaccaacaccagcaaucagguggcagugcuguaccaggacgugaacuguaccgaagugcccguggccauucacgccgaucagcugacaccuacauggcggguguacuccaccggcagcaauguguuucagaccagagccggcugucugaucggagccgagcacgugaacaauagcuacgagugcgacauccccaucggcgcuggcaucugugccagcuaccagacacagacaaacagccccagacgggcuagaagcguggccagccagagcaucauugccuacacaaugucucugggcgccgagaacagcguggccuacuccaacaacucuugcgcuauccccaccaacuucaccaucagcgugaccaccgagauccugccuguguccaugaccaagaccagcguggacugcaccauguacaucugcggcgauuccaccgagugcuccaaccugcugcugcaguacggcagcuucugcacccagcugaauagagcccugacagggaucgccguggaacaggacaagaacacccaagagguguucgcccaagugaagcaaaucuacaagaccccuccuaucaaggacuucggcggcuucaauuucagccagauucugcccgauccuagcaagcccagcaagcggagcuucaucgaggaccugcuguucaacaaagugacacuggccgacgccggcuucaucaagcaguauggcgauugucugggcgacauugccgccagggaucugauuugcgcccagaaguuuaacggacugacagugcugccuccucugcugaccgaugagaugaucgcccaguacacaucugcccugcuggccggcacaaucacaagcggcuggacauuuggagcuggcgccgcucugcagauccccuuugcuaugcagauggccuaccgguucaacggcaucggagugacccagaaugugcuguacgagaaccagaagcugaucgccaaccaguucaacagcgccaucggcaagauccaggacagccugagcagcacagcaagcgcccugggaaagcugcaggacguggucaaccagaaugcccaggcacugaacacccuggucaagcagcuguccuccaacuucggcgccaucagcucugugcugaacgauauccugagcagacuggacaaggucgaggccgaggugcagaucgacagacugaucacaggcagacugcagagccuccagacauacgugacccagcagcugaucagagccgccgagauuagagccucugccaaucuggccgccaccaagaugucugagugugugcugggccagagcaagagaguggacuuuugcggcaagggcuaccaccugaugagcuucccucagucugccccucacggcgugguguuucugcacgugacauaugugcccgcucaagagaagaauuucaccugugcuccagccaucugccacgacggcaaagcccacuuuccuagagaaggcguguucguguccaacggcacccauugguucgugacacagcggaacuucuacgagccccagaucaucaccaccgacaacaccuucgugucuggcaacugcgacguugugaucggcauugugaacaauaccguguacgacccucugcagcccgagcuggacagcggaggaucuggcuauauccccgaggcuccuagagauggccaggccuauguucggaaggauggcgaaugggugcugcugagcaccuuccuuuga

SEQ ID NO: 12180 - RNA, 3534 nt, Artificial Sequence
  SARS-CoV-2/Wuhan/WIV05/2019__EPI_ISL_402128 spike protein CDS gc mod (1-1147)(I714C_Y1110C) Foldon construct
auguucguguuucuggugcugcugccccugguguccagccagugugugaaccugaccaccagaacacagcugccuccagccuacaccaacagcuucaccagaggcguguacuaccccgacaagguguucagauccagcgugcugcacucuacccaggaccuguuccugccuuucuucagcaacgugaccugguuccacgccauccacguguccggcaccaauggcaccaagagauucgacaaccccgugcugcccuucaacgacgggguguacuuugccagcaccgagaaguccaacaucaucagaggcuggaucuucggcaccacacuggacagcaagacccagagccugcugaucgugaacaacgccaccaacguggucaucaaagugugcgaguuccaguucugcaacgaccccuuccugggcgucuacuaccacaagaacaacaagagcuggauggaaagcgaguuccggguguacagcagcgccaacaacugcaccuucgaguacgugucccagccuuuccugauggaccuggaaggcaagcagggcaacuucaagaaccugcgcgaguucguguucaagaacaucgacggcuacuucaaaaucuacagcaagcacaccccuaucaaccucgugcgggaucugccucagggcuucucugcucuggaaccccugguggaucugcccaucggcaucaacaucacccgguuucagacacugcuggcccugcacagaagcuaccugacaccuggcgauagcagcagcggauggacagcuggugccgccgcuuacuaugugggcuaccugcagccuagaaccuuccugcugaaguacaacgagaacggcaccaucaccgacgccguggauugugcucuggauccucugagcgagacaaagugcacccugaaguccuucaccguggaaaagggcaucuaccagaccagcaacuuccgggugcagcccaccgaauccaucgugcgguuccccaauaucaccaaucugugccccuucggcgagguguucaaugccaccagauucgccucuguguacgccuggaaccggaagcggaucagcaauugcguggccgacuacuccgugcuguacaacuccgccagcuucagcaccuucaagugcuacggcguguccccuaccaagcugaacgaccugugcuucacaaacguguacgccgacagcuucgugauccggggagaugaagugcggcagauugccccuggacagacaggcaagaucgccgacuacaacuacaagcugcccgacgacuucaccggcugugugauugccuggaacagcaacaaccuggacuccaaagucggcggcaacuacaauuaccuguaccggcuguuccggaaguccaaucugaagcccuucgagcgggacaucagcaccgaaaucuaucaggccggcagcaccccuugcaacggcguggaaggcuucaacugcuacuucccacugcaguccuacggcuuucagcccacaaauggcgugggcuaucagcccuacagagugguggugcugagcuucgaacugcugcaugcuccugccacagugugcggcccuaagaaaagcaccaaucucgugaagaacaaaugcgugaacuucaacuucaacggccugaccggcaccggcgugcugacagagagcaacaagaaguuccugccauuccagcaguuuggccgggauaucgccgauaccacagacgccguuagagauccccagacacuggaaauccuggacaucaccccaugcagcuucggcggagugucugugaucaccccuggcaccaacaccagcaaucagguggcagugcuguaccaggacgugaacuguaccgaagugcccguggccauucacgccgaucagcugacaccuacauggcggguguacuccaccggcagcaauguguuucagaccagagccggcugucugaucggagccgagcacgugaacaauagcuacgagugcgacauccccaucggcgcuggcaucugugccagcuaccagacacagacaaacagccccagacgggcuagaagcguggccagccagagcaucauugccuacacaaugucucugggcgccgagaacagcguggccuacuccaacaacucuaucgcuugccccaccaacuucaccaucagcgugaccaccgagauccugccuguguccaugaccaagaccagcguggacugcaccauguacaucugcggcgauuccaccgagugcuccaaccugcugcugcaguacggcagcuucugcacccagcugaauagagcccugacagggaucgccguggaacaggacaagaacacccaagagguguucgcccaagugaagcaaaucuacaagaccccuccuaucaaggacuucggcggcuucaauuucagccagauucugcccgauccuagcaagcccagcaagcggagcuucaucgaggaccugcuguucaacaaagugacacuggccgacgccggcuucaucaagcaguauggcgauugucugggcgacauugccgccagggaucugauuugcgcccagaaguuuaacggacugacagugcugccuccucugcugaccgaugagaugaucgcccaguacacaucugcccugcuggccggcacaaucacaagcggcuggacauuuggagcuggcgccgcucugcagauccccuuugcuaugcagauggccuaccgguucaacggcaucggagugacccagaaugugcuguacgagaaccagaagcugaucgccaaccaguucaacagcgccaucggcaagauccaggacagccugagcagcacagcaagcgcccugggaaagcugcaggacguggucaaccagaaugcccaggcacugaacacccuggucaagcagcuguccuccaacuucggcgccaucagcucugugcugaacgauauccugagcagacuggacaaggucgaggccgaggugcagaucgacagacugaucacaggcagacugcagagccuccagacauacgugacccagcagcugaucagagccgccgagauuagagccucugccaaucuggccgccaccaagaugucugagugugugcugggccagagcaagagaguggacuuuugcggcaagggcuaccaccugaugagcuucccucagucugccccucacggcgugguguuucugcacgugacauaugugcccgcucaagagaagaauuucaccaccgcuccagccaucugccacgacggcaaagcccacuuuccuagagaaggcguguucguguccaacggcacccauugguucgugacacagcggaacuucugugagccccagaucaucaccaccgacaacaccuucgugucuggcaacugcgacguugugaucggcauugugaacaauaccguguacgacccucugcagcccgagcuggacagcggaggaucuggcuauauccccgaggcuccuagagauggccaggccuauguucggaaggauggcgaaugggugcugcugagcaccuuccuuuga

SEQ ID NO: 12181 - RNA, 3534 nt, Artificial Sequence
  SARS-CoV-2/Wuhan/WIV05/2019__EPI_ISL_402128 spike protein CDS gc mod (1-1147)(P715C_P1069C) Foldon construct
auguucguguuucuggugcugcugccccugguguccagccagugugugaaccugaccaccagaacacagcugccuccagccuacaccaacagcuucaccagaggcguguacuaccccgacaagguguucagauccagcgugcugcacucuacccaggaccuguuccugccuuucuucagcaacgugaccugguuccacgccauccacguguccggcaccaauggcaccaagagauucgacaaccccgugcugcccuucaacgacgggguguacuuugccagcaccgagaaguccaacaucaucagaggcuggaucuucggcaccacacuggacagcaagacccagagccugcugaucgugaacaacgccaccaacguggucaucaaagugugcgaguuccaguucugcaacgaccccuuccugggcgucuacuaccacaagaacaacaagagcuggauggaaagcgaguuccggguguacagcagcgccaacaacugcaccuucgaguacgugucccagccuuuccugauggaccuggaaggcaagcagggcaacuucaagaaccugcgcgaguucguguucaagaacaucgacggcuacuucaaaaucuacagcaagcacaccccuaucaaccucgugcgggaucugccucagggcuucucugcucuggaaccccugguggaucugcccaucggcaucaacaucacccgguuucagacacugcuggcccugcacagaagcuaccugacaccuggcgauagcagcagcggauggacagcuggugccgccgcuuacuaugugggcuaccugcagccuagaaccuuccugcugaaguacaacgagaacggcaccaucaccgacgccguggauugugcucuggauccucugagcgagacaaagugcacccugaaguccuucaccguggaaaagggcaucuaccagaccagcaacuuccgggugcagcccaccgaauccaucgugcgguuccccaauaucaccaaucugugccccuucggcgagguguucaaugccaccagauucgccucuguguacgccuggaaccggaagcggaucagcaauugcguggccgacuacuccgugcuguacaacuccgccagcuucagcaccuucaagugcuacggcguguccccuaccaagcugaacgaccugugcuucacaaacguguacgccgacagcuucgugauccggggagaugaagugcggcagauugccccuggacagacaggcaagaucgccgacuacaacuacaagcugcccgacgacuucaccggcugugugauugccuggaacagcaacaaccuggacuccaaagucggcggcaacuacaauuaccuguaccggcuguuccggaaguccaaucugaagcccuucgagcgggacaucagcaccgaaaucuaucaggccggcagcaccccuugcaacggcguggaaggcuucaacugcuacuucccacugcaguccuacggcuuucagcccacaaauggcgugggcuaucagcccuacagagugguggugcugagcuucgaacugcugcaugcuccugccacagugugcggcccuaagaaaagcaccaaucucgugaagaacaaaugcgugaacuucaacuucaacggccugaccggcaccggcgugcugacagagagcaacaagaaguuccugccauuccagcaguuuggccgggauaucgccgauaccacagacgccguuagagauccccagacacuggaaauccuggacaucaccccaugcagcuucggcggagugucugugaucaccccuggcaccaacaccagcaaucagguggcagugcuguaccaggacgugaacuguaccgaagugcccguggccauucacgccgaucagcugacaccuacauggcggguguacuccaccggcagcaauguguuucagaccagagccggcugucugaucggagccgagcacgugaacaauagcuacgagugcgacauccccaucggcgcuggcaucugugccagcuaccagacacagacaaacagccccagacgggcuagaagcguggccagccagagcaucauugccuacacaaugucucugggcgccgagaacagcguggccuacuccaacaacucuaucgcuaucugcaccaacuucaccaucagcgugaccaccgagauccugccuguguccaugaccaagaccagcguggacugcaccauguacaucugcggcgauuccaccgagugcuccaaccugcugcugcaguacggcagcuucugcacccagcugaauagagcccugacagggaucgccguggaacaggacaagaacacccaagagguguucgcccaagugaagcaaaucuacaagaccccuccuaucaaggacuucggcggcuucaauuucagccagauucugcccgauccuagcaagcccagcaagcggagcuucaucgaggaccugcuguucaacaaagugacacuggccgacgccggcuucaucaagcaguauggcgauugucugggcgacauugccgccagggaucugauuugcgcccagaaguuuaacggacugacagugcugccuccucugcugaccgaugagaugaucgcccaguacacaucugcccugcuggccggcacaaucacaagcggcuggacauuuggagcuggcgccgcucugcagauccccuuugcuaugcagauggccuaccgguucaacggcaucggagugacccagaaugugcuguacgagaaccagaagcugaucgccaaccaguucaacagcgccaucggcaagauccaggacagccugagcagcacagcaagcgcccugggaaagcugcaggacguggucaaccagaaugcccaggcacugaacacccuggucaagcagcuguccuccaacuucggcgccaucagcucugugcugaacgauauccugagcagacuggacaaggucgaggccgaggugcagaucgacagacugaucacaggcagacugcagagccuccagacauacgugacccagcagcugaucagagccgccgagauuagagccucugccaaucuggccgccaccaagaugucugagugugugcugggccagagcaagagaguggacuuuugcggcaagggcuaccaccugaugagcuucccucagucugccccucacggcgugguguuucugcacgugacauaugugugugcucaagagaagaauuucaccaccgcuccagccaucugccacgacggcaaagcccacuuuccuagagaaggcguguucguguccaacggcacccauugguucgugacacagcggaacuucuacgagccccagaucaucaccaccgacaacaccuucgugucuggcaacugcgacguugugaucggcauugugaacaauaccguguacgacccucugcagcccgagcuggacagcggaggaucuggcuauauccccgaggcuccuagagauggccaggccuauguucggaaggauggcgaaugggugcugcugagcaccuuccuuuga

SEQ ID NO: 12182 - RNA, 3534 nt, Artificial Sequence
  SARS-CoV-2/Wuhan/WIV05/2019__EPI_ISL_402128 spike protein CDS gc mod (1-1147)(G889C_L1034C) Foldon construct
auguucguguuucuggugcugcugccccugguguccagccagugugugaaccugaccaccagaacacagcugccuccagccuacaccaacagcuucaccagaggcguguacuaccccgacaagguguucagauccagcgugcugcacucuacccaggaccuguuccugccuuucuucagcaacgugaccugguuccacgccauccacguguccggcaccaauggcaccaagagauucgacaaccccgugcugcccuucaacgacgggguguacuuugccagcaccgagaaguccaacaucaucagaggcuggaucuucggcaccacacuggacagcaagacccagagccugcugaucgugaacaacgccaccaacguggucaucaaagugugcgaguuccaguucugcaacgaccccuuccugggcgucuacuaccacaagaacaacaagagcuggauggaaagcgaguuccggguguacagcagcgccaacaacugcaccuucgaguacgugucccagccuuuccugauggaccuggaaggcaagcagggcaacuucaagaaccugcgcgaguucguguucaagaacaucgacggcuacuucaaaaucuacagcaagcacaccccuaucaaccucgugcgggaucugccucagggcuucucugcucuggaaccccugguggaucugcccaucggcaucaacaucacccgguuucagacacugcuggcccugcacagaagcuaccugacaccuggcgauagcagcagcggauggacagcuggugccgccgcuuacuaugugggcuaccugcagccuagaaccuuccugcugaaguacaacgagaacggcaccaucaccgacgccguggauugugcucuggauccucugagcgagacaaagugcacccugaaguccuucaccguggaaaagggcaucuaccagaccagcaacuuccgggugcagcccaccgaauccaucgugcgguuccccaauaucaccaaucugugccccuucggcgagguguucaaugccaccagauucgccucuguguacgccuggaaccggaagcggaucagcaauugcguggccgacuacuccgugcuguacaacuccgccagcuucagcaccuucaagugcuacggcguguccccuaccaagcugaacgaccugugcuucacaaacguguacgccgacagcuucgugauccggggagaugaagugcggcagauugccccuggacagacaggcaagaucgccgacuacaacuacaagcugcccgacgacuucaccggcugugugauugccuggaacagcaacaaccuggacuccaaagucggcggcaacuacaauuaccuguaccggcuguuccggaaguccaaucugaagcccuucgagcgggacaucagcaccgaaaucuaucaggccggcagcaccccuugcaacggcguggaaggcuucaacugcuacuucccacugcaguccuacggcuuucagcccacaaauggcgugggcuaucagcccuacagagugguggugcugagcuucgaacugcugcaugcuccugccacagugugcggcccuaagaaaagcaccaaucucgugaagaacaaaugcgugaacuucaacuucaacggccugaccggcaccggcgugcugacagagagcaacaagaaguuccugccauuccagcaguuuggccgggauaucgccgauaccacagacgccguuagagauccccagacacuggaaauccuggacaucaccccaugcagcuucggcggagugucugugaucaccccuggcaccaacaccagcaaucagguggcagugcuguaccaggacgugaacuguaccgaagugcccguggccauucacgccgaucagcugacaccuacauggcggguguacuccaccggcagcaauguguuucagaccagagccggcugucugaucggagccgagcacgugaacaauagcuacgagugcgacauccccaucggcgcuggcaucugugccagcuaccagacacagacaaacagccccagacgggcuagaagcguggccagccagagcaucauugccuacacaaugucucugggcgccgagaacagcguggccuacuccaacaacucuaucgcuauccccaccaacuucaccaucagcgugaccaccgagauccugccuguguccaugaccaagaccagcguggacugcaccauguacaucugcggcgauuccaccgagugcuccaaccugcugcugcaguacggcagcuucugcacccagcugaauagagcccugacagggaucgccguggaacaggacaagaacacccaagagguguucgcccaagugaagcaaaucuacaagaccccuccuaucaaggacuucggcggcuucaauuucagccagauucugcccgauccuagcaagcccagcaagcggagcuucaucgaggaccugcuguucaacaaagugacacuggccgacgccggcuucaucaagcaguauggcgauugucugggcgacauugccgccagggaucugauuugcgcccagaaguuuaacggacugacagugcugccuccucugcugaccgaugagaugaucgcccaguacacaucugcccugcuggccggcacaaucacaagcggcuggacauuuugcgcuggcgccgcucugcagauccccuuugcuaugcagauggccuaccgguucaacggcaucggagugacccagaaugugcuguacgagaaccagaagcugaucgccaaccaguucaacagcgccaucggcaagauccaggacagccugagcagcacagcaagcgcccugggaaagcugcaggacguggucaaccagaaugcccaggcacugaacacccuggucaagcagcuguccuccaacuucggcgccaucagcucugugcugaacgauauccugagcagacuggacaaggucgaggccgaggugcagaucgacagacugaucacaggcagacugcagagccuccagacauacgugacccagcagcugaucagagccgccgagauuagagccucugccaaucuggccgccaccaagaugucugaguguguguguggccagagcaagagaguggacuuuugcggcaagggcuaccaccugaugagcuucccucagucugccccucacggcgugguguuucugcacgugacauaugugcccgcucaagagaagaauuucaccaccgcuccagccaucugccacgacggcaaagcccacuuuccuagagaaggcguguucguguccaacggcacccauugguucgugacacagcggaacuucuacgagccccagaucaucaccaccgacaacaccuucgugucuggcaacugcgacguugugaucggcauugugaacaauaccguguacgacccucugcagcccgagcuggacagcggaggaucuggcuauauccccgaggcuccuagagauggccaggccuauguucggaaggauggcgaaugggugcugcugagcaccuuccuuuga

SEQ ID NO: 12183 - RNA, 3534 nt, Artificial Sequence
  SARS-CoV-2/Wuhan/WIV05/2019__EPI_ISL_402128 spike protein CDS gc mod (1-1147)(I909C_Y1047C) Foldon construct
auguucguguuucuggugcugcugccccugguguccagccagugugugaaccugaccaccagaacacagcugccuccagccuacaccaacagcuucaccagaggcguguacuaccccgacaagguguucagauccagcgugcugcacucuacccaggaccuguuccugccuuucuucagcaacgugaccugguuccacgccauccacguguccggcaccaauggcaccaagagauucgacaaccccgugcugcccuucaacgacgggguguacuuugccagcaccgagaaguccaacaucaucagaggcuggaucuucggcaccacacuggacagcaagacccagagccugcugaucgugaacaacgccaccaacguggucaucaaagugugcgaguuccaguucugcaacgaccccuuccugggcgucuacuaccacaagaacaacaagagcuggauggaaagcgaguuccggguguacagcagcgccaacaacugcaccuucgaguacgugucccagccuuuccugauggaccuggaaggcaagcagggcaacuucaagaaccugcgcgaguucguguucaagaacaucgacggcuacuucaaaaucuacagcaagcacaccccuaucaaccucgugcgggaucugccucagggcuucucugcucuggaaccccugguggaucugcccaucggcaucaacaucacccgguuucagacacugcuggcccugcacagaagcuaccugacaccuggcgauagcagcagcggauggacagcuggugccgccgcuuacuaugugggcuaccugcagccuagaaccuuccugcugaaguacaacgagaacggcaccaucaccgacgccguggauugugcucuggauccucugagcgagacaaagugcacccugaaguccuucaccguggaaaagggcaucuaccagaccagcaacuuccgggugcagcccaccgaauccaucgugcgguuccccaauaucaccaaucugugccccuucggcgagguguucaaugccaccagauucgccucuguguacgccuggaaccggaagcggaucagcaauugcguggccgacuacuccgugcuguacaacuccgccagcuucagcaccuucaagugcuacggcguguccccuaccaagcugaacgaccugugcuucacaaacguguacgccgacagcuucgugauccggggagaugaagugcggcagauugccccuggacagacaggcaagaucgccgacuacaacuacaagcugcccgacgacuucaccggcugugugauugccuggaacagcaacaaccuggacuccaaagucggcggcaacuacaauuaccuguaccggcuguuccggaaguccaaucugaagcccuucgagcgggacaucagcaccgaaaucuaucaggccggcagcaccccuugcaacggcguggaaggcuucaacugcuacuucccacugcaguccuacggcuuucagcccacaaauggcgugggcuaucagcccuacagagugguggugcugagcuucgaacugcugcaugcuccugccacagugugcggcccuaagaaaagcaccaaucucgugaagaacaaaugcgugaacuucaacuucaacggccugaccggcaccggcgugcugacagagagcaacaagaaguuccugccauuccagcaguuuggccgggauaucgccgauaccacagacgccguuagagauccccagacacuggaaauccuggacaucaccccaugcagcuucggcggagugucugugaucaccccuggcaccaacaccagcaaucagguggcagugcuguaccaggacgugaacuguaccgaagugcccguggccauucacgccgaucagcugacaccuacauggcggguguacuccaccggcagcaauguguuucagaccagagccggcugucugaucggagccgagcacgugaacaauagcuacgagugcgacauccccaucggcgcuggcaucugugccagcuaccagacacagacaaacagccccagacgggcuagaagcguggccagccagagcaucauugccuacacaaugucucugggcgccgagaacagcguggccuacuccaacaacucuaucgcuauccccaccaacuucaccaucagcgugaccaccgagauccugccuguguccaugaccaagaccagcguggacugcaccauguacaucugcggcgauuccaccgagugcuccaaccugcugcugcaguacggcagcuucugcacccagcugaauagagcccugacagggaucgccguggaacaggacaagaacacccaagagguguucgcccaagugaagcaaaucuacaagaccccuccuaucaaggacuucggcggcuucaauuucagccagauucugcccgauccuagcaagcccagcaagcggagcuucaucgaggaccugcuguucaacaaagugacacuggccgacgccggcuucaucaagcaguauggcgauugucugggcgacauugccgccagggaucugauuugcgcccagaaguuuaacggacugacagugcugccuccucugcugaccgaugagaugaucgcccaguacacaucugcccugcuggccggcacaaucacaagcggcuggacauuuggagcuggcgccgcucugcagauccccuuugcuaugcagauggccuaccgguucaacggcugcggagugacccagaaugugcuguacgagaaccagaagcugaucgccaaccaguucaacagcgccaucggcaagauccaggacagccugagcagcacagcaagcgcccugggaaagcugcaggacguggucaaccagaaugcccaggcacugaacacccuggucaagcagcuguccuccaacuucggcgccaucagcucugugcugaacgauauccugagcagacuggacaaggucgaggccgaggugcagaucgacagacugaucacaggcagacugcagagccuccagacauacgugacccagcagcugaucagagccgccgagauuagagccucugccaaucuggccgccaccaagaugucugagugugugcugggccagagcaagagaguggacuuuugcggcaagggcugucaccugaugagcuucccucagucugccccucacggcgugguguuucugcacgugacauaugugcccgcucaagagaagaauuucaccaccgcuccagccaucugccacgacggcaaagcccacuuuccuagagaaggcguguucguguccaacggcacccauugguucgugacacagcggaacuucuacgagccccagaucaucaccaccgacaacaccuucgugucuggcaacugcgacguugugaucggcauugugaacaauaccguguacgacccucugcagcccgagcuggacagcggaggaucuggcuauauccccgaggcuccuagagauggccaggccuauguucggaaggauggcgaaugggugcugcugagcaccuuccuuuga

SEQ ID NO: 12184 - RNA, 3534 nt, Artificial Sequence
  SARS-CoV-2/Wuhan/WIV05/2019__EPI_ISL_402128 spike protein CDS gc mod (1-1147)(Q965C_S1003C) Foldon construct
auguucguguuucuggugcugcugccccugguguccagccagugugugaaccugaccaccagaacacagcugccuccagccuacaccaacagcuucaccagaggcguguacuaccccgacaagguguucagauccagcgugcugcacucuacccaggaccuguuccugccuuucuucagcaacgugaccugguuccacgccauccacguguccggcaccaauggcaccaagagauucgacaaccccgugcugcccuucaacgacgggguguacuuugccagcaccgagaaguccaacaucaucagaggcuggaucuucggcaccacacuggacagcaagacccagagccugcugaucgugaacaacgccaccaacguggucaucaaagugugcgaguuccaguucugcaacgaccccuuccugggcgucuacuaccacaagaacaacaagagcuggauggaaagcgaguuccggguguacagcagcgccaacaacugcaccuucgaguacgugucccagccuuuccugauggaccuggaaggcaagcagggcaacuucaagaaccugcgcgaguucguguucaagaacaucgacggcuacuucaaaaucuacagcaagcacaccccuaucaaccucgugcgggaucugccucagggcuucucugcucuggaaccccugguggaucugcccaucggcaucaacaucacccgguuucagacacugcuggcccugcacagaagcuaccugacaccuggcgauagcagcagcggauggacagcuggugccgccgcuuacuaugugggcuaccugcagccuagaaccuuccugcugaaguacaacgagaacggcaccaucaccgacgccguggauugugcucuggauccucugagcgagacaaagugcacccugaaguccuucaccguggaaaagggcaucuaccagaccagcaacuuccgggugcagcccaccgaauccaucgugcgguuccccaauaucaccaaucugugccccuucggcgagguguucaaugccaccagauucgccucuguguacgccuggaaccggaagcggaucagcaauugcguggccgacuacuccgugcuguacaacuccgccagcuucagcaccuucaagugcuacggcguguccccuaccaagcugaacgaccugugcuucacaaacguguacgccgacagcuucgugauccggggagaugaagugcggcagauugccccuggacagacaggcaagaucgccgacuacaacuacaagcugcccgacgacuucaccggcugugugauugccuggaacagcaacaaccuggacuccaaagucggcggcaacuacaauuaccuguaccggcuguuccggaaguccaaucugaagcccuucgagcgggacaucagcaccgaaaucuaucaggccggcagcaccccuugcaacggcguggaaggcuucaacugcuacuucccacugcaguccuacggcuuucagcccacaaauggcgugggcuaucagcccuacagagugguggugcugagcuucgaacugcugcaugcuccugccacagugugcggcccuaagaaaagcaccaaucucgugaagaacaaaugcgugaacuucaacuucaacggccugaccggcaccggcgugcugacagagagcaacaagaaguuccugccauuccagcaguuuggccgggauaucgccgauaccacagacgccguuagagauccccagacacuggaaauccuggacaucaccccaugcagcuucggcggagugucugugaucaccccuggcaccaacaccagcaaucagguggcagugcuguaccaggacgugaacuguaccgaagugcccguggccauucacgccgaucagcugacaccuacauggcggguguacuccaccggcagcaauguguuucagaccagagccggcugucugaucggagccgagcacgugaacaauagcuacgagugcgacauccccaucggcgcuggcaucugugccagcuaccagacacagacaaacagccccagacgggcuagaagcguggccagccagagcaucauugccuacacaaugucucugggcgccgagaacagcguggccuacuccaacaacucuaucgcuauccccaccaacuucaccaucagcgugaccaccgagauccugccuguguccaugaccaagaccagcguggacugcaccauguacaucugcggcgauuccaccgagugcuccaaccugcugcugcaguacggcagcuucugcacccagcugaauagagcccugacagggaucgccguggaacaggacaagaacacccaagagguguucgcccaagugaagcaaaucuacaagaccccuccuaucaaggacuucggcggcuucaauuucagccagauucugcccgauccuagcaagcccagcaagcggagcuucaucgaggaccugcuguucaacaaagugacacuggccgacgccggcuucaucaagcaguauggcgauugucugggcgacauugccgccagggaucugauuugcgcccagaaguuuaacggacugacagugcugccuccucugcugaccgaugagaugaucgcccaguacacaucugcccugcuggccggcacaaucacaagcggcuggacauuuggagcuggcgccgcucugcagauccccuuugcuaugcagauggccuaccgguucaacggcaucggagugacccagaaugugcuguacgagaaccagaagcugaucgccaaccaguucaacagcgccaucggcaagauccaggacagccugagcagcacagcaagcgcccugggaaagcugcaggacguggucaaccagaaugcccaggcacugaacacccuggucaagugccuguccuccaacuucggcgccaucagcucugugcugaacgauauccugagcagacuggacaaggucgaggccgaggugcagaucgacagacugaucacaggcagacugcagugucuccagacauacgugacccagcagcugaucagagccgccgagauuagagccucugccaaucuggccgccaccaagaugucugagugugugcugggccagagcaagagaguggacuuuugcggcaagggcuaccaccugaugagcuucccucagucugccccucacggcgugguguuucugcacgugacauaugugcccgcucaagagaagaauuucaccaccgcuccagccaucugccacgacggcaaagcccacuuuccuagagaaggcguguucguguccaacggcacccauugguucgugacacagcggaacuucuacgagccccagaucaucaccaccgacaacaccuucgugucuggcaacugcgacguugugaucggcauugugaacaauaccguguacgacccucugcagcccgagcuggacagcggaggaucuggcuauauccccgaggcuccuagagauggccaggccuauguucggaaggauggcgaaugggugcugcugagcaccuuccuuuga

SEQ ID NO: 12185 - RNA, 3534 nt, Artificial Sequence
  SARS-CoV-2/Wuhan/WIV05/2019__EPI_ISL_402128 spike protein CDS gc mod (1-1147)(F970C_G999C) Foldon construct
auguucguguuucuggugcugcugccccugguguccagccagugugugaaccugaccaccagaacacagcugccuccagccuacaccaacagcuucaccagaggcguguacuaccccgacaagguguucagauccagcgugcugcacucuacccaggaccuguuccugccuuucuucagcaacgugaccugguuccacgccauccacguguccggcaccaauggcaccaagagauucgacaaccccgugcugcccuucaacgacgggguguacuuugccagcaccgagaaguccaacaucaucagaggcuggaucuucggcaccacacuggacagcaagacccagagccugcugaucgugaacaacgccaccaacguggucaucaaagugugcgaguuccaguucugcaacgaccccuuccugggcgucuacuaccacaagaacaacaagagcuggauggaaagcgaguuccggguguacagcagcgccaacaacugcaccuucgaguacgugucccagccuuuccugauggaccuggaaggcaagcagggcaacuucaagaaccugcgcgaguucguguucaagaacaucgacggcuacuucaaaaucuacagcaagcacaccccuaucaaccucgugcgggaucugccucagggcuucucugcucuggaaccccugguggaucugcccaucggcaucaacaucacccgguuucagacacugcuggcccugcacagaagcuaccugacaccuggcgauagcagcagcggauggacagcuggugccgccgcuuacuaugugggcuaccugcagccuagaaccuuccugcugaaguacaacgagaacggcaccaucaccgacgccguggauugugcucuggauccucugagcgagacaaagugcacccugaaguccuucaccguggaaaagggcaucuaccagaccagcaacuuccgggugcagcccaccgaauccaucgugcgguuccccaauaucaccaaucugugccccuucggcgagguguucaaugccaccagauucgccucuguguacgccuggaaccggaagcggaucagcaauugcguggccgacuacuccgugcuguacaacuccgccagcuucagcaccuucaagugcuacggcguguccccuaccaagcugaacgaccugugcuucacaaacguguacgccgacagcuucgugauccggggagaugaagugcggcagauugccccuggacagacaggcaagaucgccgacuacaacuacaagcugcccgacgacuucaccggcugugugauugccuggaacagcaacaaccuggacuccaaagucggcggcaacuacaauuaccuguaccggcuguuccggaaguccaaucugaagcccuucgagcgggacaucagcaccgaaaucuaucaggccggcagcaccccuugcaacggcguggaaggcuucaacugcuacuucccacugcaguccuacggcuuucagcccacaaauggcgugggcuaucagcccuacagagugguggugcugagcuucgaacugcugcaugcuccugccacagugugcggcccuaagaaaagcaccaaucucgugaagaacaaaugcgugaacuucaacuucaacggccugaccggcaccggcgugcugacagagagcaacaagaaguuccugccauuccagcaguuuggccgggauaucgccgauaccacagacgccguuagagauccccagacacuggaaauccuggacaucaccccaugcagcuucggcggagugucugugaucaccccuggcaccaacaccagcaaucagguggcagugcuguaccaggacgugaacuguaccgaagugcccguggccauucacgccgaucagcugacaccuacauggcggguguacuccaccggcagcaauguguuucagaccagagccggcugucugaucggagccgagcacgugaacaauagcuacgagugcgacauccccaucggcgcuggcaucugugccagcuaccagacacagacaaacagccccagacgggcuagaagcguggccagccagagcaucauugccuacacaaugucucugggcgccgagaacagcguggccuacuccaacaacucuaucgcuauccccaccaacuucaccaucagcgugaccaccgagauccugccuguguccaugaccaagaccagcguggacugcaccauguacaucugcggcgauuccaccgagugcuccaaccugcugcugcaguacggcagcuucugcacccagcugaauagagcccugacagggaucgccguggaacaggacaagaacacccaagagguguucgcccaagugaagcaaaucuacaagaccccuccuaucaaggacuucggcggcuucaauuucagccagauucugcccgauccuagcaagcccagcaagcggagcuucaucgaggaccugcuguucaacaaagugacacuggccgacgccggcuucaucaagcaguauggcgauugucugggcgacauugccgccagggaucugauuugcgcccagaaguuuaacggacugacagugcugccuccucugcugaccgaugagaugaucgcccaguacacaucugcccugcuggccggcacaaucacaagcggcuggacauuuggagcuggcgccgcucugcagauccccuuugcuaugcagauggccuaccgguucaacggcaucggagugacccagaaugugcuguacgagaaccagaagcugaucgccaaccaguucaacagcgccaucggcaagauccaggacagccugagcagcacagcaagcgcccugggaaagcugcaggacguggucaaccagaaugcccaggcacugaacacccuggucaagcagcuguccuccaacugcggcgccaucagcucugugcugaacgauauccugagcagacuggacaaggucgaggccgaggugcagaucgacagacugaucacauguagacugcagagccuccagacauacgugacccagcagcugaucagagccgccgagauuagagccucugccaaucuggccgccaccaagaugucugagugugugcugggccagagcaagagaguggacuuuugcggcaagggcuaccaccugaugagcuucccucagucugccccucacggcgugguguuucugcacgugacauaugugcccgcucaagagaagaauuucaccaccgcuccagccaucugccacgacggcaaagcccacuuuccuagagaaggcguguucguguccaacggcacccauugguucgugacacagcggaacuucuacgagccccagaucaucaccaccgacaacaccuucgugucuggcaacugcgacguugugaucggcauugugaacaauaccguguacgacccucugcagcccgagcuggacagcggaggaucuggcuauauccccgaggcuccuagagauggccaggccuauguucggaaggauggcgaaugggugcugcugagcaccuuccuuuga

SEQ ID NO: 12186 - RNA, 3534 nt, Artificial Sequence
  SARS-CoV-2/Wuhan/WIV05/2019__EPI_ISL_402128 spike protein CDS gc mod (1-1147)(A972C_R995C) Foldon construct
auguucguguuucuggugcugcugccccugguguccagccagugugugaaccugaccaccagaacacagcugccuccagccuacaccaacagcuucaccagaggcguguacuaccccgacaagguguucagauccagcgugcugcacucuacccaggaccuguuccugccuuucuucagcaacgugaccugguuccacgccauccacguguccggcaccaauggcaccaagagauucgacaaccccgugcugcccuucaacgacgggguguacuuugccagcaccgagaaguccaacaucaucagaggcuggaucuucggcaccacacuggacagcaagacccagagccugcugaucgugaacaacgccaccaacguggucaucaaagugugcgaguuccaguucugcaacgaccccuuccugggcgucuacuaccacaagaacaacaagagcuggauggaaagcgaguuccggguguacagcagcgccaacaacugcaccuucgaguacgugucccagccuuuccugauggaccuggaaggcaagcagggcaacuucaagaaccugcgcgaguucguguucaagaacaucgacggcuacuucaaaaucuacagcaagcacaccccuaucaaccucgugcgggaucugccucagggcuucucugcucuggaaccccugguggaucugcccaucggcaucaacaucacccgguuucagacacugcuggcccugcacagaagcuaccugacaccuggcgauagcagcagcggauggacagcuggugccgccgcuuacuaugugggcuaccugcagccuagaaccuuccugcugaaguacaacgagaacggcaccaucaccgacgccguggauugugcucuggauccucugagcgagacaaagugcacccugaaguccuucaccguggaaaagggcaucuaccagaccagcaacuuccgggugcagcccaccgaauccaucgugcgguuccccaauaucaccaaucugugccccuucggcgagguguucaaugccaccagauucgccucuguguacgccuggaaccggaagcggaucagcaauugcguggccgacuacuccgugcuguacaacuccgccagcuucagcaccuucaagugcuacggcguguccccuaccaagcugaacgaccugugcuucacaaacguguacgccgacagcuucgugauccggggagaugaagugcggcagauugccccuggacagacaggcaagaucgccgacuacaacuacaagcugcccgacgacuucaccggcugugugauugccuggaacagcaacaaccuggacuccaaagucggcggcaacuacaauuaccuguaccggcuguuccggaaguccaaucugaagcccuucgagcgggacaucagcaccgaaaucuaucaggccggcagcaccccuugcaacggcguggaaggcuucaacugcuacuucccacugcaguccuacggcuuucagcccacaaauggcgugggcuaucagcccuacagagugguggugcugagcuucgaacugcugcaugcuccugccacagugugcggcccuaagaaaagcaccaaucucgugaagaacaaaugcgugaacuucaacuucaacggccugaccggcaccggcgugcugacagagagcaacaagaaguuccugccauuccagcaguuuggccgggauaucgccgauaccacagacgccguuagagauccccagacacuggaaauccuggacaucaccccaugcagcuucggcggagugucugugaucaccccuggcaccaacaccagcaaucagguggcagugcuguaccaggacgugaacuguaccgaagugcccguggccauucacgccgaucagcugacaccuacauggcggguguacuccaccggcagcaauguguuucagaccagagccggcugucugaucggagccgagcacgugaacaauagcuacgagugcgacauccccaucggcgcuggcaucugugccagcuaccagacacagacaaacagccccagacgggcuagaagcguggccagccagagcaucauugccuacacaaugucucugggcgccgagaacagcguggccuacuccaacaacucuaucgcuauccccaccaacuucaccaucagcgugaccaccgagauccugccuguguccaugaccaagaccagcguggacugcaccauguacaucugcggcgauuccaccgagugcuccaaccugcugcugcaguacggcagcuucugcacccagcugaauagagcccugacagggaucgccguggaacaggacaagaacacccaagagguguucgcccaagugaagcaaaucuacaagaccccuccuaucaaggacuucggcggcuucaauuucagccagauucugcccgauccuagcaagcccagcaagcggagcuucaucgaggaccugcuguucaacaaagugacacuggccgacgccggcuucaucaagcaguauggcgauugucugggcgacauugccgccagggaucugauuugcgcccagaaguuuaacggacugacagugcugccuccucugcugaccgaugagaugaucgcccaguacacaucugcccugcuggccggcacaaucacaagcggcuggacauuuggagcuggcgccgcucugcagauccccuuugcuaugcagauggccuaccgguucaacggcaucggagugacccagaaugugcuguacgagaaccagaagcugaucgccaaccaguucaacagcgccaucggcaagauccaggacagccugagcagcacagcaagcgcccugggaaagcugcaggacguggucaaccagaaugcccaggcacugaacacccuggucaagcagcuguccuccaacuucggcugcaucagcucugugcugaacgauauccugagcagacuggacaaggucgaggccgaggugcagaucgacugucugaucacaggcagacugcagagccuccagacauacgugacccagcagcugaucagagccgccgagauuagagccucugccaaucuggccgccaccaagaugucugagugugugcugggccagagcaagagaguggacuuuugcggcaagggcuaccaccugaugagcuucccucagucugccccucacggcgugguguuucugcacgugacauaugugcccgcucaagagaagaauuucaccaccgcuccagccaucugccacgacggcaaagcccacuuuccuagagaaggcguguucguguccaacggcacccauugguucgugacacagcggaacuucuacgagccccagaucaucaccaccgacaacaccuucgugucuggcaacugcgacguugugaucggcauugugaacaauaccguguacgacccucugcagcccgagcuggacagcggaggaucuggcuauauccccgaggcuccuagagauggccaggccuauguucggaaggauggcgaaugggugcugcugagcaccuuccuuuga

SEQ ID NO: 12187 - RNA, 3534 nt, Artificial Sequence
  SARS-CoV-2/Wuhan/WIV05/2019__EPI_ISL_402128 spike protein CDS gc mod (1-1147)(A890C_V1040C) Foldon construct
auguucguguuucuggugcugcugccccugguguccagccagugugugaaccugaccaccagaacacagcugccuccagccuacaccaacagcuucaccagaggcguguacuaccccgacaagguguucagauccagcgugcugcacucuacccaggaccuguuccugccuuucuucagcaacgugaccugguuccacgccauccacguguccggcaccaauggcaccaagagauucgacaaccccgugcugcccuucaacgacgggguguacuuugccagcaccgagaaguccaacaucaucagaggcuggaucuucggcaccacacuggacagcaagacccagagccugcugaucgugaacaacgccaccaacguggucaucaaagugugcgaguuccaguucugcaacgaccccuuccugggcgucuacuaccacaagaacaacaagagcuggauggaaagcgaguuccggguguacagcagcgccaacaacugcaccuucgaguacgugucccagccuuuccugauggaccuggaaggcaagcagggcaacuucaagaaccugcgcgaguucguguucaagaacaucgacggcuacuucaaaaucuacagcaagcacaccccuaucaaccucgugcgggaucugccucagggcuucucugcucuggaaccccugguggaucugcccaucggcaucaacaucacccgguuucagacacugcuggcccugcacagaagcuaccugacaccuggcgauagcagcagcggauggacagcuggugccgccgcuuacuaugugggcuaccugcagccuagaaccuuccugcugaaguacaacgagaacggcaccaucaccgacgccguggauugugcucuggauccucugagcgagacaaagugcacccugaaguccuucaccguggaaaagggcaucuaccagaccagcaacuuccgggugcagcccaccgaauccaucgugcgguuccccaauaucaccaaucugugccccuucggcgagguguucaaugccaccagauucgccucuguguacgccuggaaccggaagcggaucagcaauugcguggccgacuacuccgugcuguacaacuccgccagcuucagcaccuucaagugcuacggcguguccccuaccaagcugaacgaccugugcuucacaaacguguacgccgacagcuucgugauccggggagaugaagugcggcagauugccccuggacagacaggcaagaucgccgacuacaacuacaagcugcccgacgacuucaccggcugugugauugccuggaacagcaacaaccuggacuccaaagucggcggcaacuacaauuaccuguaccggcuguuccggaaguccaaucugaagcccuucgagcgggacaucagcaccgaaaucuaucaggccggcagcaccccuugcaacggcguggaaggcuucaacugcuacuucccacugcaguccuacggcuuucagcccacaaauggcgugggcuaucagcccuacagagugguggugcugagcuucgaacugcugcaugcuccugccacagugugcggcccuaagaaaagcaccaaucucgugaagaacaaaugcgugaacuucaacuucaacggccugaccggcaccggcgugcugacagagagcaacaagaaguuccugccauuccagcaguuuggccgggauaucgccgauaccacagacgccguuagagauccccagacacuggaaauccuggacaucaccccaugcagcuucggcggagugucugugaucaccccuggcaccaacaccagcaaucagguggcagugcuguaccaggacgugaacuguaccgaagugcccguggccauucacgccgaucagcugacaccuacauggcggguguacuccaccggcagcaauguguuucagaccagagccggcugucugaucggagccgagcacgugaacaauagcuacgagugcgacauccccaucggcgcuggcaucugugccagcuaccagacacagacaaacagccccagacgggcuagaagcguggccagccagagcaucauugccuacacaaugucucugggcgccgagaacagcguggccuacuccaacaacucuaucgcuauccccaccaacuucaccaucagcgugaccaccgagauccugccuguguccaugaccaagaccagcguggacugcaccauguacaucugcggcgauuccaccgagugcuccaaccugcugcugcaguacggcagcuucugcacccagcugaauagagcccugacagggaucgccguggaacaggacaagaacacccaagagguguucgcccaagugaagcaaaucuacaagaccccuccuaucaaggacuucggcggcuucaauuucagccagauucugcccgauccuagcaagcccagcaagcggagcuucaucgaggaccugcuguucaacaaagugacacuggccgacgccggcuucaucaagcaguauggcgauugucugggcgacauugccgccagggaucugauuugcgcccagaaguuuaacggacugacagugcugccuccucugcugaccgaugagaugaucgcccaguacacaucugcccugcuggccggcacaaucacaagcggcuggacauuuggaugcggcgccgcucugcagauccccuuugcuaugcagauggccuaccgguucaacggcaucggagugacccagaaugugcuguacgagaaccagaagcugaucgccaaccaguucaacagcgccaucggcaagauccaggacagccugagcagcacagcaagcgcccugggaaagcugcaggacguggucaaccagaaugcccaggcacugaacacccuggucaagcagcuguccuccaacuucggcgccaucagcucugugcugaacgauauccugagcagacuggacaaggucgaggccgaggugcagaucgacagacugaucacaggcagacugcagagccuccagacauacgugacccagcagcugaucagagccgccgagauuagagccucugccaaucuggccgccaccaagaugucugagugugugcugggccagagcaagagaugugacuuuugcggcaagggcuaccaccugaugagcuucccucagucugccccucacggcgugguguuucugcacgugacauaugugcccgcucaagagaagaauuucaccaccgcuccagccaucugccacgacggcaaagcccacuuuccuagagaaggcguguucguguccaacggcacccauugguucgugacacagcggaacuucuacgagccccagaucaucaccaccgacaacaccuucgugucuggcaacugcgacguugugaucggcauugugaacaauaccguguacgacccucugcagcccgagcuggacagcggaggaucuggcuauauccccgaggcuccuagagauggccaggccuauguucggaaggauggcgaaugggugcugcugagcaccuuccuuuga

SEQ ID NO: 12188 - RNA, 3534 nt, Artificial Sequence
  SARS-CoV-2/Wuhan/WIV05/2019__EPI_ISL_402128 spike protein CDS gc mod (1-1147)(T874C_S1055C) Foldon construct
auguucguguuucuggugcugcugccccugguguccagccagugugugaaccugaccaccagaacacagcugccuccagccuacaccaacagcuucaccagaggcguguacuaccccgacaagguguucagauccagcgugcugcacucuacccaggaccuguuccugccuuucuucagcaacgugaccugguuccacgccauccacguguccggcaccaauggcaccaagagauucgacaaccccgugcugcccuucaacgacgggguguacuuugccagcaccgagaaguccaacaucaucagaggcuggaucuucggcaccacacuggacagcaagacccagagccugcugaucgugaacaacgccaccaacguggucaucaaagugugcgaguuccaguucugcaacgaccccuuccugggcgucuacuaccacaagaacaacaagagcuggauggaaagcgaguuccggguguacagcagcgccaacaacugcaccuucgaguacgugucccagccuuuccugauggaccuggaaggcaagcagggcaacuucaagaaccugcgcgaguucguguucaagaacaucgacggcuacuucaaaaucuacagcaagcacaccccuaucaaccucgugcgggaucugccucagggcuucucugcucuggaaccccugguggaucugcccaucggcaucaacaucacccgguuucagacacugcuggcccugcacagaagcuaccugacaccuggcgauagcagcagcggauggacagcuggugccgccgcuuacuaugugggcuaccugcagccuagaaccuuccugcugaaguacaacgagaacggcaccaucaccgacgccguggauugugcucuggauccucugagcgagacaaagugcacccugaaguccuucaccguggaaaagggcaucuaccagaccagcaacuuccgggugcagcccaccgaauccaucgugcgguuccccaauaucaccaaucugugccccuucggcgagguguucaaugccaccagauucgccucuguguacgccuggaaccggaagcggaucagcaauugcguggccgacuacuccgugcuguacaacuccgccagcuucagcaccuucaagugcuacggcguguccccuaccaagcugaacgaccugugcuucacaaacguguacgccgacagcuucgugauccggggagaugaagugcggcagauugccccuggacagacaggcaagaucgccgacuacaacuacaagcugcccgacgacuucaccggcugugugauugccuggaacagcaacaaccuggacuccaaagucggcggcaacuacaauuaccuguaccggcuguuccggaaguccaaucugaagcccuucgagcgggacaucagcaccgaaaucuaucaggccggcagcaccccuugcaacggcguggaaggcuucaacugcuacuucccacugcaguccuacggcuuucagcccacaaauggcgugggcuaucagcccuacagagugguggugcugagcuucgaacugcugcaugcuccugccacagugugcggcccuaagaaaagcaccaaucucgugaagaacaaaugcgugaacuucaacuucaacggccugaccggcaccggcgugcugacagagagcaacaagaaguuccugccauuccagcaguuuggccgggauaucgccgauaccacagacgccguuagagauccccagacacuggaaauccuggacaucaccccaugcagcuucggcggagugucugugaucaccccuggcaccaacaccagcaaucagguggcagugcuguaccaggacgugaacuguaccgaagugcccguggccauucacgccgaucagcugacaccuacauggcggguguacuccaccggcagcaauguguuucagaccagagccggcugucugaucggagccgagcacgugaacaauagcuacgagugcgacauccccaucggcgcuggcaucugugccagcuaccagacacagacaaacagccccagacgggcuagaagcguggccagccagagcaucauugccuacacaaugucucugggcgccgagaacagcguggccuacuccaacaacucuaucgcuauccccaccaacuucaccaucagcgugaccaccgagauccugccuguguccaugaccaagaccagcguggacugcaccauguacaucugcggcgauuccaccgagugcuccaaccugcugcugcaguacggcagcuucugcacccagcugaauagagcccugacagggaucgccguggaacaggacaagaacacccaagagguguucgcccaagugaagcaaaucuacaagaccccuccuaucaaggacuucggcggcuucaauuucagccagauucugcccgauccuagcaagcccagcaagcggagcuucaucgaggaccugcuguucaacaaagugacacuggccgacgccggcuucaucaagcaguauggcgauugucugggcgacauugccgccagggaucugauuugcgcccagaaguuuaacggacugacagugcugccuccucugcugaccgaugagaugaucgcccaguacugcucugcccugcuggccggcacaaucacaagcggcuggacauuuggagcuggcgccgcucugcagauccccuuugcuaugcagauggccuaccgguucaacggcaucggagugacccagaaugugcuguacgagaaccagaagcugaucgccaaccaguucaacagcgccaucggcaagauccaggacagccugagcagcacagcaagcgcccugggaaagcugcaggacguggucaaccagaaugcccaggcacugaacacccuggucaagcagcuguccuccaacuucggcgccaucagcucugugcugaacgauauccugagcagacuggacaaggucgaggccgaggugcagaucgacagacugaucacaggcagacugcagagccuccagacauacgugacccagcagcugaucagagccgccgagauuagagccucugccaaucuggccgccaccaagaugucugagugugugcugggccagagcaagagaguggacuuuugcggcaagggcuaccaccugaugagcuucccucagugcgccccucacggcgugguguuucugcacgugacauaugugcccgcucaagagaagaauuucaccaccgcuccagccaucugccacgacggcaaagcccacuuuccuagagaaggcguguucguguccaacggcacccauugguucgugacacagcggaacuucuacgagccccagaucaucaccaccgacaacaccuucgugucuggcaacugcgacguugugaucggcauugugaacaauaccguguacgacccucugcagcccgagcuggacagcggaggaucuggcuauauccccgaggcuccuagagauggccaggccuauguucggaaggauggcgaaugggugcugcugagcaccuuccuuuga

SEQ ID NO: 12189 - RNA, 3906 nt, Artificial Sequence
  SARS-CoV-2/Wuhan/WIV05/2019__EPI_ISL_402128 spike protein CDS gc mod (1-1147) WhcAg construct
auguucguguuucuggugcugcugccccugguguccagccagugugugaaccugaccaccagaacacagcugccuccagccuacaccaacagcuucaccagaggcguguacuaccccgacaagguguucagauccagcgugcugcacucuacccaggaccuguuccugccuuucuucagcaacgugaccugguuccacgccauccacguguccggcaccaauggcaccaagagauucgacaaccccgugcugcccuucaacgacgggguguacuuugccagcaccgagaaguccaacaucaucagaggcuggaucuucggcaccacacuggacagcaagacccagagccugcugaucgugaacaacgccaccaacguggucaucaaagugugcgaguuccaguucugcaacgaccccuuccugggcgucuacuaccacaagaacaacaagagcuggauggaaagcgaguuccggguguacagcagcgccaacaacugcaccuucgaguacgugucccagccuuuccugauggaccuggaaggcaagcagggcaacuucaagaaccugcgcgaguucguguucaagaacaucgacggcuacuucaaaaucuacagcaagcacaccccuaucaaccucgugcgggaucugccucagggcuucucugcucuggaaccccugguggaucugcccaucggcaucaacaucacccgguuucagacacugcuggcccugcacagaagcuaccugacaccuggcgauagcagcagcggauggacagcuggugccgccgcuuacuaugugggcuaccugcagccuagaaccuuccugcugaaguacaacgagaacggcaccaucaccgacgccguggauugugcucuggauccucugagcgagacaaagugcacccugaaguccuucaccguggaaaagggcaucuaccagaccagcaacuuccgggugcagcccaccgaauccaucgugcgguuccccaauaucaccaaucugugccccuucggcgagguguucaaugccaccagauucgccucuguguacgccuggaaccggaagcggaucagcaauugcguggccgacuacuccgugcuguacaacuccgccagcuucagcaccuucaagugcuacggcguguccccuaccaagcugaacgaccugugcuucacaaacguguacgccgacagcuucgugauccggggagaugaagugcggcagauugccccuggacagacaggcaagaucgccgacuacaacuacaagcugcccgacgacuucaccggcugugugauugccuggaacagcaacaaccuggacuccaaagucggcggcaacuacaauuaccuguaccggcuguuccggaaguccaaucugaagcccuucgagcgggacaucagcaccgaaaucuaucaggccggcagcaccccuugcaacggcguggaaggcuucaacugcuacuucccacugcaguccuacggcuuucagcccacaaauggcgugggcuaucagcccuacagagugguggugcugagcuucgaacugcugcaugcuccugccacagugugcggcccuaagaaaagcaccaaucucgugaagaacaaaugcgugaacuucaacuucaacggccugaccggcaccggcgugcugacagagagcaacaagaaguuccugccauuccagcaguuuggccgggauaucgccgauaccacagacgccguuagagauccccagacacuggaaauccuggacaucaccccaugcagcuucggcggagugucugugaucaccccuggcaccaacaccagcaaucagguggcagugcuguaccaggacgugaacuguaccgaagugcccguggccauucacgccgaucagcugacaccuacauggcggguguacuccaccggcagcaauguguuucagaccagagccggcugucugaucggagccgagcacgugaacaauagcuacgagugcgacauccccaucggcgcuggcaucugugccagcuaccagacacagacaaacagccccagacgggcuagaagcguggccagccagagcaucauugccuacacaaugucucugggcgccgagaacagcguggccuacuccaacaacucuaucgcuauccccaccaacuucaccaucagcgugaccaccgagauccugccuguguccaugaccaagaccagcguggacugcaccauguacaucugcggcgauuccaccgagugcuccaaccugcugcugcaguacggcagcuucugcacccagcugaauagagcccugacagggaucgccguggaacaggacaagaacacccaagagguguucgcccaagugaagcaaaucuacaagaccccuccuaucaaggacuucggcggcuucaauuucagccagauucugcccgauccuagcaagcccagcaagcggagcuucaucgaggaccugcuguucaacaaagugacacuggccgacgccggcuucaucaagcaguauggcgauugucugggcgacauugccgccagggaucugauuugcgcccagaaguuuaacggacugacagugcugccuccucugcugaccgaugagaugaucgcccaguacacaucugcccugcuggccggcacaaucacaagcggcuggacauuuggagcuggcgccgcucugcagauccccuuugcuaugcagauggccuaccgguucaacggcaucggagugacccagaaugugcuguacgagaaccagaagcugaucgccaaccaguucaacagcgccaucggcaagauccaggacagccugagcagcacagcaagcgcccugggaaagcugcaggacguggucaaccagaaugcccaggcacugaacacccuggucaagcagcuguccuccaacuucggcgccaucagcucugugcugaacgauauccugagcagacuggacaaggucgaggccgaggugcagaucgacagacugaucacaggcagacugcagagccuccagacauacgugacccagcagcugaucagagccgccgagauuagagccucugccaaucuggccgccaccaagaugucugagugugugcugggccagagcaagagaguggacuuuugcggcaagggcuaccaccugaugagcuucccucagucugccccucacggcgugguguuucugcacgugacauaugugcccgcucaagagaagaauuucaccaccgcuccagccaucugccacgacggcaaagcccacuuuccuagagaaggcguguucguguccaacggcacccauugguucgugacacagcggaacuucuacgagccccagaucaucaccaccgacaacaccuucgugucuggcaacugcgacguugugaucggcauugugaacaauaccguguacgacccucugcagcccgagcuggacagcggaggcggaggaucugacaucgaccccuacaaagaguucggcagcagcuaccagcugcugaacuuccugccucuggacuucuuccccgaccugaacgcccugguggauacagccacagcucuguacgaggaagaacugaccggcagagagcacugcagcccucaccacacagccauuagacaggcccucgugugcugggacgagcugacaaaacugaucgccuggaugagcagcaacaucaccagcgagcaagugcggaccaucaucgugaaccacgugaacgauaccuggggccugaaagugcggcagagccugugguuucaccugagcugucugaccuucggccagcacaccgugcaagaguuucugguguccuucggcguguggaucagaaccccugcuccauacagaccuccaaacgcucccauccugagcacccugccugagcacacagugaucuguuga

SEQ ID NO: 12190 - RNA, 3906 nt, Artificial Sequence
  SARS-CoV-2/Wuhan/WIV05/2019__EPI_ISL_402128 spike protein CDS gc mod (1-1147)(K986P_V987P) WhcAg construct
auguucguguuucuggugcugcugccccugguguccagccagugugugaaccugaccaccagaacacagcugccuccagccuacaccaacagcuucaccagaggcguguacuaccccgacaagguguucagauccagcgugcugcacucuacccaggaccuguuccugccuuucuucagcaacgugaccugguuccacgccauccacguguccggcaccaauggcaccaagagauucgacaaccccgugcugcccuucaacgacgggguguacuuugccagcaccgagaaguccaacaucaucagaggcuggaucuucggcaccacacuggacagcaagacccagagccugcugaucgugaacaacgccaccaacguggucaucaaagugugcgaguuccaguucugcaacgaccccuuccugggcgucuacuaccacaagaacaacaagagcuggauggaaagcgaguuccggguguacagcagcgccaacaacugcaccuucgaguacgugucccagccuuuccugauggaccuggaaggcaagcagggcaacuucaagaaccugcgcgaguucguguucaagaacaucgacggcuacuucaaaaucuacagcaagcacaccccuaucaaccucgugcgggaucugccucagggcuucucugcucuggaaccccugguggaucugcccaucggcaucaacaucacccgguuucagacacugcuggcccugcacagaagcuaccugacaccuggcgauagcagcagcggauggacagcuggugccgccgcuuacuaugugggcuaccugcagccuagaaccuuccugcugaaguacaacgagaacggcaccaucaccgacgccguggauugugcucuggauccucugagcgagacaaagugcacccugaaguccuucaccguggaaaagggcaucuaccagaccagcaacuuccgggugcagcccaccgaauccaucgugcgguuccccaauaucaccaaucugugccccuucggcgagguguucaaugccaccagauucgccucuguguacgccuggaaccggaagcggaucagcaauugcguggccgacuacuccgugcuguacaacuccgccagcuucagcaccuucaagugcuacggcguguccccuaccaagcugaacgaccugugcuucacaaacguguacgccgacagcuucgugauccggggagaugaagugcggcagauugccccuggacagacaggcaagaucgccgacuacaacuacaagcugcccgacgacuucaccggcugugugauugccuggaacagcaacaaccuggacuccaaagucggcggcaacuacaauuaccuguaccggcuguuccggaaguccaaucugaagcccuucgagcgggacaucagcaccgaaaucuaucaggccggcagcaccccuugcaacggcguggaaggcuucaacugcuacuucccacugcaguccuacggcuuucagcccacaaauggcgugggcuaucagcccuacagagugguggugcugagcuucgaacugcugcaugcuccugccacagugugcggcccuaagaaaagcaccaaucucgugaagaacaaaugcgugaacuucaacuucaacggccugaccggcaccggcgugcugacagagagcaacaagaaguuccugccauuccagcaguuuggccgggauaucgccgauaccacagacgccguuagagauccccagacacuggaaauccuggacaucaccccaugcagcuucggcggagugucugugaucaccccuggcaccaacaccagcaaucagguggcagugcuguaccaggacgugaacuguaccgaagugcccguggccauucacgccgaucagcugacaccuacauggcggguguacuccaccggcagcaauguguuucagaccagagccggcugucugaucggagccgagcacgugaacaauagcuacgagugcgacauccccaucggcgcuggcaucugugccagcuaccagacacagacaaacagccccagacgggcuagaagcguggccagccagagcaucauugccuacacaaugucucugggcgccgagaacagcguggccuacuccaacaacucuaucgcuauccccaccaacuucaccaucagcgugaccaccgagauccugccuguguccaugaccaagaccagcguggacugcaccauguacaucugcggcgauuccaccgagugcuccaaccugcugcugcaguacggcagcuucugcacccagcugaauagagcccugacagggaucgccguggaacaggacaagaacacccaagagguguucgcccaagugaagcaaaucuacaagaccccuccuaucaaggacuucggcggcuucaauuucagccagauucugcccgauccuagcaagcccagcaagcggagcuucaucgaggaccugcuguucaacaaagugacacuggccgacgccggcuucaucaagcaguauggcgauugucugggcgacauugccgccagggaucugauuugcgcccagaaguuuaacggacugacagugcugccuccucugcugaccgaugagaugaucgcccaguacacaucugcccugcuggccggcacaaucacaagcggcuggacauuuggagcuggcgccgcucugcagauccccuuugcuaugcagauggccuaccgguucaacggcaucggagugacccagaaugugcuguacgagaaccagaagcugaucgccaaccaguucaacagcgccaucggcaagauccaggacagccugagcagcacagcaagcgcccugggaaagcugcaggacguggucaaccagaaugcccaggcacugaacacccuggucaagcagcuguccuccaacuucggcgccaucagcucugugcugaacgauauccugagcagacuggacccuccugaggccgaggugcagaucgacagacugaucacaggcagacugcagagccuccagacauacgugacccagcagcugaucagagccgccgagauuagagccucugccaaucuggccgccaccaagaugucugagugugugcugggccagagcaagagaguggacuuuugcggcaagggcuaccaccugaugagcuucccucagucugccccucacggcgugguguuucugcacgugacauaugugcccgcucaagagaagaauuucaccaccgcuccagccaucugccacgacggcaaagcccacuuuccuagagaaggcguguucguguccaacggcacccauugguucgugacacagcggaacuucuacgagccccagaucaucaccaccgacaacaccuucgugucuggcaacugcgacguugugaucggcauugugaacaauaccguguacgacccucugcagcccgagcuggacagcggaggcggaggaucugacaucgaccccuacaaagaguucggcagcagcuaccagcugcugaacuuccugccucuggacuucuuccccgaccugaacgcccugguggauacagccacagcucuguacgaggaagaacugaccggcagagagcacugcagcccucaccacacagccauuagacaggcccucgugugcugggacgagcugacaaaacugaucgccuggaugagcagcaacaucaccagcgagcaagugcggaccaucaucgugaaccacgugaacgauaccuggggccugaaagugcggcagagccugugguuucaccugagcugucugaccuucggccagcacaccgugcaagaguuucugguguccuucggcguguggaucagaaccccugcuccauacagaccuccaaacgcucccauccugagcacccugccugagcacacagugaucuguuga

SEQ ID NO: 12191 - RNA, 3906 nt, Artificial Sequence
  SARS-CoV-2/Wuhan/WIV05/2019__EPI_ISL_402128 spike protein CDS gc mod (1-1147)(K986P_V987P_T887WN_A1020W) WhcAg construct
auguucguguuucuggugcugcugccccugguguccagccagugugugaaccugaccaccagaacacagcugccuccagccuacaccaacagcuucaccagaggcguguacuaccccgacaagguguucagauccagcgugcugcacucuacccaggaccuguuccugccuuucuucagcaacgugaccugguuccacgccauccacguguccggcaccaauggcaccaagagauucgacaaccccgugcugcccuucaacgacgggguguacuuugccagcaccgagaaguccaacaucaucagaggcuggaucuucggcaccacacuggacagcaagacccagagccugcugaucgugaacaacgccaccaacguggucaucaaagugugcgaguuccaguucugcaacgaccccuuccugggcgucuacuaccacaagaacaacaagagcuggauggaaagcgaguuccggguguacagcagcgccaacaacugcaccuucgaguacgugucccagccuuuccugauggaccuggaaggcaagcagggcaacuucaagaaccugcgcgaguucguguucaagaacaucgacggcuacuucaaaaucuacagcaagcacaccccuaucaaccucgugcgggaucugccucagggcuucucugcucuggaaccccugguggaucugcccaucggcaucaacaucacccgguuucagacacugcuggcccugcacagaagcuaccugacaccuggcgauagcagcagcggauggacagcuggugccgccgcuuacuaugugggcuaccugcagccuagaaccuuccugcugaaguacaacgagaacggcaccaucaccgacgccguggauugugcucuggauccucugagcgagacaaagugcacccugaaguccuucaccguggaaaagggcaucuaccagaccagcaacuuccgggugcagcccaccgaauccaucgugcgguuccccaauaucaccaaucugugccccuucggcgagguguucaaugccaccagauucgccucuguguacgccuggaaccggaagcggaucagcaauugcguggccgacuacuccgugcuguacaacuccgccagcuucagcaccuucaagugcuacggcguguccccuaccaagcugaacgaccugugcuucacaaacguguacgccgacagcuucgugauccggggagaugaagugcggcagauugccccuggacagacaggcaagaucgccgacuacaacuacaagcugcccgacgacuucaccggcugugugauugccuggaacagcaacaaccuggacuccaaagucggcggcaacuacaauuaccuguaccggcuguuccggaaguccaaucugaagcccuucgagcgggacaucagcaccgaaaucuaucaggccggcagcaccccuugcaacggcguggaaggcuucaacugcuacuucccacugcaguccuacggcuuucagcccacaaauggcgugggcuaucagcccuacagagugguggugcugagcuucgaacugcugcaugcuccugccacagugugcggcccuaagaaaagcaccaaucucgugaagaacaaaugcgugaacuucaacuucaacggccugaccggcaccggcgugcugacagagagcaacaagaaguuccugccauuccagcaguuuggccgggauaucgccgauaccacagacgccguuagagauccccagacacuggaaauccuggacaucaccccaugcagcuucggcggagugucugugaucaccccuggcaccaacaccagcaaucagguggcagugcuguaccaggacgugaacuguaccgaagugcccguggccauucacgccgaucagcugacaccuacauggcggguguacuccaccggcagcaauguguuucagaccagagccggcugucugaucggagccgagcacgugaacaauagcuacgagugcgacauccccaucggcgcuggcaucugugccagcuaccagacacagacaaacagccccagacgggcuagaagcguggccagccagagcaucauugccuacacaaugucucugggcgccgagaacagcguggccuacuccaacaacucuaucgcuauccccaccaacuucaccaucagcgugaccaccgagauccugccuguguccaugaccaagaccagcguggacugcaccauguacaucugcggcgauuccaccgagugcuccaaccugcugcugcaguacggcagcuucugcacccagcugaauagagcccugacagggaucgccguggaacaggacaagaacacccaagagguguucgcccaagugaagcaaaucuacaagaccccuccuaucaaggacuucggcggcuucaauuucagccagauucugcccgauccuagcaagcccagcaagcggagcuucaucgaggaccugcuguucaacaaagugacacuggccgacgccggcuucaucaagcaguauggcgauugucugggcgacauugccgccagggaucugauuugcgcccagaaguuuaacggacugacagugcugccuccucugcugaccgaugagaugaucgcccaguacacaucugcccugcuggccggcacaaucacaagcggcuggugguuuggagcuggcgccgcucugcagauccccuuugcuaugcagauggccuaccgguucaacggcaucggagugacccagaaugugcuguacgagaaccagaagcugaucgccaaccaguucaacagcgccaucggcaagauccaggacagccugagcagcacagcaagcgcccugggaaagcugcaggacguggucaaccagaaugcccaggcacugaacacccuggucaagcagcuguccuccaacuucggcgccaucagcucugugcugaacgauauccugagcagacuggacccuccugaggccgaggugcagaucgacagacugaucacaggcagacugcagagccuccagacauacgugacccagcagcugaucagagccgccgagauuagauggucugccaaucuggccgccaccaagaugucugagugugugcugggccagagcaagagaguggacuuuugcggcaagggcuaccaccugaugagcuucccucagucugccccucacggcgugguguuucugcacgugacauaugugcccgcucaagagaagaauuucaccaccgcuccagccaucugccacgacggcaaagcccacuuuccuagagaaggcguguucguguccaacggcacccauugguucgugacacagcggaacuucuacgagccccagaucaucaccaccgacaacaccuucgugucuggcaacugcgacguugugaucggcauugugaacaauaccguguacgacccucugcagcccgagcuggacagcggaggcggaggaucugacaucgaccccuacaaagaguucggcagcagcuaccagcugcugaacuuccugccucuggacuucuuccccgaccugaacgcccugguggauacagccacagcucuguacgaggaagaacugaccggcagagagcacugcagcccucaccacacagccauuagacaggcccucgugugcugggacgagcugacaaaacugaucgccuggaugagcagcaacaucaccagcgagcaagugcggaccaucaucgugaaccacgugaacgauaccuggggccugaaagugcggcagagccugugguuucaccugagcugucugaccuucggccagcacaccgugcaagaguuucugguguccuucggcguguggaucagaaccccugcuccauacagaccuccaaacgcucccauccugagcacccugccugagcacacagugaucuguuga

SEQ ID NO: 12192 - RNA, 3906 nt, Artificial Sequence
  SARS-CoV-2/Wuhan/WIV05/2019__EPI_ISL_402128 spike protein CDS gc mod (1-1147)(K986P_V987P_P1069F) WhcAg construct
auguucguguuucuggugcugcugccccugguguccagccagugugugaaccugaccaccagaacacagcugccuccagccuacaccaacagcuucaccagaggcguguacuaccccgacaagguguucagauccagcgugcugcacucuacccaggaccuguuccugccuuucuucagcaacgugaccugguuccacgccauccacguguccggcaccaauggcaccaagagauucgacaaccccgugcugcccuucaacgacgggguguacuuugccagcaccgagaaguccaacaucaucagaggcuggaucuucggcaccacacuggacagcaagacccagagccugcugaucgugaacaacgccaccaacguggucaucaaagugugcgaguuccaguucugcaacgaccccuuccugggcgucuacuaccacaagaacaacaagagcuggauggaaagcgaguuccggguguacagcagcgccaacaacugcaccuucgaguacgugucccagccuuuccugauggaccuggaaggcaagcagggcaacuucaagaaccugcgcgaguucguguucaagaacaucgacggcuacuucaaaaucuacagcaagcacaccccuaucaaccucgugcgggaucugccucagggcuucucugcucuggaaccccugguggaucugcccaucggcaucaacaucacccgguuucagacacugcuggcccugcacagaagcuaccugacaccuggcgauagcagcagcggauggacagcuggugccgccgcuuacuaugugggcuaccugcagccuagaaccuuccugcugaaguacaacgagaacggcaccaucaccgacgccguggauugugcucuggauccucugagcgagacaaagugcacccugaaguccuucaccguggaaaagggcaucuaccagaccagcaacuuccgggugcagcccaccgaauccaucgugcgguuccccaauaucaccaaucugugccccuucggcgagguguucaaugccaccagauucgccucuguguacgccuggaaccggaagcggaucagcaauugcguggccgacuacuccgugcuguacaacuccgccagcuucagcaccuucaagugcuacggcguguccccuaccaagcugaacgaccugugcuucacaaacguguacgccgacagcuucgugauccggggagaugaagugcggcagauugccccuggacagacaggcaagaucgccgacuacaacuacaagcugcccgacgacuucaccggcugugugauugccuggaacagcaacaaccuggacuccaaagucggcggcaacuacaauuaccuguaccggcuguuccggaaguccaaucugaagcccuucgagcgggacaucagcaccgaaaucuaucaggccggcagcaccccuugcaacggcguggaaggcuucaacugcuacuucccacugcaguccuacggcuuucagcccacaaauggcgugggcuaucagcccuacagagugguggugcugagcuucgaacugcugcaugcuccugccacagugugcggcccuaagaaaagcaccaaucucgugaagaacaaaugcgugaacuucaacuucaacggccugaccggcaccggcgugcugacagagagcaacaagaaguuccugccauuccagcaguuuggccgggauaucgccgauaccacagacgccguuagagauccccagacacuggaaauccuggacaucaccccaugcagcuucggcggagugucugugaucaccccuggcaccaacaccagcaaucagguggcagugcuguaccaggacgugaacuguaccgaagugcccguggccauucacgccgaucagcugacaccuacauggcggguguacuccaccggcagcaauguguuucagaccagagccggcugucugaucggagccgagcacgugaacaauagcuacgagugcgacauccccaucggcgcuggcaucugugccagcuaccagacacagacaaacagccccagacgggcuagaagcguggccagccagagcaucauugccuacacaaugucucugggcgccgagaacagcguggccuacuccaacaacucuaucgcuauccccaccaacuucaccaucagcgugaccaccgagauccugccuguguccaugaccaagaccagcguggacugcaccauguacaucugcggcgauuccaccgagugcuccaaccugcugcugcaguacggcagcuucugcacccagcugaauagagcccugacagggaucgccguggaacaggacaagaacacccaagagguguucgcccaagugaagcaaaucuacaagaccccuccuaucaaggacuucggcggcuucaauuucagccagauucugcccgauccuagcaagcccagcaagcggagcuucaucgaggaccugcuguucaacaaagugacacuggccgacgccggcuucaucaagcaguauggcgauugucugggcgacauugccgccagggaucugauuugcgcccagaaguuuaacggacugacagugcugccuccucugcugaccgaugagaugaucgcccaguacacaucugcccugcuggccggcacaaucacaagcggcuggacauuuggagcuggcgccgcucugcagauccccuuugcuaugcagauggccuaccgguucaacggcaucggagugacccagaaugugcuguacgagaaccagaagcugaucgccaaccaguucaacagcgccaucggcaagauccaggacagccugagcagcacagcaagcgcccugggaaagcugcaggacguggucaaccagaaugcccaggcacugaacacccuggucaagcagcuguccuccaacuucggcgccaucagcucugugcugaacgauauccugagcagacuggacccuccugaggccgaggugcagaucgacagacugaucacaggcagacugcagagccuccagacauacgugacccagcagcugaucagagccgccgagauuagagccucugccaaucuggccgccaccaagaugucugagugugugcugggccagagcaagagaguggacuuuugcggcaagggcuaccaccugaugagcuucccucagucugccccucacggcgugguguuucugcacgugacauauguguucgcucaagagaagaauuucaccaccgcuccagccaucugccacgacggcaaagcccacuuuccuagagaaggcguguucguguccaacggcacccauugguucgugacacagcggaacuucuacgagccccagaucaucaccaccgacaacaccuucgugucuggcaacugcgacguugugaucggcauugugaacaauaccguguacgacccucugcagcccgagcuggacagcggaggcggaggaucugacaucgaccccuacaaagaguucggcagcagcuaccagcugcugaacuuccugccucuggacuucuuccccgaccugaacgcccugguggauacagccacagcucuguacgaggaagaacugaccggcagagagcacugcagcccucaccacacagccauuagacaggcccucgugugcugggacgagcugacaaaacugaucgccuggaugagcagcaacaucaccagcgagcaagugcggaccaucaucgugaaccacgugaacgauaccuggggccugaaagugcggcagagccugugguuucaccugagcugucugaccuucggccagcacaccgugcaagaguuucugguguccuucggcguguggaucagaaccccugcuccauacagaccuccaaacgcucccauccugagcacccugccugagcacacagugaucuguuga

SEQ ID NO: 12193 - RNA, 3906 nt, Artificial Sequence
  SARS-CoV-2/Wuhan/WIV05/2019__EPI_ISL_402128 spike protein CDS gc mod (1-1147)(K986P_V987P_ H1048Q_H1064N_ H1083N_H1101N) WhcAg construct
auguucguguuucuggugcugcugccccugguguccagccagugugugaaccugaccaccagaacacagcugccuccagccuacaccaacagcuucaccagaggcguguacuaccccgacaagguguucagauccagcgugcugcacucuacccaggaccuguuccugccuuucuucagcaacgugaccugguuccacgccauccacguguccggcaccaauggcaccaagagauucgacaaccccgugcugcccuucaacgacgggguguacuuugccagcaccgagaaguccaacaucaucagaggcuggaucuucggcaccacacuggacagcaagacccagagccugcugaucgugaacaacgccaccaacguggucaucaaagugugcgaguuccaguucugcaacgaccccuuccugggcgucuacuaccacaagaacaacaagagcuggauggaaagcgaguuccggguguacagcagcgccaacaacugcaccuucgaguacgugucccagccuuuccugauggaccuggaaggcaagcagggcaacuucaagaaccugcgcgaguucguguucaagaacaucgacggcuacuucaaaaucuacagcaagcacaccccuaucaaccucgugcgggaucugccucagggcuucucugcucuggaaccccugguggaucugcccaucggcaucaacaucacccgguuucagacacugcuggcccugcacagaagcuaccugacaccuggcgauagcagcagcggauggacagcuggugccgccgcuuacuaugugggcuaccugcagccuagaaccuuccugcugaaguacaacgagaacggcaccaucaccgacgccguggauugugcucuggauccucugagcgagacaaagugcacccugaaguccuucaccguggaaaagggcaucuaccagaccagcaacuuccgggugcagcccaccgaauccaucgugcgguuccccaauaucaccaaucugugccccuucggcgagguguucaaugccaccagauucgccucuguguacgccuggaaccggaagcggaucagcaauugcguggccgacuacuccgugcuguacaacuccgccagcuucagcaccuucaagugcuacggcguguccccuaccaagcugaacgaccugugcuucacaaacguguacgccgacagcuucgugauccggggagaugaagugcggcagauugccccuggacagacaggcaagaucgccgacuacaacuacaagcugcccgacgacuucaccggcugugugauugccuggaacagcaacaaccuggacuccaaagucggcggcaacuacaauuaccuguaccggcuguuccggaaguccaaucugaagcccuucgagcgggacaucagcaccgaaaucuaucaggccggcagcaccccuugcaacggcguggaaggcuucaacugcuacuucccacugcaguccuacggcuuucagcccacaaauggcgugggcuaucagcccuacagagugguggugcugagcuucgaacugcugcaugcuccugccacagugugcggcccuaagaaaagcaccaaucucgugaagaacaaaugcgugaacuucaacuucaacggccugaccggcaccggcgugcugacagagagcaacaagaaguuccugccauuccagcaguuuggccgggauaucgccgauaccacagacgccguuagagauccccagacacuggaaauccuggacaucaccccaugcagcuucggcggagugucugugaucaccccuggcaccaacaccagcaaucagguggcagugcuguaccaggacgugaacuguaccgaagugcccguggccauucacgccgaucagcugacaccuacauggcggguguacuccaccggcagcaauguguuucagaccagagccggcugucugaucggagccgagcacgugaacaauagcuacgagugcgacauccccaucggcgcuggcaucugugccagcuaccagacacagacaaacagccccagacgggcuagaagcguggccagccagagcaucauugccuacacaaugucucugggcgccgagaacagcguggccuacuccaacaacucuaucgcuauccccaccaacuucaccaucagcgugaccaccgagauccugccuguguccaugaccaagaccagcguggacugcaccauguacaucugcggcgauuccaccgagugcuccaaccugcugcugcaguacggcagcuucugcacccagcugaauagagcccugacagggaucgccguggaacaggacaagaacacccaagagguguucgcccaagugaagcaaaucuacaagaccccuccuaucaaggacuucggcggcuucaauuucagccagauucugcccgauccuagcaagcccagcaagcggagcuucaucgaggaccugcuguucaacaaagugacacuggccgacgccggcuucaucaagcaguauggcgauugucugggcgacauugccgccagggaucugauuugcgcccagaaguuuaacggacugacagugcugccuccucugcugaccgaugagaugaucgcccaguacacaucugcccugcuggccggcacaaucacaagcggcuggacauuuggagcuggcgccgcucugcagauccccuuugcuaugcagauggccuaccgguucaacggcaucggagugacccagaaugugcuguacgagaaccagaagcugaucgccaaccaguucaacagcgccaucggcaagauccaggacagccugagcagcacagcaagcgcccugggaaagcugcaggacguggucaaccagaaugcccaggcacugaacacccuggucaagcagcuguccuccaacuucggcgccaucagcucugugcugaacgauauccugagcagacuggacccuccugaggccgaggugcagaucgacagacugaucacaggcagacugcagagccuccagacauacgugacccagcagcugaucagagccgccgagauuagagccucugccaaucuggccgccaccaagaugucugagugugugcugggccagagcaagagaguggacuuuugcggcaagggcuaccagcugaugagcuucccucagucugccccucacggcgugguguuucugaacgugacauaugugcccgcucaagagaagaauuucaccaccgcuccagccaucugcaacgacggcaaagcccacuuuccuagagaaggcguguucguguccaacggcaccaacugguucgugacacagcggaacuucuacgagccccagaucaucaccaccgacaacaccuucgugucuggcaacugcgacguugugaucggcauugugaacaauaccguguacgacccucugcagcccgagcuggacagcggaggcggaggaucugacaucgaccccuacaaagaguucggcagcagcuaccagcugcugaacuuccugccucuggacuucuuccccgaccugaacgcccugguggauacagccacagcucuguacgaggaagaacugaccggcagagagcacugcagcccucaccacacagccauuagacaggcccucgugugcugggacgagcugacaaaacugaucgccuggaugagcagcaacaucaccagcgagcaagugcggaccaucaucgugaaccacgugaacgauaccuggggccugaaagugcggcagagccugugguuucaccugagcugucugaccuucggccagcacaccgugcaagaguuucugguguccuucggcguguggaucagaaccccugcuccauacagaccuccaaacgcucccauccugagcacccugccugagcacacagugaucuguuga

SEQ ID NO: 12194 - RNA, 3906 nt, Artificial Sequence
  SARS-CoV-2/Wuhan/WIV05/2019__EPI_ISL_402128 spike protein CDS gc mod (1-1147)(I712C_T1077C) WhcAg construct
auguucguguuucuggugcugcugccccugguguccagccagugugugaaccugaccaccagaacacagcugccuccagccuacaccaacagcuucaccagaggcguguacuaccccgacaagguguucagauccagcgugcugcacucuacccaggaccuguuccugccuuucuucagcaacgugaccugguuccacgccauccacguguccggcaccaauggcaccaagagauucgacaaccccgugcugcccuucaacgacgggguguacuuugccagcaccgagaaguccaacaucaucagaggcuggaucuucggcaccacacuggacagcaagacccagagccugcugaucgugaacaacgccaccaacguggucaucaaagugugcgaguuccaguucugcaacgaccccuuccugggcgucuacuaccacaagaacaacaagagcuggauggaaagcgaguuccggguguacagcagcgccaacaacugcaccuucgaguacgugucccagccuuuccugauggaccuggaaggcaagcagggcaacuucaagaaccugcgcgaguucguguucaagaacaucgacggcuacuucaaaaucuacagcaagcacaccccuaucaaccucgugcgggaucugccucagggcuucucugcucuggaaccccugguggaucugcccaucggcaucaacaucacccgguuucagacacugcuggcccugcacagaagcuaccugacaccuggcgauagcagcagcggauggacagcuggugccgccgcuuacuaugugggcuaccugcagccuagaaccuuccugcugaaguacaacgagaacggcaccaucaccgacgccguggauugugcucuggauccucugagcgagacaaagugcacccugaaguccuucaccguggaaaagggcaucuaccagaccagcaacuuccgggugcagcccaccgaauccaucgugcgguuccccaauaucaccaaucugugccccuucggcgagguguucaaugccaccagauucgccucuguguacgccuggaaccggaagcggaucagcaauugcguggccgacuacuccgugcuguacaacuccgccagcuucagcaccuucaagugcuacggcguguccccuaccaagcugaacgaccugugcuucacaaacguguacgccgacagcuucgugauccggggagaugaagugcggcagauugccccuggacagacaggcaagaucgccgacuacaacuacaagcugcccgacgacuucaccggcugugugauugccuggaacagcaacaaccuggacuccaaagucggcggcaacuacaauuaccuguaccggcuguuccggaaguccaaucugaagcccuucgagcgggacaucagcaccgaaaucuaucaggccggcagcaccccuugcaacggcguggaaggcuucaacugcuacuucccacugcaguccuacggcuuucagcccacaaauggcgugggcuaucagcccuacagagugguggugcugagcuucgaacugcugcaugcuccugccacagugugcggcccuaagaaaagcaccaaucucgugaagaacaaaugcgugaacuucaacuucaacggccugaccggcaccggcgugcugacagagagcaacaagaaguuccugccauuccagcaguuuggccgggauaucgccgauaccacagacgccguuagagauccccagacacuggaaauccuggacaucaccccaugcagcuucggcggagugucugugaucaccccuggcaccaacaccagcaaucagguggcagugcuguaccaggacgugaacuguaccgaagugcccguggccauucacgccgaucagcugacaccuacauggcggguguacuccaccggcagcaauguguuucagaccagagccggcugucugaucggagccgagcacgugaacaauagcuacgagugcgacauccccaucggcgcuggcaucugugccagcuaccagacacagacaaacagccccagacgggcuagaagcguggccagccagagcaucauugccuacacaaugucucugggcgccgagaacagcguggccuacuccaacaacucuugcgcuauccccaccaacuucaccaucagcgugaccaccgagauccugccuguguccaugaccaagaccagcguggacugcaccauguacaucugcggcgauuccaccgagugcuccaaccugcugcugcaguacggcagcuucugcacccagcugaauagagcccugacagggaucgccguggaacaggacaagaacacccaagagguguucgcccaagugaagcaaaucuacaagaccccuccuaucaaggacuucggcggcuucaauuucagccagauucugcccgauccuagcaagcccagcaagcggagcuucaucgaggaccugcuguucaacaaagugacacuggccgacgccggcuucaucaagcaguauggcgauugucugggcgacauugccgccagggaucugauuugcgcccagaaguuuaacggacugacagugcugccuccucugcugaccgaugagaugaucgcccaguacacaucugcccugcuggccggcacaaucacaagcggcuggacauuuggagcuggcgccgcucugcagauccccuuugcuaugcagauggccuaccgguucaacggcaucggagugacccagaaugugcuguacgagaaccagaagcugaucgccaaccaguucaacagcgccaucggcaagauccaggacagccugagcagcacagcaagcgcccugggaaagcugcaggacguggucaaccagaaugcccaggcacugaacacccuggucaagcagcuguccuccaacuucggcgccaucagcucugugcugaacgauauccugagcagacuggacaaggucgaggccgaggugcagaucgacagacugaucacaggcagacugcagagccuccagacauacgugacccagcagcugaucagagccgccgagauuagagccucugccaaucuggccgccaccaagaugucugagugugugcugggccagagcaagagaguggacuuuugcggcaagggcuaccaccugaugagcuucccucagucugccccucacggcgugguguuucugcacgugacauaugugcccgcucaagagaagaauuucaccugugcuccagccaucugccacgacggcaaagcccacuuuccuagagaaggcguguucguguccaacggcacccauugguucgugacacagcggaacuucuacgagccccagaucaucaccaccgacaacaccuucgugucuggcaacugcgacguugugaucggcauugugaacaauaccguguacgacccucugcagcccgagcuggacagcggaggcggaggaucugacaucgaccccuacaaagaguucggcagcagcuaccagcugcugaacuuccugccucuggacuucuuccccgaccugaacgcccugguggauacagccacagcucuguacgaggaagaacugaccggcagagagcacugcagcccucaccacacagccauuagacaggcccucgugugcugggacgagcugacaaaacugaucgccuggaugagcagcaacaucaccagcgagcaagugcggaccaucaucgugaaccacgugaacgauaccuggggccugaaagugcggcagagccugugguuucaccugagcugucugaccuucggccagcacaccgugcaagaguuucugguguccuucggcguguggaucagaaccccugcuccauacagaccuccaaacgcucccauccugagcacccugccugagcacacagugaucuguuga

SEQ ID NO: 12195 - RNA, 3906 nt, Artificial Sequence
  SARS-CoV-2/Wuhan/WIV05/2019__EPI_ISL_402128 spike protein CDS gc mod (1-1147)(I714C_Y1110C) WhcAg construct
auguucguguuucuggugcugcugccccugguguccagccagugugugaaccugaccaccagaacacagcugccuccagccuacaccaacagcuucaccagaggcguguacuaccccgacaagguguucagauccagcgugcugcacucuacccaggaccuguuccugccuuucuucagcaacgugaccugguuccacgccauccacguguccggcaccaauggcaccaagagauucgacaaccccgugcugcccuucaacgacgggguguacuuugccagcaccgagaaguccaacaucaucagaggcuggaucuucggcaccacacuggacagcaagacccagagccugcugaucgugaacaacgccaccaacguggucaucaaagugugcgaguuccaguucugcaacgaccccuuccugggcgucuacuaccacaagaacaacaagagcuggauggaaagcgaguuccggguguacagcagcgccaacaacugcaccuucgaguacgugucccagccuuuccugauggaccuggaaggcaagcagggcaacuucaagaaccugcgcgaguucguguucaagaacaucgacggcuacuucaaaaucuacagcaagcacaccccuaucaaccucgugcgggaucugccucagggcuucucugcucuggaaccccugguggaucugcccaucggcaucaacaucacccgguuucagacacugcuggcccugcacagaagcuaccugacaccuggcgauagcagcagcggauggacagcuggugccgccgcuuacuaugugggcuaccugcagccuagaaccuuccugcugaaguacaacgagaacggcaccaucaccgacgccguggauugugcucuggauccucugagcgagacaaagugcacccugaaguccuucaccguggaaaagggcaucuaccagaccagcaacuuccgggugcagcccaccgaauccaucgugcgguuccccaauaucaccaaucugugccccuucggcgagguguucaaugccaccagauucgccucuguguacgccuggaaccggaagcggaucagcaauugcguggccgacuacuccgugcuguacaacuccgccagcuucagcaccuucaagugcuacggcguguccccuaccaagcugaacgaccugugcuucacaaacguguacgccgacagcuucgugauccggggagaugaagugcggcagauugccccuggacagacaggcaagaucgccgacuacaacuacaagcugcccgacgacuucaccggcugugugauugccuggaacagcaacaaccuggacuccaaagucggcggcaacuacaauuaccuguaccggcuguuccggaaguccaaucugaagcccuucgagcgggacaucagcaccgaaaucuaucaggccggcagcaccccuugcaacggcguggaaggcuucaacugcuacuucccacugcaguccuacggcuuucagcccacaaauggcgugggcuaucagcccuacagagugguggugcugagcuucgaacugcugcaugcuccugccacagugugcggcccuaagaaaagcaccaaucucgugaagaacaaaugcgugaacuucaacuucaacggccugaccggcaccggcgugcugacagagagcaacaagaaguuccugccauuccagcaguuuggccgggauaucgccgauaccacagacgccguuagagauccccagacacuggaaauccuggacaucaccccaugcagcuucggcggagugucugugaucaccccuggcaccaacaccagcaaucagguggcagugcuguaccaggacgugaacuguaccgaagugcccguggccauucacgccgaucagcugacaccuacauggcggguguacuccaccggcagcaauguguuucagaccagagccggcugucugaucggagccgagcacgugaacaauagcuacgagugcgacauccccaucggcgcuggcaucugugccagcuaccagacacagacaaacagccccagacgggcuagaagcguggccagccagagcaucauugccuacacaaugucucugggcgccgagaacagcguggccuacuccaacaacucuaucgcuugccccaccaacuucaccaucagcgugaccaccgagauccugccuguguccaugaccaagaccagcguggacugcaccauguacaucugcggcgauuccaccgagugcuccaaccugcugcugcaguacggcagcuucugcacccagcugaauagagcccugacagggaucgccguggaacaggacaagaacacccaagagguguucgcccaagugaagcaaaucuacaagaccccuccuaucaaggacuucggcggcuucaauuucagccagauucugcccgauccuagcaagcccagcaagcggagcuucaucgaggaccugcuguucaacaaagugacacuggccgacgccggcuucaucaagcaguauggcgauugucugggcgacauugccgccagggaucugauuugcgcccagaaguuuaacggacugacagugcugccuccucugcugaccgaugagaugaucgcccaguacacaucugcccugcuggccggcacaaucacaagcggcuggacauuuggagcuggcgccgcucugcagauccccuuugcuaugcagauggccuaccgguucaacggcaucggagugacccagaaugugcuguacgagaaccagaagcugaucgccaaccaguucaacagcgccaucggcaagauccaggacagccugagcagcacagcaagcgcccugggaaagcugcaggacguggucaaccagaaugcccaggcacugaacacccuggucaagcagcuguccuccaacuucggcgccaucagcucugugcugaacgauauccugagcagacuggacaaggucgaggccgaggugcagaucgacagacugaucacaggcagacugcagagccuccagacauacgugacccagcagcugaucagagccgccgagauuagagccucugccaaucuggccgccaccaagaugucugagugugugcugggccagagcaagagaguggacuuuugcggcaagggcuaccaccugaugagcuucccucagucugccccucacggcgugguguuucugcacgugacauaugugcccgcucaagagaagaauuucaccaccgcuccagccaucugccacgacggcaaagcccacuuuccuagagaaggcguguucguguccaacggcacccauugguucgugacacagcggaacuucugugagccccagaucaucaccaccgacaacaccuucgugucuggcaacugcgacguugugaucggcauugugaacaauaccguguacgacccucugcagcccgagcuggacagcggaggcggaggaucugacaucgaccccuacaaagaguucggcagcagcuaccagcugcugaacuuccugccucuggacuucuuccccgaccugaacgcccugguggauacagccacagcucuguacgaggaagaacugaccggcagagagcacugcagcccucaccacacagccauuagacaggcccucgugugcugggacgagcugacaaaacugaucgccuggaugagcagcaacaucaccagcgagcaagugcggaccaucaucgugaaccacgugaacgauaccuggggccugaaagugcggcagagccugugguuucaccugagcugucugaccuucggccagcacaccgugcaagaguuucugguguccuucggcguguggaucagaaccccugcuccauacagaccuccaaacgcucccauccugagcacccugccugagcacacagugaucuguuga

SEQ ID NO: 12196 - RNA, 3906 nt, Artificial Sequence
  SARS-CoV-2/Wuhan/WIV05/2019__EPI_ISL_402128 spike protein CDS gc mod (1-1147)(P715C_P1069C) WhcAg construct
auguucguguuucuggugcugcugccccugguguccagccagugugugaaccugaccaccagaacacagcugccuccagccuacaccaacagcuucaccagaggcguguacuaccccgacaagguguucagauccagcgugcugcacucuacccaggaccuguuccugccuuucuucagcaacgugaccugguuccacgccauccacguguccggcaccaauggcaccaagagauucgacaaccccgugcugcccuucaacgacgggguguacuuugccagcaccgagaaguccaacaucaucagaggcuggaucuucggcaccacacuggacagcaagacccagagccugcugaucgugaacaacgccaccaacguggucaucaaagugugcgaguuccaguucugcaacgaccccuuccugggcgucuacuaccacaagaacaacaagagcuggauggaaagcgaguuccggguguacagcagcgccaacaacugcaccuucgaguacgugucccagccuuuccugauggaccuggaaggcaagcagggcaacuucaagaaccugcgcgaguucguguucaagaacaucgacggcuacuucaaaaucuacagcaagcacaccccuaucaaccucgugcgggaucugccucagggcuucucugcucuggaaccccugguggaucugcccaucggcaucaacaucacccgguuucagacacugcuggcccugcacagaagcuaccugacaccuggcgauagcagcagcggauggacagcuggugccgccgcuuacuaugugggcuaccugcagccuagaaccuuccugcugaaguacaacgagaacggcaccaucaccgacgccguggauugugcucuggauccucugagcgagacaaagugcacccugaaguccuucaccguggaaaagggcaucuaccagaccagcaacuuccgggugcagcccaccgaauccaucgugcgguuccccaauaucaccaaucugugccccuucggcgagguguucaaugccaccagauucgccucuguguacgccuggaaccggaagcggaucagcaauugcguggccgacuacuccgugcuguacaacuccgccagcuucagcaccuucaagugcuacggcguguccccuaccaagcugaacgaccugugcuucacaaacguguacgccgacagcuucgugauccggggagaugaagugcggcagauugccccuggacagacaggcaagaucgccgacuacaacuacaagcugcccgacgacuucaccggcugugugauugccuggaacagcaacaaccuggacuccaaagucggcggcaacuacaauuaccuguaccggcuguuccggaaguccaaucugaagcccuucgagcgggacaucagcaccgaaaucuaucaggccggcagcaccccuugcaacggcguggaaggcuucaacugcuacuucccacugcaguccuacggcuuucagcccacaaauggcgugggcuaucagcccuacagagugguggugcugagcuucgaacugcugcaugcuccugccacagugugcggcccuaagaaaagcaccaaucucgugaagaacaaaugcgugaacuucaacuucaacggccugaccggcaccggcgugcugacagagagcaacaagaaguuccugccauuccagcaguuuggccgggauaucgccgauaccacagacgccguuagagauccccagacacuggaaauccuggacaucaccccaugcagcuucggcggagugucugugaucaccccuggcaccaacaccagcaaucagguggcagugcuguaccaggacgugaacuguaccgaagugcccguggccauucacgccgaucagcugacaccuacauggcggguguacuccaccggcagcaauguguuucagaccagagccggcugucugaucggagccgagcacgugaacaauagcuacgagugcgacauccccaucggcgcuggcaucugugccagcuaccagacacagacaaacagccccagacgggcuagaagcguggccagccagagcaucauugccuacacaaugucucugggcgccgagaacagcguggccuacuccaacaacucuaucgcuaucugcaccaacuucaccaucagcgugaccaccgagauccugccuguguccaugaccaagaccagcguggacugcaccauguacaucugcggcgauuccaccgagugcuccaaccugcugcugcaguacggcagcuucugcacccagcugaauagagcccugacagggaucgccguggaacaggacaagaacacccaagagguguucgcccaagugaagcaaaucuacaagaccccuccuaucaaggacuucggcggcuucaauuucagccagauucugcccgauccuagcaagcccagcaagcggagcuucaucgaggaccugcuguucaacaaagugacacuggccgacgccggcuucaucaagcaguauggcgauugucugggcgacauugccgccagggaucugauuugcgcccagaaguuuaacggacugacagugcugccuccucugcugaccgaugagaugaucgcccaguacacaucugcccugcuggccggcacaaucacaagcggcuggacauuuggagcuggcgccgcucugcagauccccuuugcuaugcagauggccuaccgguucaacggcaucggagugacccagaaugugcuguacgagaaccagaagcugaucgccaaccaguucaacagcgccaucggcaagauccaggacagccugagcagcacagcaagcgcccugggaaagcugcaggacguggucaaccagaaugcccaggcacugaacacccuggucaagcagcuguccuccaacuucggcgccaucagcucugugcugaacgauauccugagcagacuggacaaggucgaggccgaggugcagaucgacagacugaucacaggcagacugcagagccuccagacauacgugacccagcagcugaucagagccgccgagauuagagccucugccaaucuggccgccaccaagaugucugagugugugcugggccagagcaagagaguggacuuuugcggcaagggcuaccaccugaugagcuucccucagucugccccucacggcgugguguuucugcacgugacauaugugugugcucaagagaagaauuucaccaccgcuccagccaucugccacgacggcaaagcccacuuuccuagagaaggcguguucguguccaacggcacccauugguucgugacacagcggaacuucuacgagccccagaucaucaccaccgacaacaccuucgugucuggcaacugcgacguugugaucggcauugugaacaauaccguguacgacccucugcagcccgagcuggacagcggaggcggaggaucugacaucgaccccuacaaagaguucggcagcagcuaccagcugcugaacuuccugccucuggacuucuuccccgaccugaacgcccugguggauacagccacagcucuguacgaggaagaacugaccggcagagagcacugcagcccucaccacacagccauuagacaggcccucgugugcugggacgagcugacaaaacugaucgccuggaugagcagcaacaucaccagcgagcaagugcggaccaucaucgugaaccacgugaacgauaccuggggccugaaagugcggcagagccugugguuucaccugagcugucugaccuucggccagcacaccgugcaagaguuucugguguccuucggcguguggaucagaaccccugcuccauacagaccuccaaacgcucccauccugagcacccugccugagcacacagugaucuguuga

SEQ ID NO: 12197 - RNA, 3906 nt, Artificial Sequence
  SARS-CoV-2/Wuhan/WIV05/2019__EPI_ISL_402128 spike protein CDS gc mod (1-1147)(G889C_L1034C) WhcAg construct
auguucguguuucuggugcugcugccccugguguccagccagugugugaaccugaccaccagaacacagcugccuccagccuacaccaacagcuucaccagaggcguguacuaccccgacaagguguucagauccagcgugcugcacucuacccaggaccuguuccugccuuucuucagcaacgugaccugguuccacgccauccacguguccggcaccaauggcaccaagagauucgacaaccccgugcugcccuucaacgacgggguguacuuugccagcaccgagaaguccaacaucaucagaggcuggaucuucggcaccacacuggacagcaagacccagagccugcugaucgugaacaacgccaccaacguggucaucaaagugugcgaguuccaguucugcaacgaccccuuccugggcgucuacuaccacaagaacaacaagagcuggauggaaagcgaguuccggguguacagcagcgccaacaacugcaccuucgaguacgugucccagccuuuccugauggaccuggaaggcaagcagggcaacuucaagaaccugcgcgaguucguguucaagaacaucgacggcuacuucaaaaucuacagcaagcacaccccuaucaaccucgugcgggaucugccucagggcuucucugcucuggaaccccugguggaucugcccaucggcaucaacaucacccgguuucagacacugcuggcccugcacagaagcuaccugacaccuggcgauagcagcagcggauggacagcuggugccgccgcuuacuaugugggcuaccugcagccuagaaccuuccugcugaaguacaacgagaacggcaccaucaccgacgccguggauugugcucuggauccucugagcgagacaaagugcacccugaaguccuucaccguggaaaagggcaucuaccagaccagcaacuuccgggugcagcccaccgaauccaucgugcgguuccccaauaucaccaaucugugccccuucggcgagguguucaaugccaccagauucgccucuguguacgccuggaaccggaagcggaucagcaauugcguggccgacuacuccgugcuguacaacuccgccagcuucagcaccuucaagugcuacggcguguccccuaccaagcugaacgaccugugcuucacaaacguguacgccgacagcuucgugauccggggagaugaagugcggcagauugccccuggacagacaggcaagaucgccgacuacaacuacaagcugcccgacgacuucaccggcugugugauugccuggaacagcaacaaccuggacuccaaagucggcggcaacuacaauuaccuguaccggcuguuccggaaguccaaucugaagcccuucgagcgggacaucagcaccgaaaucuaucaggccggcagcaccccuugcaacggcguggaaggcuucaacugcuacuucccacugcaguccuacggcuuucagcccacaaauggcgugggcuaucagcccuacagagugguggugcugagcuucgaacugcugcaugcuccugccacagugugcggcccuaagaaaagcaccaaucucgugaagaacaaaugcgugaacuucaacuucaacggccugaccggcaccggcgugcugacagagagcaacaagaaguuccugccauuccagcaguuuggccgggauaucgccgauaccacagacgccguuagagauccccagacacuggaaauccuggacaucaccccaugcagcuucggcggagugucugugaucaccccuggcaccaacaccagcaaucagguggcagugcuguaccaggacgugaacuguaccgaagugcccguggccauucacgccgaucagcugacaccuacauggcggguguacuccaccggcagcaauguguuucagaccagagccggcugucugaucggagccgagcacgugaacaauagcuacgagugcgacauccccaucggcgcuggcaucugugccagcuaccagacacagacaaacagccccagacgggcuagaagcguggccagccagagcaucauugccuacacaaugucucugggcgccgagaacagcguggccuacuccaacaacucuaucgcuauccccaccaacuucaccaucagcgugaccaccgagauccugccuguguccaugaccaagaccagcguggacugcaccauguacaucugcggcgauuccaccgagugcuccaaccugcugcugcaguacggcagcuucugcacccagcugaauagagcccugacagggaucgccguggaacaggacaagaacacccaagagguguucgcccaagugaagcaaaucuacaagaccccuccuaucaaggacuucggcggcuucaauuucagccagauucugcccgauccuagcaagcccagcaagcggagcuucaucgaggaccugcuguucaacaaagugacacuggccgacgccggcuucaucaagcaguauggcgauugucugggcgacauugccgccagggaucugauuugcgcccagaaguuuaacggacugacagugcugccuccucugcugaccgaugagaugaucgcccaguacacaucugcccugcuggccggcacaaucacaagcggcuggacauuuugcgcuggcgccgcucugcagauccccuuugcuaugcagauggccuaccgguucaacggcaucggagugacccagaaugugcuguacgagaaccagaagcugaucgccaaccaguucaacagcgccaucggcaagauccaggacagccugagcagcacagcaagcgcccugggaaagcugcaggacguggucaaccagaaugcccaggcacugaacacccuggucaagcagcuguccuccaacuucggcgccaucagcucugugcugaacgauauccugagcagacuggacaaggucgaggccgaggugcagaucgacagacugaucacaggcagacugcagagccuccagacauacgugacccagcagcugaucagagccgccgagauuagagccucugccaaucuggccgccaccaagaugucugaguguguguguggccagagcaagagaguggacuuuugcggcaagggcuaccaccugaugagcuucccucagucugccccucacggcgugguguuucugcacgugacauaugugcccgcucaagagaagaauuucaccaccgcuccagccaucugccacgacggcaaagcccacuuuccuagagaaggcguguucguguccaacggcacccauugguucgugacacagcggaacuucuacgagccccagaucaucaccaccgacaacaccuucgugucuggcaacugcgacguugugaucggcauugugaacaauaccguguacgacccucugcagcccgagcuggacagcggaggcggaggaucugacaucgaccccuacaaagaguucggcagcagcuaccagcugcugaacuuccugccucuggacuucuuccccgaccugaacgcccugguggauacagccacagcucuguacgaggaagaacugaccggcagagagcacugcagcccucaccacacagccauuagacaggcccucgugugcugggacgagcugacaaaacugaucgccuggaugagcagcaacaucaccagcgagcaagugcggaccaucaucgugaaccacgugaacgauaccuggggccugaaagugcggcagagccugugguuucaccugagcugucugaccuucggccagcacaccgugcaagaguuucugguguccuucggcguguggaucagaaccccugcuccauacagaccuccaaacgcucccauccugagcacccugccugagcacacagugaucuguuga

SEQ ID NO: 12198 - RNA, 3906 nt, Artificial Sequence
  SARS-CoV-2/Wuhan/WIV05/2019__EPI_ISL_402128 spike protein CDS gc mod (1-1147)(I909C_Y1047C) WhcAg construct
auguucguguuucuggugcugcugccccugguguccagccagugugugaaccugaccaccagaacacagcugccuccagccuacaccaacagcuucaccagaggcguguacuaccccgacaagguguucagauccagcgugcugcacucuacccaggaccuguuccugccuuucuucagcaacgugaccugguuccacgccauccacguguccggcaccaauggcaccaagagauucgacaaccccgugcugcccuucaacgacgggguguacuuugccagcaccgagaaguccaacaucaucagaggcuggaucuucggcaccacacuggacagcaagacccagagccugcugaucgugaacaacgccaccaacguggucaucaaagugugcgaguuccaguucugcaacgaccccuuccugggcgucuacuaccacaagaacaacaagagcuggauggaaagcgaguuccggguguacagcagcgccaacaacugcaccuucgaguacgugucccagccuuuccugauggaccuggaaggcaagcagggcaacuucaagaaccugcgcgaguucguguucaagaacaucgacggcuacuucaaaaucuacagcaagcacaccccuaucaaccucgugcgggaucugccucagggcuucucugcucuggaaccccugguggaucugcccaucggcaucaacaucacccgguuucagacacugcuggcccugcacagaagcuaccugacaccuggcgauagcagcagcggauggacagcuggugccgccgcuuacuaugugggcuaccugcagccuagaaccuuccugcugaaguacaacgagaacggcaccaucaccgacgccguggauugugcucuggauccucugagcgagacaaagugcacccugaaguccuucaccguggaaaagggcaucuaccagaccagcaacuuccgggugcagcccaccgaauccaucgugcgguuccccaauaucaccaaucugugccccuucggcgagguguucaaugccaccagauucgccucuguguacgccuggaaccggaagcggaucagcaauugcguggccgacuacuccgugcuguacaacuccgccagcuucagcaccuucaagugcuacggcguguccccuaccaagcugaacgaccugugcuucacaaacguguacgccgacagcuucgugauccggggagaugaagugcggcagauugccccuggacagacaggcaagaucgccgacuacaacuacaagcugcccgacgacuucaccggcugugugauugccuggaacagcaacaaccuggacuccaaagucggcggcaacuacaauuaccuguaccggcuguuccggaaguccaaucugaagcccuucgagcgggacaucagcaccgaaaucuaucaggccggcagcaccccuugcaacggcguggaaggcuucaacugcuacuucccacugcaguccuacggcuuucagcccacaaauggcgugggcuaucagcccuacagagugguggugcugagcuucgaacugcugcaugcuccugccacagugugcggcccuaagaaaagcaccaaucucgugaagaacaaaugcgugaacuucaacuucaacggccugaccggcaccggcgugcugacagagagcaacaagaaguuccugccauuccagcaguuuggccgggauaucgccgauaccacagacgccguuagagauccccagacacuggaaauccuggacaucaccccaugcagcuucggcggagugucugugaucaccccuggcaccaacaccagcaaucagguggcagugcuguaccaggacgugaacuguaccgaagugcccguggccauucacgccgaucagcugacaccuacauggcggguguacuccaccggcagcaauguguuucagaccagagccggcugucugaucggagccgagcacgugaacaauagcuacgagugcgacauccccaucggcgcuggcaucugugccagcuaccagacacagacaaacagccccagacgggcuagaagcguggccagccagagcaucauugccuacacaaugucucugggcgccgagaacagcguggccuacuccaacaacucuaucgcuauccccaccaacuucaccaucagcgugaccaccgagauccugccuguguccaugaccaagaccagcguggacugcaccauguacaucugcggcgauuccaccgagugcuccaaccugcugcugcaguacggcagcuucugcacccagcugaauagagcccugacagggaucgccguggaacaggacaagaacacccaagagguguucgcccaagugaagcaaaucuacaagaccccuccuaucaaggacuucggcggcuucaauuucagccagauucugcccgauccuagcaagcccagcaagcggagcuucaucgaggaccugcuguucaacaaagugacacuggccgacgccggcuucaucaagcaguauggcgauugucugggcgacauugccgccagggaucugauuugcgcccagaaguuuaacggacugacagugcugccuccucugcugaccgaugagaugaucgcccaguacacaucugcccugcuggccggcacaaucacaagcggcuggacauuuggagcuggcgccgcucugcagauccccuuugcuaugcagauggccuaccgguucaacggcugcggagugacccagaaugugcuguacgagaaccagaagcugaucgccaaccaguucaacagcgccaucggcaagauccaggacagccugagcagcacagcaagcgcccugggaaagcugcaggacguggucaaccagaaugcccaggcacugaacacccuggucaagcagcuguccuccaacuucggcgccaucagcucugugcugaacgauauccugagcagacuggacaaggucgaggccgaggugcagaucgacagacugaucacaggcagacugcagagccuccagacauacgugacccagcagcugaucagagccgccgagauuagagccucugccaaucuggccgccaccaagaugucugagugugugcugggccagagcaagagaguggacuuuugcggcaagggcugucaccugaugagcuucccucagucugccccucacggcgugguguuucugcacgugacauaugugcccgcucaagagaagaauuucaccaccgcuccagccaucugccacgacggcaaagcccacuuuccuagagaaggcguguucguguccaacggcacccauugguucgugacacagcggaacuucuacgagccccagaucaucaccaccgacaacaccuucgugucuggcaacugcgacguugugaucggcauugugaacaauaccguguacgacccucugcagcccgagcuggacagcggaggcggaggaucugacaucgaccccuacaaagaguucggcagcagcuaccagcugcugaacuuccugccucuggacuucuuccccgaccugaacgcccugguggauacagccacagcucuguacgaggaagaacugaccggcagagagcacugcagcccucaccacacagccauuagacaggcccucgugugcugggacgagcugacaaaacugaucgccuggaugagcagcaacaucaccagcgagcaagugcggaccaucaucgugaaccacgugaacgauaccuggggccugaaagugcggcagagccugugguuucaccugagcugucugaccuucggccagcacaccgugcaagaguuucugguguccuucggcguguggaucagaaccccugcuccauacagaccuccaaacgcucccauccugagcacccugccugagcacacagugaucuguuga

SEQ ID NO: 12199 - RNA, 3906 nt, Artificial Sequence
  SARS-CoV-2/Wuhan/WIV05/2019__EPI_ISL_402128 spike protein CDS gc mod (1-1147)(Q965C_S1003C) WhcAg construct
auguucguguuucuggugcugcugccccugguguccagccagugugugaaccugaccaccagaacacagcugccuccagccuacaccaacagcuucaccagaggcguguacuaccccgacaagguguucagauccagcgugcugcacucuacccaggaccuguuccugccuuucuucagcaacgugaccugguuccacgccauccacguguccggcaccaauggcaccaagagauucgacaaccccgugcugcccuucaacgacgggguguacuuugccagcaccgagaaguccaacaucaucagaggcuggaucuucggcaccacacuggacagcaagacccagagccugcugaucgugaacaacgccaccaacguggucaucaaagugugcgaguuccaguucugcaacgaccccuuccugggcgucuacuaccacaagaacaacaagagcuggauggaaagcgaguuccggguguacagcagcgccaacaacugcaccuucgaguacgugucccagccuuuccugauggaccuggaaggcaagcagggcaacuucaagaaccugcgcgaguucguguucaagaacaucgacggcuacuucaaaaucuacagcaagcacaccccuaucaaccucgugcgggaucugccucagggcuucucugcucuggaaccccugguggaucugcccaucggcaucaacaucacccgguuucagacacugcuggcccugcacagaagcuaccugacaccuggcgauagcagcagcggauggacagcuggugccgccgcuuacuaugugggcuaccugcagccuagaaccuuccugcugaaguacaacgagaacggcaccaucaccgacgccguggauugugcucuggauccucugagcgagacaaagugcacccugaaguccuucaccguggaaaagggcaucuaccagaccagcaacuuccgggugcagcccaccgaauccaucgugcgguuccccaauaucaccaaucugugccccuucggcgagguguucaaugccaccagauucgccucuguguacgccuggaaccggaagcggaucagcaauugcguggccgacuacuccgugcuguacaacuccgccagcuucagcaccuucaagugcuacggcguguccccuaccaagcugaacgaccugugcuucacaaacguguacgccgacagcuucgugauccggggagaugaagugcggcagauugccccuggacagacaggcaagaucgccgacuacaacuacaagcugcccgacgacuucaccggcugugugauugccuggaacagcaacaaccuggacuccaaagucggcggcaacuacaauuaccuguaccggcuguuccggaaguccaaucugaagcccuucgagcgggacaucagcaccgaaaucuaucaggccggcagcaccccuugcaacggcguggaaggcuucaacugcuacuucccacugcaguccuacggcuuucagcccacaaauggcgugggcuaucagcccuacagagugguggugcugagcuucgaacugcugcaugcuccugccacagugugcggcccuaagaaaagcaccaaucucgugaagaacaaaugcgugaacuucaacuucaacggccugaccggcaccggcgugcugacagagagcaacaagaaguuccugccauuccagcaguuuggccgggauaucgccgauaccacagacgccguuagagauccccagacacuggaaauccuggacaucaccccaugcagcuucggcggagugucugugaucaccccuggcaccaacaccagcaaucagguggcagugcuguaccaggacgugaacuguaccgaagugcccguggccauucacgccgaucagcugacaccuacauggcggguguacuccaccggcagcaauguguuucagaccagagccggcugucugaucggagccgagcacgugaacaauagcuacgagugcgacauccccaucggcgcuggcaucugugccagcuaccagacacagacaaacagccccagacgggcuagaagcguggccagccagagcaucauugccuacacaaugucucugggcgccgagaacagcguggccuacuccaacaacucuaucgcuauccccaccaacuucaccaucagcgugaccaccgagauccugccuguguccaugaccaagaccagcguggacugcaccauguacaucugcggcgauuccaccgagugcuccaaccugcugcugcaguacggcagcuucugcacccagcugaauagagcccugacagggaucgccguggaacaggacaagaacacccaagagguguucgcccaagugaagcaaaucuacaagaccccuccuaucaaggacuucggcggcuucaauuucagccagauucugcccgauccuagcaagcccagcaagcggagcuucaucgaggaccugcuguucaacaaagugacacuggccgacgccggcuucaucaagcaguauggcgauugucugggcgacauugccgccagggaucugauuugcgcccagaaguuuaacggacugacagugcugccuccucugcugaccgaugagaugaucgcccaguacacaucugcccugcuggccggcacaaucacaagcggcuggacauuuggagcuggcgccgcucugcagauccccuuugcuaugcagauggccuaccgguucaacggcaucggagugacccagaaugugcuguacgagaaccagaagcugaucgccaaccaguucaacagcgccaucggcaagauccaggacagccugagcagcacagcaagcgcccugggaaagcugcaggacguggucaaccagaaugcccaggcacugaacacccuggucaagugccuguccuccaacuucggcgccaucagcucugugcugaacgauauccugagcagacuggacaaggucgaggccgaggugcagaucgacagacugaucacaggcagacugcagugucuccagacauacgugacccagcagcugaucagagccgccgagauuagagccucugccaaucuggccgccaccaagaugucugagugugugcugggccagagcaagagaguggacuuuugcggcaagggcuaccaccugaugagcuucccucagucugccccucacggcgugguguuucugcacgugacauaugugcccgcucaagagaagaauuucaccaccgcuccagccaucugccacgacggcaaagcccacuuuccuagagaaggcguguucguguccaacggcacccauugguucgugacacagcggaacuucuacgagccccagaucaucaccaccgacaacaccuucgugucuggcaacugcgacguugugaucggcauugugaacaauaccguguacgacccucugcagcccgagcuggacagcggaggcggaggaucugacaucgaccccuacaaagaguucggcagcagcuaccagcugcugaacuuccugccucuggacuucuuccccgaccugaacgcccugguggauacagccacagcucuguacgaggaagaacugaccggcagagagcacugcagcccucaccacacagccauuagacaggcccucgugugcugggacgagcugacaaaacugaucgccuggaugagcagcaacaucaccagcgagcaagugcggaccaucaucgugaaccacgugaacgauaccuggggccugaaagugcggcagagccugugguuucaccugagcugucugaccuucggccagcacaccgugcaagaguuucugguguccuucggcguguggaucagaaccccugcuccauacagaccuccaaacgcucccauccugagcacccugccugagcacacagugaucuguuga

SEQ ID NO: 12200 - RNA, 3906 nt, Artificial Sequence
  SARS-CoV-2/Wuhan/WIV05/2019__EPI_ISL_402128 spike protein CDS gc mod (1-1147)(F970C_G999C) WhcAg construct
auguucguguuucuggugcugcugccccugguguccagccagugugugaaccugaccaccagaacacagcugccuccagccuacaccaacagcuucaccagaggcguguacuaccccgacaagguguucagauccagcgugcugcacucuacccaggaccuguuccugccuuucuucagcaacgugaccugguuccacgccauccacguguccggcaccaauggcaccaagagauucgacaaccccgugcugcccuucaacgacgggguguacuuugccagcaccgagaaguccaacaucaucagaggcuggaucuucggcaccacacuggacagcaagacccagagccugcugaucgugaacaacgccaccaacguggucaucaaagugugcgaguuccaguucugcaacgaccccuuccugggcgucuacuaccacaagaacaacaagagcuggauggaaagcgaguuccggguguacagcagcgccaacaacugcaccuucgaguacgugucccagccuuuccugauggaccuggaaggcaagcagggcaacuucaagaaccugcgcgaguucguguucaagaacaucgacggcuacuucaaaaucuacagcaagcacaccccuaucaaccucgugcgggaucugccucagggcuucucugcucuggaaccccugguggaucugcccaucggcaucaacaucacccgguuucagacacugcuggcccugcacagaagcuaccugacaccuggcgauagcagcagcggauggacagcuggugccgccgcuuacuaugugggcuaccugcagccuagaaccuuccugcugaaguacaacgagaacggcaccaucaccgacgccguggauugugcucuggauccucugagcgagacaaagugcacccugaaguccuucaccguggaaaagggcaucuaccagaccagcaacuuccgggugcagcccaccgaauccaucgugcgguuccccaauaucaccaaucugugccccuucggcgagguguucaaugccaccagauucgccucuguguacgccuggaaccggaagcggaucagcaauugcguggccgacuacuccgugcuguacaacuccgccagcuucagcaccuucaagugcuacggcguguccccuaccaagcugaacgaccugugcuucacaaacguguacgccgacagcuucgugauccggggagaugaagugcggcagauugccccuggacagacaggcaagaucgccgacuacaacuacaagcugcccgacgacuucaccggcugugugauugccuggaacagcaacaaccuggacuccaaagucggcggcaacuacaauuaccuguaccggcuguuccggaaguccaaucugaagcccuucgagcgggacaucagcaccgaaaucuaucaggccggcagcaccccuugcaacggcguggaaggcuucaacugcuacuucccacugcaguccuacggcuuucagcccacaaauggcgugggcuaucagcccuacagagugguggugcugagcuucgaacugcugcaugcuccugccacagugugcggcccuaagaaaagcaccaaucucgugaagaacaaaugcgugaacuucaacuucaacggccugaccggcaccggcgugcugacagagagcaacaagaaguuccugccauuccagcaguuuggccgggauaucgccgauaccacagacgccguuagagauccccagacacuggaaauccuggacaucaccccaugcagcuucggcggagugucugugaucaccccuggcaccaacaccagcaaucagguggcagugcuguaccaggacgugaacuguaccgaagugcccguggccauucacgccgaucagcugacaccuacauggcggguguacuccaccggcagcaauguguuucagaccagagccggcugucugaucggagccgagcacgugaacaauagcuacgagugcgacauccccaucggcgcuggcaucugugccagcuaccagacacagacaaacagccccagacgggcuagaagcguggccagccagagcaucauugccuacacaaugucucugggcgccgagaacagcguggccuacuccaacaacucuaucgcuauccccaccaacuucaccaucagcgugaccaccgagauccugccuguguccaugaccaagaccagcguggacugcaccauguacaucugcggcgauuccaccgagugcuccaaccugcugcugcaguacggcagcuucugcacccagcugaauagagcccugacagggaucgccguggaacaggacaagaacacccaagagguguucgcccaagugaagcaaaucuacaagaccccuccuaucaaggacuucggcggcuucaauuucagccagauucugcccgauccuagcaagcccagcaagcggagcuucaucgaggaccugcuguucaacaaagugacacuggccgacgccggcuucaucaagcaguauggcgauugucugggcgacauugccgccagggaucugauuugcgcccagaaguuuaacggacugacagugcugccuccucugcugaccgaugagaugaucgcccaguacacaucugcccugcuggccggcacaaucacaagcggcuggacauuuggagcuggcgccgcucugcagauccccuuugcuaugcagauggccuaccgguucaacggcaucggagugacccagaaugugcuguacgagaaccagaagcugaucgccaaccaguucaacagcgccaucggcaagauccaggacagccugagcagcacagcaagcgcccugggaaagcugcaggacguggucaaccagaaugcccaggcacugaacacccuggucaagcagcuguccuccaacugcggcgccaucagcucugugcugaacgauauccugagcagacuggacaaggucgaggccgaggugcagaucgacagacugaucacauguagacugcagagccuccagacauacgugacccagcagcugaucagagccgccgagauuagagccucugccaaucuggccgccaccaagaugucugagugugugcugggccagagcaagagaguggacuuuugcggcaagggcuaccaccugaugagcuucccucagucugccccucacggcgugguguuucugcacgugacauaugugcccgcucaagagaagaauuucaccaccgcuccagccaucugccacgacggcaaagcccacuuuccuagagaaggcguguucguguccaacggcacccauugguucgugacacagcggaacuucuacgagccccagaucaucaccaccgacaacaccuucgugucuggcaacugcgacguugugaucggcauugugaacaauaccguguacgacccucugcagcccgagcuggacagcggaggcggaggaucugacaucgaccccuacaaagaguucggcagcagcuaccagcugcugaacuuccugccucuggacuucuuccccgaccugaacgcccugguggauacagccacagcucuguacgaggaagaacugaccggcagagagcacugcagcccucaccacacagccauuagacaggcccucgugugcugggacgagcugacaaaacugaucgccuggaugagcagcaacaucaccagcgagcaagugcggaccaucaucgugaaccacgugaacgauaccuggggccugaaagugcggcagagccugugguuucaccugagcugucugaccuucggccagcacaccgugcaagaguuucugguguccuucggcguguggaucagaaccccugcuccauacagaccuccaaacgcucccauccugagcacccugccugagcacacagugaucuguuga

SEQ ID NO: 12201 - RNA, 3906 nt, Artificial Sequence
  SARS-CoV-2/Wuhan/WIV05/2019__EPI_ISL_402128 spike protein CDS gc mod (1-1147)(A972C_R995C) WhcAg construct
auguucguguuucuggugcugcugccccugguguccagccagugugugaaccugaccaccagaacacagcugccuccagccuacaccaacagcuucaccagaggcguguacuaccccgacaagguguucagauccagcgugcugcacucuacccaggaccuguuccugccuuucuucagcaacgugaccugguuccacgccauccacguguccggcaccaauggcaccaagagauucgacaaccccgugcugcccuucaacgacgggguguacuuugccagcaccgagaaguccaacaucaucagaggcuggaucuucggcaccacacuggacagcaagacccagagccugcugaucgugaacaacgccaccaacguggucaucaaagugugcgaguuccaguucugcaacgaccccuuccugggcgucuacuaccacaagaacaacaagagcuggauggaaagcgaguuccggguguacagcagcgccaacaacugcaccuucgaguacgugucccagccuuuccugauggaccuggaaggcaagcagggcaacuucaagaaccugcgcgaguucguguucaagaacaucgacggcuacuucaaaaucuacagcaagcacaccccuaucaaccucgugcgggaucugccucagggcuucucugcucuggaaccccugguggaucugcccaucggcaucaacaucacccgguuucagacacugcuggcccugcacagaagcuaccugacaccuggcgauagcagcagcggauggacagcuggugccgccgcuuacuaugugggcuaccugcagccuagaaccuuccugcugaaguacaacgagaacggcaccaucaccgacgccguggauugugcucuggauccucugagcgagacaaagugcacccugaaguccuucaccguggaaaagggcaucuaccagaccagcaacuuccgggugcagcccaccgaauccaucgugcgguuccccaauaucaccaaucugugccccuucggcgagguguucaaugccaccagauucgccucuguguacgccuggaaccggaagcggaucagcaauugcguggccgacuacuccgugcuguacaacuccgccagcuucagcaccuucaagugcuacggcguguccccuaccaagcugaacgaccugugcuucacaaacguguacgccgacagcuucgugauccggggagaugaagugcggcagauugccccuggacagacaggcaagaucgccgacuacaacuacaagcugcccgacgacuucaccggcugugugauugccuggaacagcaacaaccuggacuccaaagucggcggcaacuacaauuaccuguaccggcuguuccggaaguccaaucugaagcccuucgagcgggacaucagcaccgaaaucuaucaggccggcagcaccccuugcaacggcguggaaggcuucaacugcuacuucccacugcaguccuacggcuuucagcccacaaauggcgugggcuaucagcccuacagagugguggugcugagcuucgaacugcugcaugcuccugccacagugugcggcccuaagaaaagcaccaaucucgugaagaacaaaugcgugaacuucaacuucaacggccugaccggcaccggcgugcugacagagagcaacaagaaguuccugccauuccagcaguuuggccgggauaucgccgauaccacagacgccguuagagauccccagacacuggaaauccuggacaucaccccaugcagcuucggcggagugucugugaucaccccuggcaccaacaccagcaaucagguggcagugcuguaccaggacgugaacuguaccgaagugcccguggccauucacgccgaucagcugacaccuacauggcggguguacuccaccggcagcaauguguuucagaccagagccggcugucugaucggagccgagcacgugaacaauagcuacgagugcgacauccccaucggcgcuggcaucugugccagcuaccagacacagacaaacagccccagacgggcuagaagcguggccagccagagcaucauugccuacacaaugucucugggcgccgagaacagcguggccuacuccaacaacucuaucgcuauccccaccaacuucaccaucagcgugaccaccgagauccugccuguguccaugaccaagaccagcguggacugcaccauguacaucugcggcgauuccaccgagugcuccaaccugcugcugcaguacggcagcuucugcacccagcugaauagagcccugacagggaucgccguggaacaggacaagaacacccaagagguguucgcccaagugaagcaaaucuacaagaccccuccuaucaaggacuucggcggcuucaauuucagccagauucugcccgauccuagcaagcccagcaagcggagcuucaucgaggaccugcuguucaacaaagugacacuggccgacgccggcuucaucaagcaguauggcgauugucugggcgacauugccgccagggaucugauuugcgcccagaaguuuaacggacugacagugcugccuccucugcugaccgaugagaugaucgcccaguacacaucugcccugcuggccggcacaaucacaagcggcuggacauuuggagcuggcgccgcucugcagauccccuuugcuaugcagauggccuaccgguucaacggcaucggagugacccagaaugugcuguacgagaaccagaagcugaucgccaaccaguucaacagcgccaucggcaagauccaggacagccugagcagcacagcaagcgcccugggaaagcugcaggacguggucaaccagaaugcccaggcacugaacacccuggucaagcagcuguccuccaacuucggcugcaucagcucugugcugaacgauauccugagcagacuggacaaggucgaggccgaggugcagaucgacugucugaucacaggcagacugcagagccuccagacauacgugacccagcagcugaucagagccgccgagauuagagccucugccaaucuggccgccaccaagaugucugagugugugcugggccagagcaagagaguggacuuuugcggcaagggcuaccaccugaugagcuucccucagucugccccucacggcgugguguuucugcacgugacauaugugcccgcucaagagaagaauuucaccaccgcuccagccaucugccacgacggcaaagcccacuuuccuagagaaggcguguucguguccaacggcacccauugguucgugacacagcggaacuucuacgagccccagaucaucaccaccgacaacaccuucgugucuggcaacugcgacguugugaucggcauugugaacaauaccguguacgacccucugcagcccgagcuggacagcggaggcggaggaucugacaucgaccccuacaaagaguucggcagcagcuaccagcugcugaacuuccugccucuggacuucuuccccgaccugaacgcccugguggauacagccacagcucuguacgaggaagaacugaccggcagagagcacugcagcccucaccacacagccauuagacaggcccucgugugcugggacgagcugacaaaacugaucgccuggaugagcagcaacaucaccagcgagcaagugcggaccaucaucgugaaccacgugaacgauaccuggggccugaaagugcggcagagccugugguuucaccugagcugucugaccuucggccagcacaccgugcaagaguuucugguguccuucggcguguggaucagaaccccugcuccauacagaccuccaaacgcucccauccugagcacccugccugagcacacagugaucuguuga

SEQ ID NO: 12202 - RNA, 3906 nt, Artificial Sequence
  SARS-CoV-2/Wuhan/WIV05/2019__EPI_ISL_402128 spike protein CDS gc mod (1-1147)(A890C_V1040C) WhcAg construct
auguucguguuucuggugcugcugccccugguguccagccagugugugaaccugaccaccagaacacagcugccuccagccuacaccaacagcuucaccagaggcguguacuaccccgacaagguguucagauccagcgugcugcacucuacccaggaccuguuccugccuuucuucagcaacgugaccugguuccacgccauccacguguccggcaccaauggcaccaagagauucgacaaccccgugcugcccuucaacgacgggguguacuuugccagcaccgagaaguccaacaucaucagaggcuggaucuucggcaccacacuggacagcaagacccagagccugcugaucgugaacaacgccaccaacguggucaucaaagugugcgaguuccaguucugcaacgaccccuuccugggcgucuacuaccacaagaacaacaagagcuggauggaaagcgaguuccggguguacagcagcgccaacaacugcaccuucgaguacgugucccagccuuuccugauggaccuggaaggcaagcagggcaacuucaagaaccugcgcgaguucguguucaagaacaucgacggcuacuucaaaaucuacagcaagcacaccccuaucaaccucgugcgggaucugccucagggcuucucugcucuggaaccccugguggaucugcccaucggcaucaacaucacccgguuucagacacugcuggcccugcacagaagcuaccugacaccuggcgauagcagcagcggauggacagcuggugccgccgcuuacuaugugggcuaccugcagccuagaaccuuccugcugaaguacaacgagaacggcaccaucaccgacgccguggauugugcucuggauccucugagcgagacaaagugcacccugaaguccuucaccguggaaaagggcaucuaccagaccagcaacuuccgggugcagcccaccgaauccaucgugcgguuccccaauaucaccaaucugugccccuucggcgagguguucaaugccaccagauucgccucuguguacgccuggaaccggaagcggaucagcaauugcguggccgacuacuccgugcuguacaacuccgccagcuucagcaccuucaagugcuacggcguguccccuaccaagcugaacgaccugugcuucacaaacguguacgccgacagcuucgugauccggggagaugaagugcggcagauugccccuggacagacaggcaagaucgccgacuacaacuacaagcugcccgacgacuucaccggcugugugauugccuggaacagcaacaaccuggacuccaaagucggcggcaacuacaauuaccuguaccggcuguuccggaaguccaaucugaagcccuucgagcgggacaucagcaccgaaaucuaucaggccggcagcaccccuugcaacggcguggaaggcuucaacugcuacuucccacugcaguccuacggcuuucagcccacaaauggcgugggcuaucagcccuacagagugguggugcugagcuucgaacugcugcaugcuccugccacagugugcggcccuaagaaaagcaccaaucucgugaagaacaaaugcgugaacuucaacuucaacggccugaccggcaccggcgugcugacagagagcaacaagaaguuccugccauuccagcaguuuggccgggauaucgccgauaccacagacgccguuagagauccccagacacuggaaauccuggacaucaccccaugcagcuucggcggagugucugugaucaccccuggcaccaacaccagcaaucagguggcagugcuguaccaggacgugaacuguaccgaagugcccguggccauucacgccgaucagcugacaccuacauggcggguguacuccaccggcagcaauguguuucagaccagagccggcugucugaucggagccgagcacgugaacaauagcuacgagugcgacauccccaucggcgcuggcaucugugccagcuaccagacacagacaaacagccccagacgggcuagaagcguggccagccagagcaucauugccuacacaaugucucugggcgccgagaacagcguggccuacuccaacaacucuaucgcuauccccaccaacuucaccaucagcgugaccaccgagauccugccuguguccaugaccaagaccagcguggacugcaccauguacaucugcggcgauuccaccgagugcuccaaccugcugcugcaguacggcagcuucugcacccagcugaauagagcccugacagggaucgccguggaacaggacaagaacacccaagagguguucgcccaagugaagcaaaucuacaagaccccuccuaucaaggacuucggcggcuucaauuucagccagauucugcccgauccuagcaagcccagcaagcggagcuucaucgaggaccugcuguucaacaaagugacacuggccgacgccggcuucaucaagcaguauggcgauugucugggcgacauugccgccagggaucugauuugcgcccagaaguuuaacggacugacagugcugccuccucugcugaccgaugagaugaucgcccaguacacaucugcccugcuggccggcacaaucacaagcggcuggacauuuggaugcggcgccgcucugcagauccccuuugcuaugcagauggccuaccgguucaacggcaucggagugacccagaaugugcuguacgagaaccagaagcugaucgccaaccaguucaacagcgccaucggcaagauccaggacagccugagcagcacagcaagcgcccugggaaagcugcaggacguggucaaccagaaugcccaggcacugaacacccuggucaagcagcuguccuccaacuucggcgccaucagcucugugcugaacgauauccugagcagacuggacaaggucgaggccgaggugcagaucgacagacugaucacaggcagacugcagagccuccagacauacgugacccagcagcugaucagagccgccgagauuagagccucugccaaucuggccgccaccaagaugucugagugugugcugggccagagcaagagaugugacuuuugcggcaagggcuaccaccugaugagcuucccucagucugccccucacggcgugguguuucugcacgugacauaugugcccgcucaagagaagaauuucaccaccgcuccagccaucugccacgacggcaaagcccacuuuccuagagaaggcguguucguguccaacggcacccauugguucgugacacagcggaacuucuacgagccccagaucaucaccaccgacaacaccuucgugucuggcaacugcgacguugugaucggcauugugaacaauaccguguacgacccucugcagcccgagcuggacagcggaggcggaggaucugacaucgaccccuacaaagaguucggcagcagcuaccagcugcugaacuuccugccucuggacuucuuccccgaccugaacgcccugguggauacagccacagcucuguacgaggaagaacugaccggcagagagcacugcagcccucaccacacagccauuagacaggcccucgugugcugggacgagcugacaaaacugaucgccuggaugagcagcaacaucaccagcgagcaagugcggaccaucaucgugaaccacgugaacgauaccuggggccugaaagugcggcagagccugugguuucaccugagcugucugaccuucggccagcacaccgugcaagaguuucugguguccuucggcguguggaucagaaccccugcuccauacagaccuccaaacgcucccauccugagcacccugccugagcacacagugaucuguuga

SEQ ID NO: 12203 - RNA, 3906 nt, Artificial Sequence
  SARS-CoV-2/Wuhan/WIV05/2019__EPI_ISL_402128 spike protein CDS gc mod (1-1147)(T874C_S1055C) WhcAg construct
auguucguguuucuggugcugcugccccugguguccagccagugugugaaccugaccaccagaacacagcugccuccagccuacaccaacagcuucaccagaggcguguacuaccccgacaagguguucagauccagcgugcugcacucuacccaggaccuguuccugccuuucuucagcaacgugaccugguuccacgccauccacguguccggcaccaauggcaccaagagauucgacaaccccgugcugcccuucaacgacgggguguacuuugccagcaccgagaaguccaacaucaucagaggcuggaucuucggcaccacacuggacagcaagacccagagccugcugaucgugaacaacgccaccaacguggucaucaaagugugcgaguuccaguucugcaacgaccccuuccugggcgucuacuaccacaagaacaacaagagcuggauggaaagcgaguuccggguguacagcagcgccaacaacugcaccuucgaguacgugucccagccuuuccugauggaccuggaaggcaagcagggcaacuucaagaaccugcgcgaguucguguucaagaacaucgacggcuacuucaaaaucuacagcaagcacaccccuaucaaccucgugcgggaucugccucagggcuucucugcucuggaaccccugguggaucugcccaucggcaucaacaucacccgguuucagacacugcuggcccugcacagaagcuaccugacaccuggcgauagcagcagcggauggacagcuggugccgccgcuuacuaugugggcuaccugcagccuagaaccuuccugcugaaguacaacgagaacggcaccaucaccgacgccguggauugugcucuggauccucugagcgagacaaagugcacccugaaguccuucaccguggaaaagggcaucuaccagaccagcaacuuccgggugcagcccaccgaauccaucgugcgguuccccaauaucaccaaucugugccccuucggcgagguguucaaugccaccagauucgccucuguguacgccuggaaccggaagcggaucagcaauugcguggccgacuacuccgugcuguacaacuccgccagcuucagcaccuucaagugcuacggcguguccccuaccaagcugaacgaccugugcuucacaaacguguacgccgacagcuucgugauccggggagaugaagugcggcagauugccccuggacagacaggcaagaucgccgacuacaacuacaagcugcccgacgacuucaccggcugugugauugccuggaacagcaacaaccuggacuccaaagucggcggcaacuacaauuaccuguaccggcuguuccggaaguccaaucugaagcccuucgagcgggacaucagcaccgaaaucuaucaggccggcagcaccccuugcaacggcguggaaggcuucaacugcuacuucccacugcaguccuacggcuuucagcccacaaauggcgugggcuaucagcccuacagagugguggugcugagcuucgaacugcugcaugcuccugccacagugugcggcccuaagaaaagcaccaaucucgugaagaacaaaugcgugaacuucaacuucaacggccugaccggcaccggcgugcugacagagagcaacaagaaguuccugccauuccagcaguuuggccgggauaucgccgauaccacagacgccguuagagauccccagacacuggaaauccuggacaucaccccaugcagcuucggcggagugucugugaucaccccuggcaccaacaccagcaaucagguggcagugcuguaccaggacgugaacuguaccgaagugcccguggccauucacgccgaucagcugacaccuacauggcggguguacuccaccggcagcaauguguuucagaccagagccggcugucugaucggagccgagcacgugaacaauagcuacgagugcgacauccccaucggcgcuggcaucugugccagcuaccagacacagacaaacagccccagacgggcuagaagcguggccagccagagcaucauugccuacacaaugucucugggcgccgagaacagcguggccuacuccaacaacucuaucgcuauccccaccaacuucaccaucagcgugaccaccgagauccugccuguguccaugaccaagaccagcguggacugcaccauguacaucugcggcgauuccaccgagugcuccaaccugcugcugcaguacggcagcuucugcacccagcugaauagagcccugacagggaucgccguggaacaggacaagaacacccaagagguguucgcccaagugaagcaaaucuacaagaccccuccuaucaaggacuucggcggcuucaauuucagccagauucugcccgauccuagcaagcccagcaagcggagcuucaucgaggaccugcuguucaacaaagugacacuggccgacgccggcuucaucaagcaguauggcgauugucugggcgacauugccgccagggaucugauuugcgcccagaaguuuaacggacugacagugcugccuccucugcugaccgaugagaugaucgcccaguacugcucugcccugcuggccggcacaaucacaagcggcuggacauuuggagcuggcgccgcucugcagauccccuuugcuaugcagauggccuaccgguucaacggcaucggagugacccagaaugugcuguacgagaaccagaagcugaucgccaaccaguucaacagcgccaucggcaagauccaggacagccugagcagcacagcaagcgcccugggaaagcugcaggacguggucaaccagaaugcccaggcacugaacacccuggucaagcagcuguccuccaacuucggcgccaucagcucugugcugaacgauauccugagcagacuggacaaggucgaggccgaggugcagaucgacagacugaucacaggcagacugcagagccuccagacauacgugacccagcagcugaucagagccgccgagauuagagccucugccaaucuggccgccaccaagaugucugagugugugcugggccagagcaagagaguggacuuuugcggcaagggcuaccaccugaugagcuucccucagugcgccccucacggcgugguguuucugcacgugacauaugugcccgcucaagagaagaauuucaccaccgcuccagccaucugccacgacggcaaagcccacuuuccuagagaaggcguguucguguccaacggcacccauugguucgugacacagcggaacuucuacgagccccagaucaucaccaccgacaacaccuucgugucuggcaacugcgacguugugaucggcauugugaacaauaccguguacgacccucugcagcccgagcuggacagcggaggcggaggaucugacaucgaccccuacaaagaguucggcagcagcuaccagcugcugaacuuccugccucuggacuucuuccccgaccugaacgcccugguggauacagccacagcucuguacgaggaagaacugaccggcagagagcacugcagcccucaccacacagccauuagacaggcccucgugugcugggacgagcugacaaaacugaucgccuggaugagcagcaacaucaccagcgagcaagugcggaccaucaucgugaaccacgugaacgauaccuggggccugaaagugcggcagagccugugguuucaccugagcugucugaccuucggccagcacaccgugcaagaguuucugguguccuucggcguguggaucagaaccccugcuccauacagaccuccaaacgcucccauccugagcacccugccugagcacacagugaucuguuga

SEQ ID NO: 12204 - RNA, 4094 nt, Artificial Sequence
  SARS-CoV-2/Wuhan/WIV05/2019__EPI_ISL_402128 spike protein mRNA wt (1-1273)
aggagagucccgcagucggcguccagcggcucugcuuguucgugugugugucguugcaggccuuauucaagcuuaccauguuuguuuuucuuguuuuauugccacuagucucuagucaguguguuaaucuuacaaccagaacucaauuacccccugcauacacuaauucuuucacacgugguguuuauuacccugacaaaguuuucagauccucaguuuuacauucaacucaggacuuguucuuaccuuucuuuuccaauguuacuugguuccaugcuauacaugucucugggaccaaugguacuaagagguuugauaacccuguccuaccauuuaaugaugguguuuauuuugcuuccacugagaagucuaacauaauaagaggcuggauuuuugguacuacuuuagauucgaagacccagucccuacuuauuguuaauaacgcuacuaauguuguuauuaaagucugugaauuucaauuuuguaaugauccauuuuuggguguuuauuaccacaaaaacaacaaaaguuggauggaaagugaguucagaguuuauucuagugcgaauaauugcacuuuugaauaugucucucagccuuuucuuauggaccuugaaggaaaacaggguaauuucaaaaaucuuagggaauuuguguuuaagaauauugaugguuauuuuaaaauauauucuaagcacacgccuauuaauuuagugcgugaucucccucaggguuuuucggcuuuagaaccauugguagauuugccaauagguauuaacaucacuagguuucaaacuuuacuugcuuuacauagaaguuauuugacuccuggugauucuucuucagguuggacagcuggugcugcagcuuauuauguggguuaucuucaaccuaggacuuuucuauuaaaauauaaugaaaauggaaccauuacagaugcuguagacugugcacuugacccucucucagaaacaaaguguacguugaaauccuucacuguagaaaaaggaaucuaucaaacuucuaacuuuagaguccaaccaacagaaucuauuguuagauuuccuaauauuacaaacuugugcccuuuuggugaaguuuuuaacgccaccagauuugcaucuguuuaugcuuggaacaggaagagaaucagcaacuguguugcugauuauucuguccuauauaauuccgcaucauuuuccacuuuuaaguguuauggagugucuccuacuaaauuaaaugaucucugcuuuacuaaugucuaugcagauucauuuguaauuagaggugaugaagucagacaaaucgcuccagggcaaacuggaaagauugcugauuauaauuauaaauuaccagaugauuuuacaggcugcguuauagcuuggaauucuaacaaucuugauucuaagguuggugguaauuauaauuaccuguauagauuguuuaggaagucuaaucucaaaccuuuugagagagauauuucaacugaaaucuaucaggccgguagcacaccuuguaaugguguugaagguuuuaauuguuacuuuccuuuacaaucauaugguuuccaacccacuaaugguguugguuaccaaccauacagaguaguaguacuuucuuuugaacuucuacaugcaccagcaacuguuuguggaccuaaaaagucuacuaauuugguuaaaaacaaaugugucaauuucaacuucaaugguuuaacaggcacagguguucuuacugagucuaacaaaaaguuucugccuuuccaacaauuuggcagagacauugcugacacuacugaugcuguccgugauccacagacacuugagauucuugacauuacaccauguucuuuugguggugucaguguuauaacaccaggaacaaauacuucuaaccagguugcuguucuuuaucaggauguuaacugcacagaagucccuguugcuauucaugcagaucaacuuacuccuacuuggcguguuuauucuacagguucuaauguuuuucaaacacgugcaggcuguuuaauaggggcugaacaugucaacaacucauaugagugugacauacccauuggugcagguauaugcgcuaguuaucagacucagacuaauucuccucggcgggcacguaguguagcuagucaauccaucauugccuacacuaugucacuuggugcagaaaauucaguugcuuacucuaauaacucuauugccauacccacaaauuuuacuauuaguguuaccacagaaauucuaccagugucuaugaccaagacaucaguagauuguacaauguacauuuguggugauucaacugaaugcagcaaucuuuuguugcaauauggcaguuuuuguacacaauuaaaccgugcuuuaacuggaauagcuguugaacaagacaaaaacacccaagaaguuuuugcacaagucaaacaaauuuacaaaacaccaccaauuaaagauuuuggugguuuuaauuuuucacaaauauuaccagauccaucaaaaccaagcaagaggucauuuauugaagaucuacuuuucaacaaagugacacuugcagaugcuggcuucaucaaacaauauggugauugccuuggugauauugcugcuagagaccucauuugugcacaaaaguuuaacggccuuacuguuuugccaccuuugcucacagaugaaaugauugcucaauacacuucugcacuguuagcggguacaaucacuucugguuggaccuuuggugcaggugcugcauuacaaauaccauuugcuaugcaaauggcuuauagguuuaaugguauuggaguuacacagaauguucucuaugagaaccaaaaauugauugccaaccaauuuaauagugcuauuggcaaaauucaagacucacuuucuuccacagcaagugcacuuggaaaacuucaagauguggucaaccaaaaugcacaagcuuuaaacacgcuuguuaaacaacuuagcuccaauuuuggugcaauuucaaguguuuuaaaugauauccuuucacgucuugacaaaguugaggcugaagugcaaauugauagguugaucacaggcagacuucaaaguuugcagacauaugugacucaacaauuaauuagagcugcagaaaucagagcuucugcuaaucuugcugcuacuaaaaugucagaguguguacuuggacaaucaaaaagaguugauuuuuguggaaagggcuaucaucuuauguccuucccucagucagcaccucaugguguagucuucuugcaugugacuuaugucccugcacaagaaaagaacuucacaacugcuccugccauuugucaugauggaaaagcacacuuuccucgugaaggugucuuuguuucaaauggcacacacugguuuguaacacaaaggaauuuuuaugaaccacaaaucauuacuacagacaacacauuugugucugguaacugugauguuguaauaggaauugucaacaacacaguuuaugauccuuugcaaccugaauuagacucauucaaggaggaguuagauaaauauuuuaagaaucauacaucaccagauguugauuuaggugacaucucuggcauuaaugcuucaguuguaaacauucaaaaagaaauugaccgccucaaugagguugccaagaauuuaaaugaaucucucaucgaucuccaagaacuuggaaaguaugagcaguauauaaaauggccaugguacauuuggcuagguuuuauagcuggcuugauugccauaguaauggugacaauuaugcuuugcuguaugaccaguugcuguaguugucucaagggcuguuguucuuguggauccugcugcaaauuugaugaagacgacucugagccagugcucaaaggagucaaauuacauuacacauaaggacuagucccuguucccagagcccacuuuuuuuucuuuuuuugaaauaaaauagccugucuuucagaucucaaaggcucuuuucagagccaccaaaaaaaaaaaaaaaaaaaaaaaaaaaaaaaaaaaaaaaaaaaaaaaaaaaaaaaaaaaaaaaaaaaaaaaaaaaaaaaaaaaaaaaaaaaaaaaaaaaaa

SEQ ID NO: 12205 - RNA, 4082 nt, Artificial Sequence
  SARS-CoV-2/bat/Yunnan/RaTG13/2013__EPI_ISL_402131 spike protein mRNA wt (1-1269)
aggagagucccgcagucggcguccagcggcucugcuuguucgugugugugucguugcaggccuuauucaagcuuaccauguuuguuuuucuuguuuuauugccacuaguuucuagucaguguguuaaucuaacaacuagaacucaguuaccuccugcauacaccaacucauccacccguggugucuauuacccugacaaaguuuucagaucuucaguuuuacauuuaacucaggauuuguuuuuaccuuucuucuccaaugugaccugguuccaugcuauacauguuucagggaccaaugguauuaaaagguuugauaacccaguucugccauucaacgauggcgucuauuuugcuuccacugagaagucuaauauaauaagaggauggauuuuugguacuaccuuagauucgaagacccagucucuacuuauuguuaauaacgcuacuaauguuguuauuaaagucugugaauuucaauuuuguaaugauccauuuuuggguguuuauuaccacaaaaacaacaaaaguuggauggaaagugaguucagaguuuacucuagugcgaauaauugcacuuuugaguaugucucucagccuuuucuuauggaccuugaaggaaaacaggguaauuucaaaaaucuuagggaauucguguuuaagaauauugaugguuauuucaaaauauauucuaaacauacgccuauuaauuuagugcgugaucuucccccugguuuuucagcuuuagaaccauugguagaucugccaauagguauuaacaucacuagguuucaaacuuuacuugcuuuacauagaagcuauuugacuccuggugauucuucuucagguuggacagcuggugcugcagcuuauuauguggguuaucuucaaccaaggacuuuucuacuaaaauauaaugagaauggaaccauuacagaugcuguagacugugcacuugacccucuuucagaaacaaaguguacguuaaaauccuucacuguugaaaaaggaauuuaucaaaccucuaacuuuagaguccaaccaacagauucuauuguuagauucccaaauauuacaaacuuauguccuuuuggugaaguuuuuaacgccaccacauucgcaucaguuuaugcuuggaacagaaagagaauuagcaacuguguugcugauuacucuguccuauauaauuccacuucauuuucuaccuuuaaauguuauggagugucuccuacuaaauuaaaugaucucugcuuuacuaauguuuaugcagacucauuugugauuacaggugaugaagucagacaaauugcgccaggacaaacuggaaagauugcugacuacaauuauaaacuaccagaugauuuuacugguuguguuauagcuuggaauucuaagcauauugaugcaaaagagggcgguaauuuuaacuaucuuuaccgucucuuuagaaaagcuaaucuuaaacccuuugagagggauaucucaacugaaauuuaccaagcaggcagcaaaccuuguaauggucaaacuggucuaaauugcuacuacccacuuuauagauauggauuuuacccuacugaugguguuggucaccaaccuuauaggguaguaguacuuucuuuugaacuucuaaaugcaccagcaacuguuuguggaccuaagaagucuacuaacuugguuaaaaauaaaugugucaauuucaacuuuaaugguuuaacuggcacagguguccucacagagucuaauaaaaaguuucuaccuuuccaacaauuugguagagacauugcagacacuacugaugccguccgugauccacagacacuugagauucuugacauuacaccauguucuuuugguggugucaguguuauaacaccuggaacaaaugccucuaaccagguugcuguucuuuaucaggauguuaacugcacagaagucccuguugcuauccaugcagaccaacuuacucccacuuggcguguuuacuccacagguucuaauguuuuucaaacacgugcagguuguuuaauaggggcugaacaugucaauaacucguaugagugugacauaccuauuggugcaggaauaugcgccaguuaucagacucaaacuaauucacguaguguggccagucaaucuauuauugccuacacuaugucacuuggugcagaaaauucaguugcuuauucuaauaacucuauugccauaccuacaaauuuuacuauuagugugaccacugaaauucuaccugugucuaugacaaagacaucgguagacuguacaauguauauuuguggugauucaacugagugcagcaaccuuuuguugcaauaugguaguuuuugcacacaauuaaaucgugcuuuaacuggaauagcuguugaacaggacaaaaauacucaagaaguuuuugcucaaguuaaacaaauuuauaagacaccaccaauuaaagauuuuggugguuucaauuuuucacaaauauuaccagauccaucaaaaccaagcaagaggucauuuauugaggauuuacuuuucaauaaagugacacuugcugaugcuggcuucaucaaacaauauggugauugccuuggugauauugcugcuagggaucuuauuugugcucaaaaguucaauggccuuacuguucugccaccuuugcucacagaugaaaugaucgcucaauacacuucugcacuauuagcagguacaaucacuucugguuggacuuuuggugcaggugcugcuuuacaaauaccauuugccaugcaaauggcuuauagguuuaaugguauuggaguuacacagaauguucucuaugagaaccaaaaauugauugccaaccaguuuaauagugcuauuggcaaaauucaagacucacuuucuucuacagcaagugcacuuggaaaacuucaagauguugucaaccaaaaugcacaagcuuuaaacacgcuuguuaaacaacuuagcuccaauuuuggagcuauuucuagcguguuaaaugauauccuuucacgucucgacaaaguugaggcugaagugcagauugacagguugaucacaggcagacuucaaagcuugcagacauaugugacucaacaauuaauuagagcugcagaaaucagagcuucugccaaucuugcugcuacuaaaaugucagaguguguacucggacaaucaaaaagaguugauuuuuguggaaaaggcuaucaucuuaugucuuucccucagucagcaccucaugguguagucuucuugcaugugacauaugucccugcacaagaaaagaacuucacaacugcuccugccauuugucaugauggaaaagcacacuuuccacgugaagguguuuucguuucaaauggcacacacugguuuguuacacaaaggaauuuuuaugaaccacaaauuauuacaacagacaacacauuugucucugguagcugugauguuguaauaggaauugucaacaacacaguuuaugauccuuugcaaccagaacuugauucauucaaggaggaguuggauaaauacuuuaaaaaucauacaucaccugauguagauuuaggugacauuucuggcauuaaugcuucaguugucaauauucaaaaggaaauugaccgccucaaugagguugccaaaaaucuaaaugaaucucucaucgaucuccaagaacuuggaaaguaugaacaguauauaaaauggccaugguacauuuggcuagguuuuauagcuggcuugauugccauaauaauggucacgauuaugcuuugcuguaugaccaguugcugcaguugucucaagggcuguuguucuugcggaucuugcugcaaauuugaugaagacgacucugagccagugcucaaaggagucaaauuacauuacacauaaggacuagucccuguucccagagcccacuuuuuuuucuuuuuuugaaauaaaauagccugucuuucagaucucaaaggcucuuuucagagccaccaaaaaaaaaaaaaaaaaaaaaaaaaaaaaaaaaaaaaaaaaaaaaaaaaaaaaaaaaaaaaaaaaaaaaaaaaaaaaaaaaaaaaaaaaaaaaaaaaaaaa

SEQ ID NO: 12206 - RNA, 4094 nt, Artificial Sequence
  SARS-CoV-2/Wuhan/HBCDC-HB-01/2019__EPI_ISL_402132 spike protein mRNA wt (1-1273)
aggagagucccgcagucggcguccagcggcucugcuuguucgugugugugucguugcaggccuuauucaagcuuaccauguuuguuuuucuuguuuuauugccacuagucucuagucaguguguuaaucuuacaaccagaacucaauuacccccugcauacacuaauucuaucacacgugguguuuauuacccugacaaaguuuucagauccucaguuuuacauucaacucaggacuuguucuuaccuuucuuuuccaauguuacuugguuccaugcuauacaugucucugggaccaaugguacuaagagguuugauaacccuguccuaccauuuaaugaugguguuuauuuugcuuccacugagaagucuaacauaauaagaggcuggauuuuugguacuacuuuagauucgaagacccagucccuacuuauuguuaauaacgcuacuaauguuguuauuaaagucugugaauuucaauuuuguaaugauccauuuuuggguguuuauuaccacaaaaacaacaaaaguuggauggaaagugaguucagaguuuauucuagugcgaauaauugcacuuuugaauaugucucucagccuuuucuuauggaccuugaaggaaaacaggguaauuucaaaaaucuuagggaauuuguguuuaagaauauugaugguuauuuuaaaauauauucuaagcacacgccuauuaauuuagugcgugaucucccucaggguuuuucggcuuuagaaccauugguagauuugccaauagguauuaacaucacuagguuucaaacuuuacuugcuuuacauagaaguuauuugacuccuggugauucuucuucagguuggacagcuggugcugcagcuuauuauguggguuaucuucaaccuaggacuuuucuauuaaaauauaaugaaaauggaaccauuacagaugcuguagacugugcacuugacccucucucagaaacaaaguguacguugaaauccuucacuguagaaaaaggaaucuaucaaacuucuaacuuuagaguccaaccaacagaaucuauuguuagauuuccuaauauuacaaacuugugcccuuuuggugaaguuuuuaacgccaccagauuugcaucuguuuaugcuuggaacaggaagagaaucagcaacuguguugcugauuauucuguccuauauaauuccgcaucauuuuccacuuuuaaguguuauggagugucuccuacuaaauuaaaugaucucugcuuuacuaaugucuaugcagauucauuuguaauuagaggugaugaagucagacaaaucgcuccagggcaaacuggaaagauugcugauuauaauuauaaauuaccagaugauuuuacaggcugcguuauagcuuggaauucuaacaaucuugauucuaagguuggugguaauuauaauuaccuguauagauuguuuaggaagucuaaucucaaaccuuuugagagagauauuucaacugaaaucuaucaggccgguagcacaccuuguaaugguguugaagguuuuaauuguuacuuuccuuuacaaucauaugguuuccaacccacuaaugguguugguuaccaaccauacagaguaguaguacuuucuuuugaacuucuacaugcaccagcaacuguuuguggaccuaaaaagucuacuaauuugguuaaaaacaaaugugucaauuucaacuucaaugguuuaacaggcacagguguucuuacugagucuaacaaaaaguuucugccuuuccaacaauuuggcagagacauugcugacacuacugaugcuguccgugauccacagacacuugagauucuugacauuacaccauguucuuuugguggugucaguguuauaacaccaggaacaaauacuucuaaccagguugcuguucuuuaucaggauguuaacugcacagaagucccuguugcuauucaugcagaucaacuuacuccuacuuggcguguuuauucuacagguucuaauguuuuucaaacacgugcaggcuguuuaauaggggcugaacaugucaacaacucauaugagugugacauacccauuggugcagguauaugcgcuaguuaucagacucagacuaauucuccucggcgggcacguaguguagcuagucaauccaucauugccuacacuaugucacuuggugcagaaaauucaguugcuuacucuaauaacucuauugccauacccacaaauuuuacuauuaguguuaccacagaaauucuaccagugucuaugaccaagacaucaguagauuguacaauguacauuuguggugauucaacugaaugcagcaaucuuuuguugcaauauggcaguuuuuguacacaauuaaaccgugcuuuaacuggaauagcuguugaacaagacaaaaacacccaagaaguuuuugcacaagucaaacaaauuuacaaaacaccaccaauuaaagauuuuggugguuuuaauuuuucacaaauauuaccagauccaucaaaaccaagcaagaggucauuuauugaagaucuacuuuucaacaaagugacacuugcagaugcuggcuucaucaaacaauauggugauugccuuggugauauugcugcuagagaccucauuugugcacaaaaguuuaacggccuuacuguuuugccaccuuugcucacagaugaaaugauugcucaauacacuucugcacuguuagcggguacaaucacuucugguuggaccuuuggugcaggugcugcauuacaaauaccauuugcuaugcaaauggcuuauagguuuaaugguauuggaguuacacagaauguucucuaugagaaccaaaaauugauugccaaccaauuuaauagugcuauuggcaaaauucaagacucacuuucuuccacagcaagugcacuuggaaaacuucaagauguggucaaccaaaaugcacaagcuuuaaacacgcuuguuaaacaacuuagcuccaauuuuggugcaauuucaaguguuuuaaaugauauccuuucacgucuugacaaaguugaggcugaagugcaaauugauagguugaucacaggcagacuucaaaguuugcagacauaugugacucaacaauuaauuagagcugcagaaaucagagcuucugcuaaucuugcugcuacuaaaaugucagaguguguacuuggacaaucaaaaagaguugauuuuuguggaaagggcuaucaucuuauguccuucccucagucagcaccucaugguguagucuucuugcaugugacuuaugucccugcacaagaaaagaacuucacaacugcuccugccauuugucaugauggaaaagcacacuuuccucgugaaggugucuuuguuucaaauggcacacacugguuuguaacacaaaggaauuuuuaugaaccacaaaucauuacuacagacaacacauuugugucugguaacugugauguuguaauaggaauugucaacaacacaguuuaugauccuuugcaaccugaauuagacucauucaaggaggaguuagauaaauauuuuaagaaucauacaucaccagauguugauuuaggugacaucucuggcauuaaugcuucaguuguaaacauucaaaaagaaauugaccgccucaaugagguugccaagaauuuaaaugaaucucucaucgaucuccaagaacuuggaaaguaugagcaguauauaaaauggccaugguacauuuggcuagguuuuauagcuggcuugauugccauaguaauggugacaauuaugcuuugcuguaugaccaguugcuguaguugucucaagggcuguuguucuuguggauccugcugcaaauuugaugaagacgacucugagccagugcucaaaggagucaaauuacauuacacauaaggacuagucccuguucccagagcccacuuuuuuuucuuuuuuugaaauaaaauagccugucuuucagaucucaaaggcucuuuucagagccaccaaaaaaaaaaaaaaaaaaaaaaaaaaaaaaaaaaaaaaaaaaaaaaaaaaaaaaaaaaaaaaaaaaaaaaaaaaaaaaaaaaaaaaaaaaaaaaaaaaaaa

SEQ ID NO: 12207 - RNA, 4094 nt, Artificial Sequence
  SARS-CoV-2/Guangdong/20SF028/2020__EPI_ISL_403936 spike protein mRNA wt (1-1273)
aggagagucccgcagucggcguccagcggcucugcuuguucgugugugugucguugcaggccuuauucaagcuuaccauguuuguuuuucuuguuuuauugccacuagucucuagucaguguguuaaucuuacaaccagaacucaauuacccccugcauacacuaauucuuucacacgugguguuuauuacccugacaaaguuuucagauccucaguuuuauauucaacucaggacuuguucuuaccuuucuuuuccaauguuacuugguuccaugcuauacaugucucugggaccaaugguacuaagagguuugauaacccuguccuaccauuuaaugaugguguuuauuuugcuuccacugagaagucuaacauaauaagaggcuggauuuuugguacuacuuuagauucgaagacccagucccuacuuauuguuaauaacgcuacuaauguuguuauuaaagucugugaauuucaauuuuguaaugauccauuuuuggguguuuauuaccacaaaaacaacaaaaguuggauggaaagugaguucagaguuuauucuagugcgaauaauugcacuuuugaauaugucucucagccuuuucuuauggaccuugaaggaaaacaggguaauuucaaaaaucuuagggaauuuguguuuaagaauauugaugguuauuuuaaaauauauucuaagcacacgccuauuaauuuagugcgugaucucccucaggguuuuucggcuuuagaaccauugguagauuugccaauagguauuaacaucacuagguuucaaacuuuacuugcuuuacauagaaguuauuugacuccuggugauucuucuucagguuggacagcuggugcugcagcuuauuauguggguuaucuucaaccuaggacuuuucuauuaaaauauaaugaaaauggaaccauuacagaugcuguagacugugcacuugacccucucucagaaacaaaguguacguugaaauccuucacuguagaaaaaggaaucuaucaaacuucuaacuuuagaguccaaccaacagaaucuauuguuagauuuccuaauauuacaaacuugugcccuuuuggugaaguuuuuaacgccaccagauuugcaucuguuuaugcuuggaacaggaagagaaucagcaacuguguugcugauuauucuguccuauauaauuccgcaucauuuuccacuuuuaaguguuauggagugucuccuacuaaauuaaaugaucucugcuuuacuaaugucuaugcagauucauuuguaauuagaggugaugaagucagacaaaucgcuccagggcaaacuggaaagauugcugauuauaauuauaaauuaccagaugauuuuacaggcugcguuauagcuuggaauucuaacaaucuugauucuaagguuggugguaauuauaauuaccuguauagauuguuuaggaagucuaaucucaaaccuuuugagagagauauuucaacugaaaucuaucaggccgguagcacaccuuguaaugguguugaagguuuuaauuguuacuuuccuuuacaaucauaugguuuccaacccacuaaugguguugguuaccaaccauacagaguaguaguacuuucuuuugaacuucuacaugcaccagcaacuguuuguggaccuaaaaagucuacuaauuugguuaaaaacaaaugugucaauuucaacuucaaugguuuaacaggcacagguguucuuacugagucuaacaaaaaguuucugccuuuccaacaauuuggcagagacauugcugacacuacugaugcuguccgugauccacagacacuugagauucuugacauuacaccauguucuuuugguggugucaguguuauaacaccaggaacaaauacuucuaaccagguugcuguucuuuaucaggauguuaacugcacagaagucccuguugcuauucaugcagaucaacuuacuccuacuuggcguguuuauucuacagguucuaauguuuuucaaacacgugcaggcuguuuaauaggggcugaacaugucaacaacucauaugagugugacauacccauuggugcagguauaugcgcuaguuaucagacucagacuaauucuccucggcgggcacguaguguagcuagucaauccaucauugccuacacuaugucacuuggugcagaaaauucaguugcuuacucuaauaacucuauugccauacccacaaauuuuacuauuaguguuaccacagaaauucuaccagugucuaugaccaagacaucaguagauuguacaauguacauuuguggugauucaacugaaugcagcaaucuuuuguugcaauauggcaguuuuuguacacaauuaaaccgugcuuuaacuggaauagcuguugaacaagacaaaaacacccaagaaguuuuugcacaagucaaacaaauuuacaaaacaccaccaauuaaagauuuuggugguuuuaauuuuucacaaauauuaccagauccaucaaaaccaagcaagaggucauuuauugaagaucuacuuuucaacaaagugacacuugcagaugcuggcuucaucaaacaauauggugauugccuuggugauauugcugcuagagaccucauuugugcacaaaaguuuaacggccuuacuguuuugccaccuuugcucacagaugaaaugauugcucaauacacuucugcacuguuagcggguacaaucacuucugguuggaccuuuggugcaggugcugcauuacaaauaccauuugcuaugcaaauggcuuauagguuuaaugguauuggaguuacacagaauguucucuaugagaaccaaaaauugauugccaaccaauuuaauagugcuauuggcaaaauucaagacucacuuucuuccacagcaagugcacuuggaaaacuucaagauguggucaaccaaaaugcacaagcuuuaaacacgcuuguuaaacaacuuagcuccaauuuuggugcaauuucaaguguuuuaaaugauauccuuucacgucuugacaaaguugaggcugaagugcaaauugauagguugaucacaggcagacuucaaaguuugcagacauaugugacucaacaauuaauuagagcugcagaaaucagagcuucugcuaaucuugcugcuacuaaaaugucagaguguguacuuggacaaucaaaaagaguugauuuuuguggaaagggcuaucaucuuauguccuucccucagucagcaccucaugguguagucuucuugcaugugacuuaugucccugcacaagaaaagaacuucacaacugcuccugccauuugucaugauggaaaagcacacuuuccucgugaaggugucuuuguuucaaauggcacacacugguuuguaacacaaaggaauuuuuaugaaccacaaaucauuacuacagacaacacauuugugucugguaacugugauguuguaauaggaauugucaacaacacaguuuaugauccuuugcaaccugaauuagacucauucaaggaggaguuagauaaauauuuuaagaaucauacaucaccagauguugauuuaggugacaucucuggcauuaaugcuucaguuguaaacauucaaaaagaaauugaccgccucaaugagguugccaagaauuuaaaugaaucucucaucgaucuccaagaacuuggaaaguaugagcaguauauaaaauggccaugguacauuuggcuagguuuuauagcuggcuugauugccauaguaauggugacaauuaugcuuugcuguaugaccaguugcuguaguugucucaagggcuguuguucuuguggauccugcugcaaauuugaugaagacgacucugagccagugcucaaaggagucaaauuacauuacacauaaggacuagucccuguucccagagcccacuuuuuuuucuuuuuuugaaauaaaauagccugucuuucagaucucaaaggcucuuuucagagccaccaaaaaaaaaaaaaaaaaaaaaaaaaaaaaaaaaaaaaaaaaaaaaaaaaaaaaaaaaaaaaaaaaaaaaaaaaaaaaaaaaaaaaaaaaaaaaaaaaaaaa

SEQ ID NO: 12208 - RNA, 4094 nt, Artificial Sequence
  SARS-CoV-2/Shenzhen/SZTH-001/2020__EPI_ISL_406592 spike protein mRNA wt (1-1273)
aggagagucccgcagucggcguccagcggcucugcuuguucgugugugugucguugcaggccuuauucaagcuuaccauguuuguuuuucuuguuuuauugccacuagucucuagucaguguguuaaucuuacaaccagaacucaauuacccccugcauacacuaauucuuucacacgugguguuuauuacccugacaaaguuuucagauccucaguuuuacauucaacucaggacuuguucuuaccuuucuuuuccaauguuacuugguuccaugcuauacaugucucugggaccaaugguacuaagagguuugauaacccuguccuaccauuuaaugaugguguuuauuuugcuuccacugagaagucuaacauaauaagaggcuggauuuuugguacuacuuuagauucgaagacccagucccuacuuauuguuaauaacgcuacuaauguuguuauuaaagucugugaauuucaauuuuguaaugauccauuuuuggguguuuauuaccacaaaaacaacaaaaguuggauggaaagugaguucagaguuuauucuagugcgaauaauugcacuuuugaauaugucucucagccuuuucuuauggaccuugaaggaaaacaggguaauuucaaaaaucuuagggaauuuguguuuaagaauauugaugguuauuuuaaaauauauucuaagcacacgccuauuaauuuagugcgugaucucccucaggguuuuucggcuuuagaaccauugguagauuugccaauagguauuaacaucacuagguuucaaacuuuacuugcuuuacauagaaguuauuugacuccuggugauucuucuucagguuggacagcuggugcugcagcuuauuauguggguuaucuucaaccuaggacuuuucuauuaaaauauaaugaaaauggaaccauuacagaugcuguagacugugcacuugacccucucucagaaacaaaguguacguugaaauccuucacuguagaaaaaggaaucuaucaaacuucuaacuuuagaguccaaccaacagaaucuauuguuagauuuccuaauauuacaaacuugugcccuuuuggugaaguuuuuaacgccaccagauuugcaucuguuuaugcuuggaacaggaagagaaucagcaacuguguugcugauuauucuguccuauauaauuccgcaucauuuuccacuuuuaaguguuauggagugucuccuacuaaauuaaaugaucucugcuuuacuaaugucuaugcagauucauuuguaauuagaggugaugaagucagacaaaucgcuccagggcaaacuggaaagauugcugauuauaauuauaaauuaccagaugauuuuacaggcugcguuauagcuuggaauucuaacaaucuugauucuaagguuggugguaauuauaauuaccuguauagauuguuuaggaagucuaaucucaaaccuuuugagagagauauuucaacugaaaucuaucaggccgguagcacaccuuguaaugguguugaagguuuuaauuguuacuuuccuuuacaaucauaugguuuccaacccacuaaugguguugguuaccaaccauacagaguaguaguacuuucuuuugaacuucuacaugcaccagcaacuguuuguggaccuaaaaagucuacuaauuugguuaaaaacaaaugugucaauuucaacuucaaugguuuaacaggcacagguguucuuacugagucuaacaaaaaguuucugccuuuccaacaauuuggcagagacauugcugacacuacugaugcuguccgugauccacagacacuugagauucuugacauuacaccauguucuuuugguggugucaguguuauaacaccaggaacaaauacuucuaaccagguugcuguucuuuaucaggauguuaacugcacagaagucccuguugcuauucaugcagaucaacuuacuccuacuuggcguguuuauucuacagguucuaauguuuuucaaacacgugcaggcuguuuaauaggggcugaacaugucaacaacucauaugagugugacauacccauuggugcagguauaugcgcuaguuaucagacucagacuaauucuccucggcgggcacguaguguagcuagucaauccaucauugccuacacuaugucacuuggugcagaaaauucaguugcuuacucuaauaacucuauugccauacccacaaauuuuacuauuaguguuaccacagaaauucuaccagugucuaugaccaagacaucaguagauuguacaauguacauuuguggugauucaacugaaugcagcaaucuuuuguugcaauauggcaguuuuuguacacaauuaaaccgugcuuuaacuggaauagcuguugaacaagacaaaaacacccaagaaguuuuugcacaagucaaacaaauuuacaaaacaccaccaauuaaagauuuuggugguuuuaauuuuucacaaauauuaccagauccaucaaaaccaagcaagaggucauuuauugaagaucuacuuuucaacaaagugacacuugcagaugcuggcuucaucaaacaauauggugauugccuuggugauauugcugcuagagaccucauuugugcacaaaaguuuaacggccuuacuguuuugccaccuuugcucacagaugaaaugauugcucaauacacuucugcacuguuagcggguacaaucacuucugguuggaccuuuggugcaggugcugcauuacaaauaccauuugcuaugcaaauggcuuauagguuuaaugguauuggaguuacacagaauguucucuaugagaaccaaaaauugauugccaaccaauuuaauagugcuauuggcaaaauucaagacucacuuucuuccacagcaagugcacuuggaaaacuucaagauguggucaaccaaaaugcacaagcuuuaaacacgcuuguuaaacaacuuagcuccaauuuuggugcaauuucaaguguuuuaaaugauauccuuucacgucuugacaaaguugaggcugaagugcaaauugauagguugaucacaggcagacuucaaaguuugcagacauaugugacucaacaauuaauuagagcugcagaaaucagagcuucugcuaaucuugcugcuacuaaaaugucagaguguguacuuggacaaucaaaaagaguugauuuuuguggaaagggcuaucaucuuauguccuucccucagucagcaccucaugguguagucuucuugcaugugacuuaugucccugcacaagaaaagaacuucacaacugcuccugccauuugucaugauggaaaagcacacuuuccucgugaaggugucuuuguuucaaauggcacacacugguuuguaacacaaaggaauuuuuaugaaccacaaaucauuacuacagacaacacauuugugucugguaacugugauguucuaauaggaauugucaacaacacaguuuaugauccuuugcaaccugaauuagacucauucaaggaggaguuagauaaauauuuuaagaaucauacaucaccagauguugauuuaggugacaucucuggcauuaaugcuucaguuguaaacauucaaaaagaaauugaccgccucaaugagguugccaagaauuuaaaugaaucucucaucgaucuccaagaacuuggaaaguaugagcaguauauaaaauggccaugguacauuuggcuagguuuuauagcuggcuugauugccauaguaauggugacaauuaugcuuugcuguaugaccaguugcuguaguugucucaagggcuguuguucuuguggauccugcugcaaauuugaugaagacgacucugggccagugcucaaaggagucaaauuacauuacacauaaggacuagucccuguucccagagcccacuuuuuuuucuuuuuuugaaauaaaauagccugucuuucagaucucaaaggcucuuuucagagccaccaaaaaaaaaaaaaaaaaaaaaaaaaaaaaaaaaaaaaaaaaaaaaaaaaaaaaaaaaaaaaaaaaaaaaaaaaaaaaaaaaaaaaaaaaaaaaaaaaaaaa

SEQ ID NO: 12209 - RNA, 4094 nt, Artificial Sequence
  SARS-CoV-2/Shenzhen/SZTH-004/2020__EPI_ISL_406595 spike protein mRNA wt (1-1273)
aggagagucccgcagucggcguccagcggcucugcuuguucgugugugugucguugcaggccuuauucaagcuuaccauguuuguuuuucuuguuuuauugccacuagucucuagucaguguguuaaucuuacaaccagaacucaauuacccccugcauacacuaauucuuucacacgugguguuuauuacccugacaaaguuuucagauccucaguuuuacauucaacucaggacuuguucuuaccuuucuuuuccaauguuacuugguuccaugcuauacaugucucugggaccaaugguacuaagagguuugauaacccuguccuaccauuuaaugaugguguuuauuuugcuuccacugagaagucuaacauaauaagaggcuggauuuuugguacuacuuuagauucgaagacccagucccuacuuauuguuaauaacgcuacuaauguuguuauuaaagucugugaauuucaauuuuguaaugauccauuuuuggguguuuauuaccacaaaaacaacaaaaguuggauggaaagugaguucagaguuuauucuagugcgaauaauugcacuuuugaauaugucucucagccuuuucuuauggaccuugaaggaaaacaggguaauuucaaaaaucuuagggaauuuguguuuaagaauauugaugguuauuuuaaaauauauucuaagcacacgccuauuaauuuagugcgugaucucccucaggguuuuucggcuuuagaaccauugguagauuugccaauagguauuaacaucacuagguuucaaacuuuacuugcuuuacauagaaguuauuugacuccuggugauucuucuucagguuggacagcuggugcugcagcuuauuauguggguuaucuucaaccuaggacuuuucuauuaaaauauaaugaaaauggaaccauuacagaugcuguagacugugcacuugacccucucucagaaacaaaguguacguugaaauccuucacuguagaaaaaggaaucuaucaaacuucuaacuuuagaguccaaccaacagaaucuauuguuagauuuccuaauauuacaaacuugugcccuuuuggugaaguuuuuaacgccaccagauuugcaucuguuuaugcuugggacaggaagagaaucagcaacuguguugcuuauuauucuguccuauauaauuccgcaucauuuuccacuuuuaaguguuauggagugucuccuacuaaauuaaaugaucucugcuuuacuaaugucuaugcagauucauuuguaauuagaggugaugaagucagacaaaucgcuccagggcaaacuggaaagauugcugauuauaauuauaaauuaccagaugauuuuacaggcugcguuauagcuuggaauucuaacaaucuugauucuaagguuggugguaauuauaauuaccuguauagauuguuuaggaagucuaaucucaaaccuuuugagagagauauuucaacugaaaucuaucaggccgguagcacaccuuguaaugguguugaagguuuuaauuguuacuuuccuuuacaaucauaugguuuccaacccacuaaugguguugguuaccaaccauacagaguaguaguacuuucuuuugaacuucuacaugcaccagcaacuguuuguggaccuaaaaagucuacuaauuugguuaaaaacaaaugugucaauuucaacuucaaugguuuaacaggcacagguguucuuacugagucuaacaaaaaguuucugccuuuccaacaauuuggcagagacauugcugacacuacugaugcuguccgugauccacagacacuugagauucuugacauuacaccauguucuuuugguggugucaguguuauaacaccaggaacaaauacuucuaaccagguugcuguucuuuaucaggauguuaacugcacagaagucccuguugcuauucaugcagaucaacuuacuccuacuuggcguguuuauucuacagguucuaauguuuuucaaacacgugcaggcuguuuaauaggggcugaacaugucaacaacucauaugagugugacauacccauuggugcaggcauaugcgcuaguuaucagacucagacuaauucuccucggcgggcacguaguguagcuagucaauccaucauugccuacacuaugucacuuggugcagaaaauucaguugcuuacucuaauaacucuauugccauacccacaaauuuuacuauuaguguuaccacagaaauucuaccagugucuaugaccaagacaucaguagauuguacaauguacauuuguggugauucaacugaaugcagcaaucuuuuguugcaauauggcaguuuuuguacacaauuaaaccgugcuuuaacuggaauagcuguugaacaagacaaaaacacccaagaaguuuuugcacaagucaaacaaauuuacaaaacaccaccaauuaaagauuuuggugguuuuaauuuuucacaaauauuaccagauccaucaaaaccaagcaagaggucauuuauugaagaucuacuuuucaacaaagugacacuugcagaugcuggcuucaucaaacaauauggugauugccuuggugauauugcugcuagagaccucauuugugcacaaaaguuuaacggccuuacuguuuugccaccuuugcucacagaugaaaugauugcucaauacacuucugcacuguuagcggguacaaucacuucugguuggaccuuuggugcaggugcugcauuacaaauaccauuugcuaugcaaauggcuuauagguuuaaugguauuggaguuacacagaauguucucuaugagaaccaaaaauugauugccaaccaauuuaauagugcuauuggcaaaauucaagacucacuuucuuccacagcaagugcacuuggaaaacuucaagauguggucaaccaaaaugcacaagcuuuaaacacgcuuguuaaacaacuuagcuccaauuuuggugcaauuucaaguguuuuaaaugauauccuuucacgucuugacaaaguugaggcugaagugcaaauugauagguugaucacaggcagacuucaaaguuugcagacauaugugacucaacaauuaauuagagcugcagaaaucagagcuucugcuaaucuugcugcuacuaaaaugucagaguguguacuuggacaaucaaaaagaguugauuuuuguggaaagggcuaucaucuuauguccuucccucagucagcaccucaugguguagucuucuugcaugugacuuaugucccugcacaagaaaagaacuucacaacugcuccugccauuugucaugauggaaaagcacacuuuccucgugaaggugucuuuguuucaaauggcacacacugguuuguaacacaaaggaauuuuuaugaaccacaaaucauuacuacagacaacacauuugugucugguaacugugauguuguaauaggaauugucaacaacacaguuuaugauccuuugcaaccugaauuagacucauucaaggaggaguuagauaaauauuuuaagaaucauacaucaccagauguugauuuaggugacaucucuggcauuaaugcuucaguuguaaacauucaaaaagaaauugaccgccucaaugagguugccaagaauuuaaaugaaucucucaucgaucuccaagaacuuggaaaguaugagcaguauauaaaauggccaugguacauuuggcuagguuuuauagcuggcuugauugccauaguaauggugacaauuaugcuuugcuguaugaccaguugcuguaguugucucaagggcuguuguucuuguggauccugcugcaaauuugaugaagacgacucugagccagugcucaaaggagucaaauuacauuacacauaaggacuagucccuguucccagagcccacuuuuuuuucuuuuuuugaaauaaaauagccugucuuucagaucucaaaggcucuuuucagagccaccaaaaaaaaaaaaaaaaaaaaaaaaaaaaaaaaaaaaaaaaaaaaaaaaaaaaaaaaaaaaaaaaaaaaaaaaaaaaaaaaaaaaaaaaaaaaaaaaaaaaa

SEQ ID NO: 12210 - RNA, 4094 nt, Artificial Sequence
  SARS-CoV-2/France/IDF0372/2020__EPI_ISL_406596 spike protein mRNA wt (1-1273)
aggagagucccgcagucggcguccagcggcucugcuuguucgugugugugucguugcaggccuuauucaagcuuaccauguuuguuuuucuuguuuuauugccacuagucucuagucaguguguuaaucuuacaaccagaacucaauuacccccugcauacacuaauucuuucacacgugguguuuauuacccugacaaaguuuucagauccucaguuuuacauucaacucaggacuuguucuuaccuuucuuuuccaauguuacuugguuccaugcuauacaugucucugggaccaaugguacuaagagguuugauaacccuguccuaccauuuaaugaugguguuuauuuugcuuccacugagaagucuaacauaauaagaggcuggauuuuugguacuacuuuagauucgaagacccagucccuacuuauuguuaauaacgcuacuaauguuguuauuaaagucugugaauuucaauuuuguaaugauccauuuuuggguguuuauuaccacaaaaacaacaaaaguuggauggaaagugaguucagaguuuauucuagugcgaauaauugcacuuuugaauaugucucucagccuuuucuuauggaccuugaaggaaaacaggguaauuucaaaaaucuuagggaauuuguguuuaagaauauugaugguuauuuuaaaauauauucuaagcacacgccuauuaauuuagugcgugaucucccucaggguuuuucggcuuuagaaccauugguagauuugccaauagguauuaacaucacuagguuucaaacuuuacuugcuuuacauagaaguuauuugacuccuggugauucuucuucagguuggacagcuggugcugcagcuuauuauguggguuaucuucaaccuaggacuuuucuauuaaaauauaaugaaaauggaaccauuacagaugcuguagacugugcacuugacccucucucagaaacaaaguguacguugaaauccuucacuguagaaaaaggaaucuaucaaacuucuaacuuuagaguccaaccaacagaaucuauuguuagauuuccuaauauuacaaacuugugcccuuuuggugaaguuuuuaacgccaccagauuugcaucuguuuaugcuuggaacaggaagagaaucagcaacuguguugcugauuauucuuuccuauauaauuccgcaucauuuuccacuuuuaaguguuauggagugucuccuacuaaauuaaaugaucucugcuuuacuaaugucuaugcagauucauuuguaauuagaggugaugaagucagacaaaucgcuccagggcaaacuggaaagauugcugauuauaauuauaaauuaccagaugauuuuacaggcugcguuauagcuuggaauucuaacaaucuugauucuaagguuggugguaauuauaauuaccuguauagauuguuuaggaagucuaaucucaaaccuuuugagagagauauuucaacugaaaucuaucaggccgguagcacaccuuguaaugguguugaagguuuuaauuguuacuuuccuuuacaaucauaugguuuccaacccacuaaugguguugguuaccaaccauacagaguaguaguacuuucuuuugaacuucuacaugcaccagcaacuguuuguggaccuaaaaagucuacuaauuugguuaaaaacaaaugugucaauuucaacuucaaugguuuaacaggcacagguguucuuacugagucuaacaaaaaguuucugccuuuccaacaauuuggcagagacauugcugacacuacugaugcuguccgugauccacagacacuugagauucuugacauuacaccauguucuuuugguggugucaguguuauaacaccaggaacaaauacuucuaaccagguugcuguucuuuaucaggauguuaacugcacagaagucccuguugcuauucaugcagaucaacuuacuccuacuuggcguguuuauucuacagguucuaauguuuuucaaacacgugcaggcuguuuaauaggggcugaacaugucaacaacucauaugagugugacauacccauuggugcagguauaugcgcuaguuaucagacucagacuaauucuccucggcgggcacguaguguagcuagucaauccaucauugccuacacuaugucacuuggugcagaaaauucaguugcuuacucuaauaacucuauugccauacccacaaauuuuacuauuaguguuaccacagaaauucuaccagugucuaugaccaagacaucaguagauuguacaauguacauuuguggugauucaacugaaugcagcaaucuuuuguugcaauauggcaguuuuuguacacaauuaaaccgugcuuuaacuggaauagcuguugaacaagacaaaaacacccaagaaguuuuugcacaagucaaacaaauuuacaaaacaccaccaauuaaagauuuuggugguuuuaauuuuucacaaauauuaccagauccaucaaaaccaagcaagaggucauuuauugaagaucuacuuuucaacaaagugacacuugcagaugcuggcuucaucaaacaauauggugauugccuuggugauauugcugcuagagaccucauuugugcacaaaaguuuaacggccuuacuguuuugccaccuuugcucacagaugaaaugauugcucaauacacuucugcacuguuagcggguacaaucacuucugguuggaccuuuggugcaggugcugcauuacaaauaccauuugcuaugcaaauggcuuauagguuuaaugguauuggaguuacacagaauguucucuaugagaaccaaaaauugauugccaaccaauuuaauagugcuauuggcaaaauucaagacucacuuucuuccacagcaagugcacuuggaaaacuucaagauguggucaaccaaaaugcacaagcuuuaaacacgcuuguuaaacaacuuagcuccaauuuuggugcaauuucaaguguuuuaaaugauauccuuucacgucuugacaaaguugaggcugaagugcaaauugauagguugaucacaggcagacuucaaaguuugcagacauaugugacucaacaauuaauuagagcugcagaaaucagagcuucugcuaaucuugcugcuacuaaaaugucagaguguguacuuggacaaucaaaaagaguugauuuuuguggaaagggcuaucaucuuauguccuucccucagucagcaccucaugguguagucuucuugcaugugacuuaugucccugcacaagaaaagaacuucacaacugcuccugccauuugucaugauggaaaagcacacuuuccucgugaaggugucuuuguuucaaauggcacacacugguuuguaacacaaaggaauuuuuaugaaccacaaaucauuacuacagacaacacauuugugucugguaacugugauguuguaauaggaauugucaacaacacaguuuaugauccuuugcaaccugaauuagacucauucaaggaggaguuagauaaauauuuuaagaaucauacaucaccagauguugauuuaggugacaucucuggcauuaaugcuucaguuguaaacauucaaaaagaaauugaccgccucaaugagguugccaagaauuuaaaugaaucucucaucgaucuccaagaacuuggaaaguaugagcaguauauaaaauggccaugguacauuuggcuagguuuuauagcuggcuugauugccauaguaauggugacaauuaugcuuugcuguaugaccaguugcuguaguugucucaagggcuguuguucuuguggauccugcugcaaauuugaugaagacgacucugagccagugcucaaaggagucaaauuacauuacacauaaggacuagucccuguucccagagcccacuuuuuuuucuuuuuuugaaauaaaauagccugucuuucagaucucaaaggcucuuuucagagccaccaaaaaaaaaaaaaaaaaaaaaaaaaaaaaaaaaaaaaaaaaaaaaaaaaaaaaaaaaaaaaaaaaaaaaaaaaaaaaaaaaaaaaaaaaaaaaaaaaaaaa

SEQ ID NO: 12211 - RNA, 4094 nt, Artificial Sequence
  SARS-CoV-2/Australia/VIC01/2020__EPI_ISL_406844 spike protein mRNA wt (1-1273)
aggagagucccgcagucggcguccagcggcucugcuuguucgugugugugucguugcaggccuuauucaagcuuaccauguuuguuuuucuuguuuuauugccacuagucucuagucaguguguuaaucuuacaaccagaacucaauuacccccugcauacacuaauucuuucacacgugguguuuauuacccugacaaaguuuucagauccucaguuuuacauucaacucaggacuuguucuuaccuuucuuuuccaauguuacuugguuccaugcuauacaugucucugggaccaaugguacuaagagguuugauaacccuguccuaccauuuaaugaugguguuuauuuugcuuccacugagaagucuaacauaauaagaggcuggauuuuugguacuacuuuagauucgaagacccagucccuacuuauuguuaauaacgcuacuaauguuguuauuaaagucugugaauuucaauuuuguaaugauccauuuuuggguguuuauuaccacaaaaacaacaaaaguuggauggaaagugaguucagaguuuauucuagugcgaauaauugcacuuuugaauaugucucucagccuuuucuuauggaccuugaaggaaaacaggguaauuucaaaaaucuuagggaauuuguguuuaagaauauugaugguuauuuuaaaauauauucuaagcacacgccuauuaauuuagugcgugaucucccucaggguuuuucggcuuuagaaccauugguagauuugccaauagguauuaacaucacuagguuucaaacuuuacuugcuuuacauagaagguauuugacuccuggugauucuucuucagguuggacagcuggugcugcagcuuauuauguggguuaucuucaaccuaggacuuuucuauuaaaauauaaugaaaauggaaccauuacagaugcuguagacugugcacuugacccucucucagaaacaaaguguacguugaaauccuucacuguagaaaaaggaaucuaucaaacuucuaacuuuagaguccaaccaacagaaucuauuguuagauuuccuaauauuacaaacuugugcccuuuuggugaaguuuuuaacgccaccagauuugcaucuguuuaugcuuggaacaggaagagaaucagcaacuguguugcugauuauucuguccuauauaauuccgcaucauuuuccacuuuuaaguguuauggagugucuccuacuaaauuaaaugaucucugcuuuacuaaugucuaugcagauucauuuguaauuagaggugaugaagucagacaaaucgcuccagggcaaacuggaaagauugcugauuauaauuauaaauuaccagaugauuuuacaggcugcguuauagcuuggaauucuaacaaucuugauucuaagguuggugguaauuauaauuaccuguauagauuguuuaggaagucuaaucucaaaccuuuugagagagauauuucaacugaaaucuaucaggccgguagcacaccuuguaaugguguugaagguuuuaauuguuacuuuccuuuacaaucauaugguuuccaacccacuaaugguguugguuaccaaccauacagaguaguaguacuuucuuuugaacuucuacaugcaccagcaacuguuuguggaccuaaaaagucuacuaauuugguuaaaaacaaaugugucaauuucaacuucaaugguuuaacaggcacagguguucuuacugagucuaacaaaaaguuucugccuuuccaacaauuuggcagagacauugcugacacuacugaugcuguccgugauccacagacacuugagauucuugacauuacaccauguucuuuugguggugucaguguuauaacaccaggaacaaauacuucuaaccagguugcuguucuuuaucaggauguuaacugcacagaagucccuguugcuauucaugcagaucaacuuacuccuacuuggcguguuuauucuacagguucuaauguuuuucaaacacgugcaggcuguuuaauaggggcugaacaugucaacaacucauaugagugugacauacccauuggugcagguauaugcgcuaguuaucagacucagacuaauucuccucggcgggcacguaguguagcuagucaauccaucauugccuacacuaugucacuuggugcagaaaauucaguugcuuacucuaauaacucuauugccauacccacaaauuuuacuauuaguguuaccacagaaauucuaccagugucuaugaccaagacaucaguagauuguacaauguacauuuguggugauucaacugaaugcagcaaucuuuuguugcaauauggcaguuuuuguacacaauuaaaccgugcuuuaacuggaauagcuguugaacaagacaaaaacacccaagaaguuuuugcacaagucaaacaaauuuacaaaacaccaccaauuaaagauuuuggugguuuuaauuuuucacaaauauuaccagauccaucaaaaccaagcaagaggucauuuauugaagaucuacuuuucaacaaagugacacuugcagaugcuggcuucaucaaacaauauggugauugccuuggugauauugcugcuagagaccucauuugugcacaaaaguuuaacggccuuacuguuuugccaccuuugcucacagaugaaaugauugcucaauacacuucugcacuguuagcggguacaaucacuucugguuggaccuuuggugcaggugcugcauuacaaauaccauuugcuaugcaaauggcuuauagguuuaaugguauuggaguuacacagaauguucucuaugagaaccaaaaauugauugccaaccaauuuaauagugcuauuggcaaaauucaagacucacuuucuuccacagcaagugcacuuggaaaacuucaagauguggucaaccaaaaugcacaagcuuuaaacacgcuuguuaaacaacuuagcuccaauuuuggugcaauuucaaguguuuuaaaugauauccuuucacgucuugacaaaguugaggcugaagugcaaauugauagguugaucacaggcagacuucaaaguuugcagacauaugugacucaacaauuaauuagagcugcagaaaucagagcuucugcuaaucuugcugcuacuaaaaugucagaguguguacuuggacaaucaaaaagaguugauuuuuguggaaagggcuaucaucuuauguccuucccucagucagcaccucaugguguagucuucuugcaugugacuuaugucccugcacaagaaaagaacuucacaacugcuccugccauuugucaugauggaaaagcacacuuuccucgugaaggugucuuuguuucaaauggcacacacugguuuguaacacaaaggaauuuuuaugaaccacaaaucauuacuacagacaacacauuugugucugguaacugugauguuguaauaggaauugucaacaacacaguuuaugauccuuugcaaccugaauuagacucauucaaggaggaguuagauaaauauuuuaagaaucauacaucaccagauguugauuuaggugacaucucuggcauuaaugcuucaguuguaaacauucaaaaagaaauugaccgccucaaugagguugccaagaauuuaaaugaaucucucaucgaucuccaagaacuuggaaaguaugagcaguauauaaaauggccaugguacauuuggcuagguuuuauagcuggcuugauugccauaguaauggugacaauuaugcuuugcuguaugaccaguugcuguaguugucucaagggcuguuguucuuguggauccugcugcaaauuugaugaagacgacucugagccagugcucaaaggagucaaauuacauuacacauaaggacuagucccuguucccagagcccacuuuuuuuucuuuuuuugaaauaaaauagccugucuuucagaucucaaaggcucuuuucagagccaccaaaaaaaaaaaaaaaaaaaaaaaaaaaaaaaaaaaaaaaaaaaaaaaaaaaaaaaaaaaaaaaaaaaaaaaaaaaaaaaaaaaaaaaaaaaaaaaaaaaaa

SEQ ID NO: 12212 - RNA, 4094 nt, Artificial Sequence
  SARS-CoV-2/Germany/BavPat1/2020__EPI_ISL_406862 spike protein mRNA wt (1-1273)
aggagagucccgcagucggcguccagcggcucugcuuguucgugugugugucguugcaggccuuauucaagcuuaccauguuuguuuuucuuguuuuauugccacuagucucuagucaguguguuaaucuuacaaccagaacucaauuacccccugcauacacuaauucuuucacacgugguguuuauuacccugacaaaguuuucagauccucaguuuuacauucaacucaggacuuguucuuaccuuucuuuuccaauguuacuugguuccaugcuauacaugucucugggaccaaugguacuaagagguuugauaacccuguccuaccauuuaaugaugguguuuauuuugcuuccacugagaagucuaacauaauaagaggcuggauuuuugguacuacuuuagauucgaagacccagucccuacuuauuguuaauaacgcuacuaauguuguuauuaaagucugugaauuucaauuuuguaaugauccauuuuuggguguuuauuaccacaaaaacaacaaaaguuggauggaaagugaguucagaguuuauucuagugcgaauaauugcacuuuugaauaugucucucagccuuuucuuauggaccuugaaggaaaacaggguaauuucaaaaaucuuagggaauuuguguuuaagaauauugaugguuauuuuaaaauauauucuaagcacacgccuauuaauuuagugcgugaucucccucaggguuuuucggcuuuagaaccauugguagauuugccaauagguauuaacaucacuagguuucaaacuuuacuugcuuuacauagaaguuauuugacuccuggugauucuucuucagguuggacagcuggugcugcagcuuauuauguggguuaucuucaaccuaggacuuuucuauuaaaauauaaugaaaauggaaccauuacagaugcuguagacugugcacuugacccucucucagaaacaaaguguacguugaaauccuucacuguagaaaaaggaaucuaucaaacuucuaacuuuagaguccaaccaacagaaucuauuguuagauuuccuaauauuacaaacuugugcccuuuuggugaaguuuuuaacgccaccagauuugcaucuguuuaugcuuggaacaggaagagaaucagcaacuguguugcugauuauucuguccuauauaauuccgcaucauuuuccacuuuuaaguguuauggagugucuccuacuaaauuaaaugaucucugcuuuacuaaugucuaugcagauucauuuguaauuagaggugaugaagucagacaaaucgcuccagggcaaacuggaaagauugcugauuauaauuauaaauuaccagaugauuuuacaggcugcguuauagcuuggaauucuaacaaucuugauucuaagguuggugguaauuauaauuaccuguauagauuguuuaggaagucuaaucucaaaccuuuugagagagauauuucaacugaaaucuaucaggccgguagcacaccuuguaaugguguugaagguuuuaauuguuacuuuccuuuacaaucauaugguuuccaacccacuaaugguguugguuaccaaccauacagaguaguaguacuuucuuuugaacuucuacaugcaccagcaacuguuuguggaccuaaaaagucuacuaauuugguuaaaaacaaaugugucaauuucaacuucaaugguuuaacaggcacagguguucuuacugagucuaacaaaaaguuucugccuuuccaacaauuuggcagagacauugcugacacuacugaugcuguccgugauccacagacacuugagauucuugacauuacaccauguucuuuugguggugucaguguuauaacaccaggaacaaauacuucuaaccagguugcuguucuuuaucaggguguuaacugcacagaagucccuguugcuauucaugcagaucaacuuacuccuacuuggcguguuuauucuacagguucuaauguuuuucaaacacgugcaggcuguuuaauaggggcugaacaugucaacaacucauaugagugugacauacccauuggugcagguauaugcgcuaguuaucagacucagacuaauucuccucggcgggcacguaguguagcuagucaauccaucauugccuacacuaugucacuuggugcagaaaauucaguugcuuacucuaauaacucuauugccauacccacaaauuuuacuauuaguguuaccacagaaauucuaccagugucuaugaccaagacaucaguagauuguacaauguacauuuguggugauucaacugaaugcagcaaucuuuuguugcaauauggcaguuuuuguacacaauuaaaccgugcuuuaacuggaauagcuguugaacaagacaaaaacacccaagaaguuuuugcacaagucaaacaaauuuacaaaacaccaccaauuaaagauuuuggugguuuuaauuuuucacaaauauuaccagauccaucaaaaccaagcaagaggucauuuauugaagaucuacuuuucaacaaagugacacuugcagaugcuggcuucaucaaacaauauggugauugccuuggugauauugcugcuagagaccucauuugugcacaaaaguuuaacggccuuacuguuuugccaccuuugcucacagaugaaaugauugcucaauacacuucugcacuguuagcggguacaaucacuucugguuggaccuuuggugcaggugcugcauuacaaauaccauuugcuaugcaaauggcuuauagguuuaaugguauuggaguuacacagaauguucucuaugagaaccaaaaauugauugccaaccaauuuaauagugcuauuggcaaaauucaagacucacuuucuuccacagcaagugcacuuggaaaacuucaagauguggucaaccaaaaugcacaagcuuuaaacacgcuuguuaaacaacuuagcuccaauuuuggugcaauuucaaguguuuuaaaugauauccuuucacgucuugacaaaguugaggcugaagugcaaauugauagguugaucacaggcagacuucaaaguuugcagacauaugugacucaacaauuaauuagagcugcagaaaucagagcuucugcuaaucuugcugcuacuaaaaugucagaguguguacuuggacaaucaaaaagaguugauuuuuguggaaagggcuaucaucuuauguccuucccucagucagcaccucaugguguagucuucuugcaugugacuuaugucccugcacaagaaaagaacuucacaacugcuccugccauuugucaugauggaaaagcacacuuuccucgugaaggugucuuuguuucaaauggcacacacugguuuguaacacaaaggaauuuuuaugaaccacaaaucauuacuacagacaacacauuugugucugguaacugugauguuguaauaggaauugucaacaacacaguuuaugauccuuugcaaccugaauuagacucauucaaggaggaguuagauaaauauuuuaagaaucauacaucaccagauguugauuuaggugacaucucuggcauuaaugcuucaguuguaaacauucaaaaagaaauugaccgccucaaugagguugccaagaauuuaaaugaaucucucaucgaucuccaagaacuuggaaaguaugagcaguauauaaaauggccaugguacauuuggcuagguuuuauagcuggcuugauugccauaguaauggugacaauuaugcuuugcuguaugaccaguugcuguaguugucucaagggcuguuguucuuguggauccugcugcaaauuugaugaagacgacucugagccagugcucaaaggagucaaauuacauuacacauaaggacuagucccuguucccagagcccacuuuuuuuucuuuuuuugaaauaaaauagccugucuuucagaucucaaaggcucuuuucagagccaccaaaaaaaaaaaaaaaaaaaaaaaaaaaaaaaaaaaaaaaaaaaaaaaaaaaaaaaaaaaaaaaaaaaaaaaaaaaaaaaaaaaaaaaaaaaaaaaaaaaaa

SEQ ID NO: 12213 - RNA, 4094 nt, Artificial Sequence
  SARS-CoV-2/Wuhan/HBCDC-HB-02/2020__EPI_ISL_412978 spike protein mRNA wt (1-1273)
aggagagucccgcagucggcguccagcggcucugcuuguucgugugugugucguugcaggccuuauucaagcuuaccauguuuguuuuucuuguuuuauugccacuagucucuagucaguguguuaaucuuacaaccagaacucaauuacccccugcauacacuaauucuuucacacgugguguuuauuacccugacaaaguuuucagauccucaguuuuacauucaacucaggacuuguucuuaccuuucuuuuccaauguuacuugguuccaugcuauacaugucucugggaccaaugguacuaagagguuugauaacccuguccuaccauuuaaugaugguguuuauuuugcuuccacugagaagucuaacauaauaagaggcuggauuuuugguacuacuuuagauucgaagacccagucccuacuuauuguuaauaacgcuacuaauguuguuauuaaagucugugaauuucaauuuuguaaugauccauuuuuggguguuuauuaccacaaaaacaacaaaaguuggauggaaagugaguucagaguuuauucuagugcgaauaauugcacuuuugaauaugucucucagccuuuucuuauggaccuugaaggaaaacaggguaauuucaaaaaucuuagggaauuuguguuuaagaauauugaugguuauuuuaaaauauauucuaagcacacgccuauuaauuuagugcgugaucucccucaggguuuuucggcuuuagaaccauugguagauuugccaauagguauuaacaucacuagguuucaaacuuuacuugcuuuacauagaaguuauuugacuccuggugauucuucuucagguuggacagcuggugcugcagcuuauuauguggguuaucuucaaccuaggacuuuucuauuaaaauauaaugaaaauggaaccauuacagaugcuguagacugugcacuugacccucucucagaaacaaaguguacguugaaauccuucacuguagaaaaaggaaucuaucaaacuucuaacuuuagaguccaaccaacagaaucuauuguuagauuuccuaauauuacaaacuugugcccuuuuggugaaguuuuuaacgccaccagauuugcaucuguuuaugcuuggaacaggaagagaaucagcaacuguguugcugauuauucuguccuauauaauuccgcaucauuuuccacuuuuaaguguuauggagugucuccuacuaaauuaaaugaucucugcuuuacuaaugucuaugcagauucauuuguaauuagaggugaugaagucagacaaaucgcuccagggcaaacuggaaagauugcugauuauaauuauaaauuaccagaugauuuuacaggcugcguuauagcuuggaauucuaacaaucuugauucuaagguuggugguaauuauaauuaccuguauagauuguuuaggaagucuaaucucaaaccuuuugagagagauauuucaacugaaaucuaucaggccgguagcacaccuuguaaugguguugaagguuuuaauuguuacuuuccuuuacaaucauaugguuuccaacccacuaaugguguugguuaccaaccauacagaguaguaguacuuucuuuugaacuucuacaugcaccagcaacuguuuguggaccuaaaaagucuacuaauuugguuaaaaacaaaugugucaauuucaacuucaaugguuuaacaggcacagguguucuuacugagucuaacaaaaaguuucugccuuuccaacaauuuggcagagacauugcugacacuacugaugcuguccgugauccacagacacuugagauucuugacauuacaccauguucuuuugguggugucaguguuauaacaccaggaacaaauacuucuaaccagguugcuguucuuuaucaggauguuaacugcacagaagucccuguugcuauucaugcagaucaacuuacuccuacuuggcguguuuauucuacagguucuaauguuuuucaaacacgugcaggcuguuuaauaggggcugaacaugucaacaacucauaugagugugacauacccauuggugcagguauaugcgcuaguuaucagacucagacuaauucuccucggcgggcacguaguguagcuagucaauccaucauugccuacacuaugucacuuggugcagaaaauucaguugcuuacucuaauaacucuauugccauacccacaaauuuuacuauuaguguuaccacagaaauucuaccagugucuaugaccaagacaucaguagauuguacaauguacauuuguggugauucaacugaaugcagcaauuuuuuguugcaauauggcaguuuuuguacacaauuaaaccgugcuuuaacuggaauagcuguugaacaagacaaaaacacccaagaaguuuuugcacaagucaaacaaauuuacaaaacaccaccaauuaaagauuuuggugguuuuaauuuuucacaaauauuaccagauccaucaaaaccaagcaagaggucauuuauugaagaucuacuuuucaacaaagugacacuugcagaugcuggcuucaucaaacaauauggugauugccuuggugauauugcugcuagagaccucauuugugcacaaaaguuuaacggccuuacuguuuugccaccuuugcucacagaugaaaugauugcucaauacacuucugcacuguuagcggguacaaucacuucugguuggaccuuuggugcaggugcugcauuacaaauaccauuugcuaugcaaauggcuuauagguuuaaugguauuggaguuacacagaauguucucuaugagaaccaaaaauugauugccaaccaauuuaauagugcuauuggcaaaauucaagacucacuuucuuccacagcaagugcacuuggaaaacuucaagauguggucaaccaaaaugcacaagcuuuaaacacgcuuguuaaacaacuuagcuccaauuuuggugcaauuucaaguguuuuaaaugauauccuuucacgucuugacaaaguugaggcugaagugcaaauugauagguugaucacaggcagacuucaaaguuugcagacauaugugacucaacaauuaauuagagcugcagaaaucagagcuucugcuaaucuugcugcuacuaaaaugucagaguguguacuuggacaaucaaaaagaguugauuuuuguggaaagggcuaucaucuuauguccuucccucagucagcaccucaugguguagucuucuugcaugugacuuaugucccugcacaagaaaagaacuucacaacugcuccugccauuugucaugauggaaaagcacacuuuccucgugaaggugucuuuguuucaaauggcacacacugguuuguaacacaaaggaauuuuuaugaaccacaaaucauuacuacagacaacacauuugugucugguaacugugauguuguaauaggaauugucaacaacacaguuuaugauccuuugcaaccugaauuagacucauucaaggaggaguuagauaaauauuuuaagaaucauacaucaccagauguugauuuaggugacaucucuggcauuaaugcuucaguuguaaacauucaaaaagaaauugaccgccucaaugagguugccaagaauuuaaaugaaucucucaucgaucuccaagaacuuggaaaguaugagcaguauauaaaauggccaugguacauuuggcuagguuuuauagcuggcuugauugccauaguaauggugacaauuaugcuuugcuguaugaccaguugcuguaguugucucaagggcuguuguucuuguggauccugcugcaaauuugaugaagacgacucugagccagugcucaaaggagucaaauuacauuacacauaaggacuagucccuguucccagagcccacuuuuuuuucuuuuuuugaaauaaaauagccugucuuucagaucucaaaggcucuuuucagagccaccaaaaaaaaaaaaaaaaaaaaaaaaaaaaaaaaaaaaaaaaaaaaaaaaaaaaaaaaaaaaaaaaaaaaaaaaaaaaaaaaaaaaaaaaaaaaaaaaaaaaa

SEQ ID NO: 12214 - RNA, 4094 nt, Artificial Sequence
  SARS-CoV-2/Australia/QLD02/2020__EPI_ISL_407896 spike protein mRNA wt (1-1273)
aggagagucccgcagucggcguccagcggcucugcuuguucgugugugugucguugcaggccuuauucaagcuuaccauguuuguuuuucuuguuuuauugccacuagucucuagucaguguguuaaucuuacaaccagaacucaauuacccccugcauacacuaauucuuucacacgugguguuuauuacccugacaaaguuuucagauccucaguuuuacauucaacucaggacuuguucuuaccuuucuuuuccaauguuacuugguuccaugcuauacaugucucugggaccaaugguacuaagagguuugauaacccuguccuaccauuuaaugaugguguuuauuuugcuuccacugagaagucuaacauaauaagaggcuggauuuuugguacuacuuuagauucgaagacccagucccuacuuauuguuaauaacgcuacuaauguuguuauuaaagucugugaauuucaauuuuguaaugauccauuuuuggguguuuauuaccacaaaaacaacaaaaguuggauggaaagugaguucagaguuuauucuagugcgaauaauugcacuuuugaauaugucucucagccuuuucuuauggaccuugaaggaaaacaggguaauuucaaaaaucuuagggaauuuguguuuaagaauauugaugguuauuuuaaaauauauucuaagcacacgccuauuaauuuagugcgugaucucccucaggguuuuucggcuuuagaaccauugguagauuugccaauagguauuaacaucacuagguuucaaacuuuacuugcuuuacauagaaguuauuugacuccuggugauucuucuucagguuggacagcuggugcugcagcuuauuauguggguuaucuucaaccuaggacuuuucuauuaaaauauaaugaaaauggaaccauuacagaugcuguagacugugcacuugacccucucucagaaacaaaguguacguugaaauccuucacuguagaaaaaggaaucuaucaaacuucuaacuuuagaguccaaccaacagaaucuauuguuagauuuccuaauauuacaaacuugugcccuuuuggugaaguuuuuaacgccaccagauuugcaucuguuuaugcuuggaacaggaagagaaucagcaacuguguugcugauuauucuguccuauauaauuccgcaucauuuuccacuuuuaaguguuauggagugucuccuacuaaauuaaaugaucucugcuuuacuaaugucuaugcagauucauuuguaauuagaggugaugaagucagacaaaucgcuccagggcaaacuggaaagauugcugauuauaauuauaaauuaccagaugauuuuacaggcugcguuauagcuuggaauucuaacaaucuugauucuaagguuggugguaauuauaauuaccuguauagauuguuuaggaagucuaaucucaaaccuuuugagagagauauuucaacugaaaucuaucaggccgguagcacaccuuguaaugguguugaagguuuuaauuguuacuuuccuuuacaaucauaugguuuccaacccacuaaugguguugguuaccaaccauacagaguaguaguacuuucuuuugaacuucuacaugcaccagcaacuguuuguggaccuaaaaagucuacuaauuugguuaaaaacaaaugugucaauuucaacuucaaugguuuaacaggcacagguguucuuacugagucuaacaaaaaguuucugccuuuccaacaauuuggcagagacauugcugacacuacugaugcuguccgugauccacagacacuugagauucuugacauuacaccauguucuuuugguggugucaguguuauaacaccaggaacaaauacuucuaaccagguugcuguucuuuaucaggauguuaacugcacagaagucccuguugcuauucaugcagaucaacuuacuccuacuuggcguguuuauucuacagguucuaauguuuuucaaacacgugcaggcuguuuaauaggggcugaacaugucaacaacucauaugagugugacauacccauuggugcagguauaugcgcuaguuaucagacucagacuaauucuccucggcgggcacguaguguagcuagucaauccaucauugccuacacuaugucacuuggugcagaaaauucaguugcuuacucuaauaacucuauugccauacccacaaauuuuacuauuaguguuaccacagaaauucuaccagugucuaugaccaagacaucaguagauuguacaauguacauuuguggugauucaacugaaugcagcaaucuuuuguugcaauauggcaguuuuuguacacaauuaaaccgugcuuuaacuggaauagcuguugaacaagacaaaaacacccaagaaguuuuugcacaagucaaacaaauuuacaaaacaccaccaauuaaagauuuuggugguuuuaauuuuucacaaauauuaccagauccaucaaaaccaagcaagaggucauuuauugaagaucuacuuuucaacaaagugacacuugcagaugcuggcuucaucaaacaauauggugauugccuuggugauauugcugcuagagaccucauuugugcacaaaaguuuaacggccuuacuguuuugccaccuuugcucacagaugaaaugauugcucaauacacuucugcacuguuagcggguacaaucacuucugguuggaccuuuggugcaggugcugcauuacaaauaccauuugcuaugcaaauggcuuauagguuuaaugguauuggaguuacacagaauguucucuaugagaaccaaaaauugauugccaaccaauuuaauagugcuauuggcaaaauucaagacucacuuucuuccacagcaagugcacuuggaaaacuucaagauguggucaaccaaaaugcacaagcuuuaaacacgcuuguuaaacaacuuagcuccaauuuuggugcaauuucaaguguuuuaaaugauauccuuucacgucuugacaaaguugaggcugaagugcaaauugauagguugaucacaggcagacuucaaaguuugcagacauaugugacucaacaauuaauuagagcugcagaaaucagagcuucugcuaaucuugcugcuacuaaaaugucagaguguguacuuggacaaucaaaaagaguugauuuuuguggaaagggcuaucaucuuauguccuucccucagucagcaccucaugguguagucuucuugcaugugacuuaugucccugcacaagaaaagaacuucacaacugcuccugccauuugucaugauggaaaagcacacuuuccucgugaaggugucuuuguuucaaauggcacacacugguuuguaacacaaaggaauuuuuaugaaccacaaaucauuacuacagacaacacauuugugucugguaacugugauguuguaauaggaauugucaacaacacaguuuaugauccuuugcaacuugaauuagacucauucaaggaggaguuagauaaauauuuuaagaaucauacaucaccagauguugauuuaggugacaucucuggcauuaaugcuucaguuguaaacauucaaaaagaaauugaccgccucaaugagguugccaagaauuuaaaugaaucucucaucgaucuccaagaacuuggaaaguaugagcaguauauaaaauggccaugguacauuuggcuagguuuuauagcuggcuugauugccauaguaauggugacaauuaugcuuugcuguaugaccaguugcuguaguugucucaagggcuguuguucuuguggauccugcugcaaauuugaugaagacgacucugagccagugcucaaaggagucaaauuacauuacacauaaggacuagucccuguucccagagcccacuuuuuuuucuuuuuuugaaauaaaauagccugucuuucagaucucaaaggcucuuuucagagccaccaaaaaaaaaaaaaaaaaaaaaaaaaaaaaaaaaaaaaaaaaaaaaaaaaaaaaaaaaaaaaaaaaaaaaaaaaaaaaaaaaaaaaaaaaaaaaaaaaaaaa

SEQ ID NO: 12215 - RNA, 4094 nt, Artificial Sequence
  SARS-CoV-2/India/1-31/2020__EPI_ISL_413523 spike protein mRNA wt (1-1273)
aggagagucccgcagucggcguccagcggcucugcuuguucgugugugugucguugcaggccuuauucaagcuuaccauguuuguuuuucuuguuuuauugccacuagucucuagucaguguguuaaucuuacaaccagaacucaauuacccccugcauacacuaauucuuucacacgugguguuuauuacccugacaaaguuuucagauccucaguuuuacauucaacucaggacuuguucuuaccuuucuuuuccaauguuacuugguuccaugcuauacaugucucugggaccaaugguacuaagagguuugauaacccuguccuaccauuuaaugaugguguuuauuuugcuuccacugagaagucuaacauaauaagaggcuggauuuuugguacuacuuuagauucgaagacccagucccuacuuauuguuaauaacgcuacuaauguuguuauuaaagucugugaauuucaauuuuguaaugauccauuuuuggguguuuauuaccacaaaaacaacaaaaguuggauggaaagugaguucagaguuuauucuagugcgaauaauugcacuuuugaauaugucucucagccuuuucuuauggaccuugaaggaaaacaggguaauuucaaaaaucuuagggaauuuguguuuaagaauauugaugguuauuuuaaaauauauucuaagcacacgccuauuaauuuagugcgugaucucccucaggguuuuucggcuuuagaaccauugguagauuugccaauagguauuaacaucacuagguuucaaacuuuacuugcuuuacauagaaguuauuugacuccuggugauucuucuucagguuggacagcuggugcugcagcuuauuauguggguuaucuucaaccuaggacuuuucuauuaaaauauaaugaaaauggaaccauuacagaugcuguagacugugcacuugacccucucucagaaacaaaguguacguugaaauccuucacuguagaaaaaggaaucuaucaaacuucuaacuuuagaguccaaccaacagaaucuauuguuagauuuccuaauauuacaaacuugugcccuuuuggugaaguuuuuaacgccaccagauuugcaucuguuuaugcuuggaacaggaagagaaucagcaacuguguugcugauuauucuguccuauauaauuccgcaucauuuuccacuuuuaaguguuauggagugucuccuacuaaauuaaaugaucucugcuuuacuaaugucuaugcagauucauuuguaauuagaggugaugaagucagacaaaucgcuccagggcaaacuggaaagauugcugauuauaauuauaaauuaccagaugauuuuacaggcugcguuauagcuuggaauucuaacaaucuugauucuaagguuggugguaauuauaauuaccuguauagauuguuuaggaagucuaaucucaaaccuuuugagagagauauuucaacugaaaucuaucaggccgguagcacaccuuguaaugguguugaagguuuuaauuguuacuuuccuuuacaaucauaugguuuccaacccacuaaugguguugguuaccaaccauacagaguaguaguacuuucuuuugaacuucuacaugcaccagcaacuguuuguggaccuaaaaagucuacuaauuugguuaaaaacaaaugugucaauuucaacuucaaugguuuaacaggcacagguguucuuacugagucuaacaaaaaguuucugccuuuccaacaauuuggcagagacauugcugacacuacugaugcuguccgugauccacagacacuugagauucuugacauuacaccauguucuuuugguggugucaguguuauaacaccaggaacaaauacuucuaaccagguugcuguucuuuaucaggauguuaacugcacagaagucccuguugcuauucaugcagaucaacuuacuccuacuuggcguguuuauucuacagguucuaauguuuuucaaacacgugcaggcuguuuaauaggggcugaacaugucaacaacucauaugagugugacauacccauuggugcagguauaugcgcuaguuaucagacucagacuaauucuccucggcgggcacguaguguagcuagucaauccaucauugccuacacuaugucacuuggugcagaaaauucaguugcuuacucuaauaacucuauugccauacccacaaauuuuacuauuaguguuaccacagaaauucuaccagugucuaugaccaagacaucaguagauuguacaauguacauuuguggugauucaacugaaugcagcaaucuuuuguugcaauauggcaguuuuuguacacaauuaaaccgugcuuuaacuggaauagcuguugaacaagacaaaaacacccaagaaguuuuugcacaagucaaacaaauuuacaaaacaccaccaauuaaagauuuuggugguuuuaauuuuucacaaauauuaccagauccaucaaaaccaagcaagaggucauuuauugaagaucuacuuuucaacaaagugacacuugcagaugcuggcuucaucaaacaauauggugauugccuuggugauauugcugcuagagaccucauuugugcacaaaaguuuaacggccuuacuguuuugccaccuuugcucacagaugaaaugauugcucaauacacuucugcacuguuagcggguacaaucacuucugguuggaccuuuggugcaggugcugcauuacaaauaccauuugcuaugcaaauggcuuauagguuuaaugguauuggaguuacacagaauguucucuaugagaaccaaaaauugauugccaaccaauuuaauaguguuauuggcaaaauucaagacucacuuucuuccacagcaagugcacuuggaaaacuucaagauguggucaaccaaaaugcacaagcuuuaaacacgcuuguuaaacaacuuagcuccaauuuuggugcaauuucaaguguuuuaaaugauauccuuucacgucuugacaaaguugaggcugaagugcaaauugauagguugaucacaggcagacuucaaaguuugcagacauaugugacucaacaauuaauuagagcugcagaaaucagagcuucugcuaaucuugcugcuacuaaaaugucagaguguguacuuggacaaucaaaaagaguugauuuuuguggaaagggcuaucaucuuauguccuucccucagucagcaccucaugguguagucuucuugcaugugacuuaugucccugcacaagaaaagaacuucacaacugcuccugccauuugucaugauggaaaagcacacuuuccucgugaaggugucuuuguuucaaauggcacacacugguuuguaacacaaaggaauuuuuaugaaccacaaaucauuacuacagacaacacauuugugucugguaacugugauguuguaauaggaauugucaacaacacaguuuaugauccuuugcaaccugaauuagacucauucaaggaggaguuagauaaauauuuuaagaaucauacaucaccagauguugauuuaggugacaucucuggcauuaaugcuucaguuguaaacauucaaaaagaaauugaccgccucaaugagguugccaagaauuuaaaugaaucucucaucgaucuccaagaacuuggaaaguaugagcaguauauaaaauggccaugguacauuuggcuagguuuuauagcuggcuugauugccauaguaauggugacaauuaugcuuugcuguaugaccaguugcuguaguugucucaagggcuguuguucuuguggauccugcugcaaauuugaugaagacgacucugagccagugcucaaaggagucaaauuacauuacacauaaggacuagucccuguucccagagcccacuuuuuuuucuuuuuuugaaauaaaauagccugucuuucagaucucaaaggcucuuuucagagccaccaaaaaaaaaaaaaaaaaaaaaaaaaaaaaaaaaaaaaaaaaaaaaaaaaaaaaaaaaaaaaaaaaaaaaaaaaaaaaaaaaaaaaaaaaaaaaaaaaaaaa

SEQ ID NO: 12216 - RNA, 4094 nt, Artificial Sequence
  SARS-CoV-2/Guangdong/GD2020087-P0008/2020__EPI_ISL_413863 spike protein mRNA wt (1-1273)
aggagagucccgcagucggcguccagcggcucugcuuguucgugugugugucguugcaggccuuauucaagcuuaccauguuuguuuuucuuguuuuauugccacuagucucuagucaguguguuaaucuuacaaccagaacucaauuacccccugcauacacuaauucuuucacacgugguguuuauuacccugacaaaguuuucagauccucaguuuuacauucaacucaggacuuguucuuaccuuucuuuuccaauguuacuugguuccaugcuauacaugucucugggaccaaugguacuaagagguuugauaacccuguccuaccauuuaaugaugguguuuauuuugcuuccacugagaagucuaacauaauaagaggcuggauuuuugguacuacuuuagauucgaagacccagucccuacuuauuguuaauaacgcuacuaauguuguuauuaaagucugugaauuucaauuuuguaaugauccauuuuuggguguuuauuaccacaaaaacaacaaaaguuggauggaaagugaguucagaguuuauucuagugcgaauaauugcacuuuugaauaugucucucagccuuuucuuauggaccuugaaggaaaacaggguaauuucaaaaaucuuagggaauuuguguuuaagaauauugaugguuauuuuaaaauauauucuaagcacacgccuauuaauuuagugcgugaucucccucaggguuuuucggcuuuagaaccauugguagauuugccaauagguauuaacaucacuagguuucaaacuuuacuugcuuuacauagaaguuauuugacuccuggugauucuucuucagguuggacagcuggugcugcagcuuauuauguggguuaucuucaaccuaggacuuuucuauuaaaauauaaugaaaauggaaccauuacagaugcuguagacugugcacuugacccucucucagaaacaaaguguacguugaaauccuucacuguagaaaaaggaaucuaucaaacuucuaacuuuagaguccaaccaacagaaucuauuguuagauuuccuaauauuacaaacuugugcccuuuuggugaaguuuuuaacgccaccagauuugcaucuguuuaugcuuggaacaggaagagaaucagcaacuguguugcugauuauucuguccuauauaauuccgcaucauuuuccacuuuuaaguguuauggagugucuccuacuaaauuaaaugaucucugcuuuacuaaugucuaugcagauucauuuguaauuagaggugaugaagucagagaaaucgcuccagggcaaacuggaaagauugcugauuauaauuauaaauuaccagaugauuuuacaggcugcguuauagcuuggaauucuaacaaucuugauucuaagguuggugguaauuauaauuaccuguauagauuguuuaggaagucuaaucucaaaccuuuugagagagauauuucaacugaaaucuaucaggccgguagcacaccuuguaaugguguugaagguuuuaauuguuacuuuccuuuacaaucauaugguuuccaacccacuaaugguguugguuaccaaccauacagaguaguaguacuuucuuuugaacuucuacaugcaccagcaacuguuuguggaccuaaaaagucuacuaauuugguuaaaaacaaaugugucaauuucaacuucaaugguuuaacaggcacagguguucuuacugagucuaacaaaaaguuucugccuuuccaacaauuuggcagagacauugcugacacuacugaugcuguccgugauccacagacacuugagauucuugacauuacaccauguucuuuugguggugucaguguuauaacaccaggaacaaauacuucuaaccagguugcuguucuuuaucaggauguuaacugcacagaagucccuguugcuauucaugcagaucaacuuacuccuacuuggcguguuuauucuacagguucuaauguuuuucaaacacgugcaggcuguuuaauaggggcugaacaugucaacaacucauaugagugugacauacccauuggugcagguauaugcgcuaguuaucagacucagacuaauucuccucggcgggcacguaguguagcuagucaauccaucauugccuacacuaugucacuuggugcagaaaauucaguugcuuacucuaauaacucuauugccauacccacaaauuuuacuauuaguguuaccacagaaauucuaccagugucuaugaccaagacaucaguagauuguacaauguacauuuguggugauucaacugaaugcagcaaucuuuuguugcaauauggcaguuuuuguacacaauuaaaccgugcuuuaacuggaauagcuguugaacaagacaaaaacacccaagaaguuuuugcacaagucaaacaaauuuacaaaacaccaccaauuaaagauuuuggugguuuuaauuuuucacaaauauuaccagauccaucaaaaccaagcaagaggucauuuauugaagaucuacuuuucaacaaagugacacuugcagaugcuggcuucaucaaacaauauggugauugccuuggugauauugcugcuagagaccucauuugugcacaaaaguuuaacggccuuacuguuuugccaccuuugcucacagaugaaaugauugcucaauacacuucugcacuguuagcggguacaaucacuucugguuggaccuuuggugcaggugcugcauuacaaauaccauuugcuaugcaaauggcuuauagguuuaaugguauuggaguuacacagaauguucucuaugagaaccaaaaauugauugccaaccaauuuaauagugcuauuggcaaaauucaagacucacuuucuuccacagcaagugcacuuggaaaacuucaagauguggucaaccaaaaugcacaagcuuuaaacacgcuuguuaaacaacuuagcuccaauuuuggugcaauuucaaguguuuuaaaugauauccuuucacgucuugacaaaguugaggcugaagugcaaauugauagguugaucacaggcagacuucaaaguuugcagacauaugugacucaacaauuaauuagagcugcagaaaucagagcuucugcuaaucuugcugcuacuaaaaugucagaguguguacuuggacaaucaaaaagaguugauuuuuguggaaagggcuaucaucuuauguccuucccucagucagcaccucaugguguagucuucuugcaugugacuuaugucccugcacaagaaaagaacuucacaacugcuccugccauuugucaugauggaaaagcacacuuuccucgugaaggugucuuuguuucaaauggcacacacugguuuguaacacaaaggaauuuuuaugaaccacaaaucauuacuacagacaacacauuugugucugguaacugugauguuguaauaggaauugucaacaacacaguuuaugauccuuugcaaccugaauuagacucauucaaggaggaguuagauaaauauuuuaagaaucauacaucaccagauguugauuuaggugacaucucuggcauuaaugcuucaguuguaaacauucaaaaagaaauugaccgccucaaugagguugccaagaauuuaaaugaaucucucaucgaucuccaagaacuuggaaaguaugagcaguauauaaaauggccaugguacauuuggcuagguuuuauagcuggcuugauugccauaguaauggugacaauuaugcuuugcuguaugaccaguugcuguaguugucucaagggcuguuguucuuguggauccugcugcaaauuugaugaagacgacucugagccagugcucaaaggagucaaauuacauuacacauaaggacuagucccuguucccagagcccacuuuuuuuucuuuuuuugaaauaaaauagccugucuuucagaucucaaaggcucuuuucagagccaccaaaaaaaaaaaaaaaaaaaaaaaaaaaaaaaaaaaaaaaaaaaaaaaaaaaaaaaaaaaaaaaaaaaaaaaaaaaaaaaaaaaaaaaaaaaaaaaaaaaaa

SEQ ID NO: 12217 - RNA, 4094 nt, Artificial Sequence
  SARS-CoV-2/Sweden/01/2020__EPI_ISL_411951 spike protein mRNA wt (1-1273)
aggagagucccgcagucggcguccagcggcucugcuuguucgugugugugucguugcaggccuuauucaagcuuaccauguuuguuuuucuuguuuuauugccacuagucucuagucaguguguuaaucuuacaaccagaacucaauuacccccugcauacacuaauucuuucacacgugguguuuauuacccugacaaaguuuucagauccucaguuuuacauucaacucaggacuuguucuuaccuuucuuuuccaauguuacuugguuccaugcuauacaugucucugggaccaaugguacuaagagguuugauaacccuguccuaccauuuaaugaugguguuuauuuugcuuccacugagaagucuaacauaauaagaggcuggauuuuugguacuacuuuagauucgaagacccagucccuacuuauuguuaauaacgcuacuaauguuguuauuaaagucugugaauuucaauuuuguaaugauccauuuuuggguguuuauuaccacaaaaacaacaaaaguuggauggaaagugaguucagaguuuauucuagugcgaauaauugcacuuuugaauaugucucucagccuuuucuuauggaccuugaaggaaaacaggguaauuucaaaaaucuuagggaauuuguguuuaagaauauugaugguuauuuuaaaauauauucuaagcacacgccuauuaauuuagugcgugaucucccucaggguuuuucggcuuuagaaccauugguagauuugccaauagguauuaacaucacuagguuucaaacuuuacuugcuuuacauagaaguuauuugacuccuggugauucuucuucagguuggacagcuggugcugcagcuuauuauguggguuaucuucaaccuaggacuuuucuauuaaaauauaaugaaaauggaaccauuacagaugcuguagacugugcacuugacccucucucagaaacaaaguguacguugaaauccuucacuguagaaaaaggaaucuaucaaacuucuaacuuuagaguccaaccaacagaaucuauuguuagauuuccuaauauuacaaacuugugcccuuuuggugaaguuuuuaacgccaccagauuugcaucuguuuaugcuuggaacaggaagagaaucagcaacuguguugcugauuauucuguccuauauaauuccgcaucauuuuccacuuuuaaguguuauggagugucuccuacuaaauuaaaugaucucugcuuuacuaaugucuaugcagauucauuuguaauuagaggugaugaagucagacaaaucgcuccagggcaaacuggaaagauugcugauuauaauuauaaauuaccagaugauuuuacaggcugcguuauagcuuggaauucuaacaaucuugauucuaagguuggugguaauuauaauuaccuguauagauuguuuaggaagucuaaucucaaaccuuuugagagagauauuucaacugaaaucuaucaggccgguagcacaccuuguaaugguguugaagguuuuaauuguuacuuuccuuuacaaucauaugguuuccaacccacuaaugguguugguuaccaaccauacagaguaguaguacuuucuuuugaacuucuacaugcaccagcaacuguuuguggaccuaaaaagucuacuaauuugguuaaaaacaaaugugucaauuucaacuucaaugguuuaacaggcacagguguucuuacugagucuaacaaaaaguuucugccuuuccaacaauuuggcagagacauugcugacacuacugaugcuguccgugauccacagacacuugagauucuugacauuacaccauguucuuuugguggugucaguguuauaacaccaggaacaaauacuucuaaccagguugcuguucuuuaucaggauguuaacugcacagaagucccuguugcuauucaugcagaucaacuuacuccuacuuggcguguuuauucuacagguucuaauguuuuucaaacacgugcaggcuguuuaauaggggcugaacaugucaacaacucauaugagugugacauacccauuggugcagguauaugcgcuaguuaucagacucagacuaauucuccucggcgggcacguaguguagcuagucaauccaucauugccuacacuaugucacuuggugcagaaaauucaguugcuuacucuaauaacucuauugccauacccacaaauuuuacuauuaguguuaccacagaaauucuaccagugucuaugaccaagacaucaguagauuguacaauguacauuuguggugauucaacugaaugcagcaaucuuuuguugcaauauggcaguuuuuguacacaauuaaaccgugcuuuaacuggaauagcuguugaacaagacaaaaacacccaagaaguuuuugcacaagucaaacaaauuuacaaaacaccaccaauuaaagauuguggugguuuuaauuuuucacaaauauuaccagauccaucaaaaccaagcaagaggucauuuauugaagaucuacuuuucaacaaagugacacuugcagaugcuggcuucaucaaacaauauggugauugccuuggugauauugcugcuagagaccucauuugugcacaaaaguuuaacggccuuacuguuuugccaccuuugcucacagaugaaaugauugcucaauacacuucugcacuguuagcggguacaaucacuucugguuggaccuuuggugcaggugcugcauuacaaauaccauuugcuaugcaaauggcuuauagguuuaaugguauuggaguuacacagaauguucucuaugagaaccaaaaauugauugccaaccaauuuaauagugcuauuggcaaaauucaagacucacuuucuuccacagcaagugcacuuggaaaacuucaagauguggucaaccaaaaugcacaagcuuuaaacacgcuuguuaaacaacuuagcuccaauuuuggugcaauuucaaguguuuuaaaugauauccuuucacgucuugacaaaguugaggcugaagugcaaauugauagguugaucacaggcagacuucaaaguuugcagacauaugugacucaacaauuaauuagagcugcagaaaucagagcuucugcuaaucuugcugcuacuaaaaugucagaguguguacuuggacaaucaaaaagaguugauuuuuguggaaagggcuaucaucuuauguccuucccucagucagcaccucaugguguagucuucuugcaugugacuuaugucccugcacaagaaaagaacuucacaacugcuccugccauuugucaugauggaaaagcacacuuuccucgugaaggugucuuuguuucaaauggcacacacugguuuguaacacaaaggaauuuuuaugaaccacaaaucauuacuacagacaacacauuugugucugguaacugugauguuguaauaggaauugucaacaacacaguuuaugauccuuugcaaccugaauuagacucauucaaggaggaguuagauaaauauuuuaagaaucauacaucaccagauguugauuuaggugacaucucuggcauuaaugcuucaguuguaaacauucaaaaagaaauugaccgccucaaugagguugccaagaauuuaaaugaaucucucaucgaucuccaagaacuuggaaaguaugagcaguauauaaaauggccaugguacauuuggcuagguuuuauagcuggcuugauugccauaguaauggugacaauuaugcuuugcuguaugaccaguugcuguaguugucucaagggcuguuguucuuguggauccugcugcaaauuugaugaagacgacucugagccagugcucaaaggagucaaauuacauuacacauaaggacuagucccuguucccagagcccacuuuuuuuucuuuuuuugaaauaaaauagccugucuuucagaucucaaaggcucuuuucagagccaccaaaaaaaaaaaaaaaaaaaaaaaaaaaaaaaaaaaaaaaaaaaaaaaaaaaaaaaaaaaaaaaaaaaaaaaaaaaaaaaaaaaaaaaaaaaaaaaaaaaaa

SEQ ID NO: 12218 - RNA, 4094 nt, Artificial Sequence
  SARS-CoV-2/Tianmen/HBCDC-HB-07/2020__EPI_ISL_412983 spike protein mRNA wt (1-1273)
aggagagucccgcagucggcguccagcggcucugcuuguucgugugugugucguugcaggccuuauucaagcuuaccauguuuguuuuucuuguuuuauugccacuagucucuagucaguguguuaaucuuacaaccagaacucaauuacccccugcauacacuaauucuuucacacgugguguuuauuacccugacaaaguuuucagauccucaguuuuacauucaacucaggacuuguucuuaccuuucuuuuccaauguuacuugguuccaugcuauacaugucucugggaccaaugguacuaagagguuugauaacccuguccuaccauuuaaugaugguguuuauuuugcuuccacugagaagucuaacauaauaagaggcuggauuuuugguacuacuuuagauucgaagacccagucccuacuuauuguuaauaacgcuacuaauguuguuauuaaagucugugaauuucaauuuuguaaugauccauuuuuggguguuuauuaccacaaaaacaacaaaaguuggauggaaagugaguucagaguuuauucuagugcgaauaauugcacuuuugaauaugucucucagccuuuucuuauggaccuugaaggaaaacaggguaauuucaaaaaucuuagggaauuuguguuuaagaauauugaugguuauuuuaaaauauauucuaagcacacgccuauuaauuuagugcgugaucucccucaggguuuuucggcuuuagaaccauugguagauuugccaauagguauuaacaucacuagguuucaaacuuuacuugcuuuacauagaaguuauuugacuccuggugauucuucuucagguuggacagcuggugcugcagcuuauuauguggguuaucuucaaccuaggacuuuucuauuaaaauauaaugaaaauggaaccauuacagaugcuguagacugugcacuugacccucucucagaaacaaaguguacguugaaauccuucacuguagaaaaaggaaucuaucaaacuucuaacuuuagaguccaaccaacagaaucuauuguuagauuuccuaauauuacaaacuugugcccuuuuggugaaguuuuuaacgccaccagauuugcaucuguuuaugcuuggaacaggaagagaaucagcaacuguguugcugauuauucuguccuauauaauuccgcaucauuuuccacuuuuaaguguuauggagugucuccuacuaaauuaaaugaucucugcuuuacuaaugucuaugcagauucauuuguaauuagaggugaugaagucagacaaaucgcuccagggcaaacuggaaagauugcugauuauaauuauaaauuaccagaugauuuuacaggcugcguuauagcuuggaauucuaacaaucuugauucuaagguuggugguaauuauaauuaccuguauagauuguuuaggaagucuaaucucaaaccuuuugagagagauauuucaacugaaaucuaucaggccgguagcacaccuuguaaugguguugaagguuuuaauuguuacuuuccuuuacaaucauaugguuuccaacccacuaaugguguugguuaccaaccauacagaguaguaguacuuucuuuugaacuucuacaugcaccagcaacuguuuguggaccuaaaaagucuacuaauuugguuaaaaacaaaugugucaauuucaacuucaaugguuuaacaggcacagguguucuuacugagucuaacaaaaaguuucugccuuuccaacaauuuggcagagacauugcugacacuacugaugcuguccgugauccacagacacuugagauucuugacauuacaccauguucuuuugguggugucaguguuauaacaccaggaacaaauacuucuaaccagguugcuguucuuuaucaggaucuuaacugcacagaagucccuguugcuauucaugcagaucaacuuacuccuacuuggcguguuuauucuacagguucuaauguuuuucaaacacgugcaggcuguuuaauaggggcugaacaugucaacaacucauaugagugugacauacccauuggugcagguauaugcgcuaguuaucagacucagacuaauucuccucggcgggcacguaguguagcuagucaauccaucauugccuacacuaugucacuuggugcagaaaauucaguugcuuacucuaauaacucuauugccauacccacaaauuuuacuauuaguguuaccacagaaauucuaccagugucuaugaccaagacaucaguagauuguacaauguacauuuguggugauucaacugaaugcagcaaucuuuuguugcaauauggcaguuuuuguacacaauuaaaccgugcuuuaacuggaauagcuguugaacaagacaaaaacacccaagaaguuuuugcacaagucaaacaaauuuacaaaacaccaccaauuaaagauuuuggugguuuuaauuuuucacaaauauuaccagauccaucaaaaccaagcaagaggucauuuauugaagaucuacuuuucaacaaagugacacuugcagaugcuggcuucaucaaacaauauggugauugccuuggugauauugcugcuagagaccucauuugugcacaaaaguuuaacggccuuacuguuuugccaccuuugcucacagaugaaaugauugcucaauacacuucugcacuguuagcggguacaaucacuucugguuggaccuuuggugcaggugcugcauuacaaauaccauuugcuaugcaaauggcuuauagguuuaaugguauuggaguuacacagaauguucucuaugagaaccaaaaauugauugccaaccaauuuaauagugcuauuggcaaaauucaagacucacuuucuuccacagcaagugcacuuggaaaacuucaagauguggucaaccaaaaugcacaagcuuuaaacacgcuuguuaaacaacuuagcuccaauuuuggugcaauuucaaguguuuuaaaugauauccuuucacgucuugacaaaguugaggcugaagugcaaauugauagguugaucacaggcagacuucaaaguuugcagacauaugugacucaacaauuaauuagagcugcagaaaucagagcuucugcuaaucuugcugcuacuaaaaugucagaguguguacuuggacaaucaaaaagaguugauuuuuguggaaagggcuaucaucuuauguccuucccucagucagcaccucaugguguagucuucuugcaugugacuuaugucccugcacaagaaaagaacuucacaacugcuccugccauuugucaugauggaaaagcacacuuuccucgugaaggugucuuuguuucaaauggcacacacugguuuguaacacaaaggaauuuuuaugaaccacaaaucauuacuacagacaacacauuugugucugguaacugugauguuguaauaggaauugucaacaacacaguuuaugauccuuugcaaccugaauuagacucauucaaggaggaguuagauaaauauuuuaagaaucauacaucaccagauguugauuuaggugacaucucuggcauuaaugcuucaguuguaaacauucaaaaagaaauugaccgccucaaugagguugccaagaauuuaaaugaaucucucaucgaucuccaagaacuuggaaaguaugagcaguauauaaaauggccaugguacauuuggcuagguuuuauagcuggcuugauugccauaguaauggugacaauuaugcuuugcuguaugaccaguugcuguaguugucucaagggcuguuguucuuguggauccugcugcaaauuugaugaagacgacucugagccagugcucaaaggagucaaauuacauuacacauaaggacuagucccuguucccagagcccacuuuuuuuucuuuuuuugaaauaaaauagccugucuuucagaucucaaaggcucuuuucagagccaccaaaaaaaaaaaaaaaaaaaaaaaaaaaaaaaaaaaaaaaaaaaaaaaaaaaaaaaaaaaaaaaaaaaaaaaaaaaaaaaaaaaaaaaaaaaaaaaaaaaaa

SEQ ID NO: 12219 - RNA, 4094 nt, Artificial Sequence
  SARS-CoV-2/Hong Kong/case42_VM20002493/2020__EPI_ISL_414527 spike protein mRNA wt (1-1273)
aggagagucccgcagucggcguccagcggcucugcuuguucgugugugugucguugcaggccuuauucaagcuuaccauguuuguuuuucuuguuuuauugccacuagucucuagucaguguguuaaucuuacaaccagaacucaauuacccccugcauacacuaauucuuucacacgugguguuuauuacccugacaaaguuuucagauccucaguuuuacauucaacucaggacuuguucuuaccuuucuuuuccaauguuacuugguuccaugcuauacaugucucugggaccaaugguacuaagagguuugauaacccuguccuaccauuuaaugaugguguuuauuuugcuuccacugagaagucuaacauaauaagaggcuggauuuuugguacuacuuuagauucgaagacccagucccuacuuauuguuaauaacgcuacuaauguuguuauuaaagucugugaauuucaauuuuguaaugauccauuuuuggguguuuauuaccacaaaaacaacaaaaguuggauggaaagugaguucagaguuuauucuagugcgaauaauugcacuuuugaauaugucucucagccuuuucuuauggaccuugaaggaaaacaggguaauuucaaaaaucuuagggaauuuguguuuaagaauauugaugguuauuuuaaaauauauucuaagcacacgccuauuaauuuagugcgugaucucccucaggguuuuucggcuuuagaaccauugguagauuugccaauagguauuaacaucacuagguuucaaacuuuacuugcuuuacauagaaguuauuugacuccuggugauucuucuucagguuggacagcuggugcugcagcuuauuauguggguuaucuucaaccuaggacuuuucuauuaaaauauaaugaaaauggaaccauuacagaugcuguagacugugcacuugacccucucucagaaacaaaguguacguugaaauccuucacuguagaaaaaggaaucuaucaaacuucuaacuuuagaguccaaccaacagaaucuauuguuagauuuccuaauauuacaaacuugugcccuuuuggugaaguuuuuaacgccaccagauuugcaucuguuuaugcuuggaacaggaagagaaucagcaacuguguugcugauuauucuguccuauauaauuccgcaucauuuuccacuuuuaaguguuauggagugucuccuacuaaauuaaaugaucucugcuuuacuaaugucuaugcagauucauuuguaauuagaggugaugaagucagacaaaucgcuccagggcaaacuggaaagauugcugauuauaauuauaaauuaccagaugauuuuacaggcugcguuauagcuuggaauucuaacaaucuugauucuaagguuggugguaauuauaauuaccuguauagauuguuuaggaagucuaaucucaaaccuuuugagagagauauuucaacugaaaucuaucaggccgguagcacaccuuguaaugguguugaagguuuuaauuguuacuuuccuuuacaaucauaugguuuccaacccacuaaugguguugguuaccaaccauacagaguaguaguacuuucuuuugaacuucuacaugcaccagcaacuguuuguggaccuaaaaagucuacuaauuugguuaaaaacaaaugugucaauuucaacuucaaugguuuaacaggcacagguguucuuacugagucuaacaaaaaguuucugccuuuccaacaauuuggcagagacauugcugacacuacugaugcuguccgugauccacagacacuugagauucuugacauuacaccauguucuuuugguggugucaguguuauaacaccaggaacaaauacuucuaaccagguugcuguucuuuaucaggauguuaacugcacagaagucccuguugcuauucaugcagaucaacuuacuccuacuuggcguguuuauucuacagguucuaauguuuuucaaacacgugcaggcuguuuaauaggggcugaacaugucaacaacucauaugagugugacauacccauuggugcagguauaugcgcuaguuaucagacucagacuaauucuccucggcgggcacguaguguagcuagucaauccaucauugccuacacuaugucacuuggugcagaaaauucaguugcuuacucuaauaacucuauugccauacccacaaauuuugcuauuaguguuaccacagaaauucuaccagugucuaugaccaagacaucaguagauuguacaauguacauuuguggugauucaacugaaugcagcaaucuuuuguugcaauauggcaguuuuuguacacaauuaaaccgugcuuuaacuggaauagcuguugaacaagacaaaaacacccaagaaguuuuugcacaagucaaacaaauuuacaaaacaccaccaauuaaagauuuuggugguuuuaauuuuucacaaauauuaccagauccaucaaaaccaagcaagaggucauuuauugaagaucuacuuuucaacaaagugacacuugcagaugcuggcuucaucaaacaauauggugauugccuuggugauauugcugcuagagaccucauuugugcacaaaaguuuaacggccuuacuguuuugccaccuuugcucacagaugaaaugauugcucaauacacuucugcacuguuagcggguacaaucacuucugguuggaccuuuggugcaggugcugcauuacaaauaccauuugcuaugcaaauggcuuauagguuuaaugguauuggaguuacacagaauguucucuaugagaaccaaaaauugauugccaaccaauuuaauagugcuauuggcaaaauucaagacucacuuucuuccacagcaagugcacuuggaaaacuucaagauguggucaaccaaaaugcacaagcuuuaaacacgcuuguuaaacaacuuagcuccaauuuuggugcaauuucaaguguuuuaaaugauauccuuucacgucuugacaaaguugaggcugaagugcaaauugauagguugaucacaggcagacuucaaaguuugcagacauaugugacucaacaauuaauuagagcugcagaaaucagagcuucugcuaaucuugcugcuacuaaaaugucagaguguguacuuggacaaucaaaaagaguugauuuuuguggaaagggcuaucaucuuauguccuucccucagucagcaccucaugguguagucuucuugcaugugacuuaugucccugcacaagaaaagaacuucacaacugcuccugccauuugucaugauggaaaagcacacuuuccucgugaaggugucuuuguuucaaauggcacacacugguuuguaacacaaaggaauuuuuaugaaccacaaaucauuacuacagacaacacauuugugucugguaacugugauguuguaauaggaauugucaacaacacaguuuaugauccuuugcaaccugaauuagacucauucaaggaggaguuagauaaauauuuuaagaaucauacaucaccagauguugauuuaggugacaucucuggcauuaaugcuucaguuguaaacauucaaaaagaaauugaccgccucaaugagguugccaagaauuuaaaugaaucucucaucgaucuccaagaacuuggaaaguaugagcaguauauaaaauggccaugguacauuuggcuagguuuuauagcuggcuugauugccauaguaauggugacaauuaugcuuugcuguaugaccaguugcuguaguugucucaagggcuguuguucuuguggauccugcugcaaauuugaugaagacgacucugagccagugcucaaaggagucaaauuacauuacacauaaggacuagucccuguucccagagcccacuuuuuuuucuuuuuuugaaauaaaauagccugucuuucagaucucaaaggcucuuuucagagccaccaaaaaaaaaaaaaaaaaaaaaaaaaaaaaaaaaaaaaaaaaaaaaaaaaaaaaaaaaaaaaaaaaaaaaaaaaaaaaaaaaaaaaaaaaaaaaaaaaaaaa

SEQ ID NO: 12220 - RNA, 4094 nt, Artificial Sequence
  SARS-CoV-2/USA/CruiseA-23/2020__EPI_ISL_414482 spike protein mRNA wt (1-1273)
aggagagucccgcagucggcguccagcggcucugcuuguucgugugugugucguugcaggccuuauucaagcuuaccauguuuguuuuucuuguuuuauugccacuagucucuagucaguguguuaaucuuacaaccagaacucaauuacccccugcauacacuaauucuuucacacgugguguuuauuacccugacaaaguuuucagauccucaguuuuacauucaacucaggacuuguucuuaccuuucuuuuccaauguuacuugguuccaugcuauacaugucucugggaccaaugguacuaagagguuugauaacccuguccuaccauuuaaugaugguguuuauuuugcuuccacugagaagucuaacauaauaagaggcuggauuuuugguacuacuuuagauucgaagacccagucccuacuuauuguuaauaacgcuacuaauguuguuauuaaagucugugaauuucaauuuuguaaugauccauuuuuggguguuuauuaccacaaaaacaacaaaaguuggauggaaagugaguucagaguuuauucuagugcgaauaauugcacuuuugaauaugucucucagccuuuucuuauggaccuugaaguaaaacaggguaauuucaaaaaucuuagggaauuuguguuuaagaauauugaugguuauuuuaaaauauauucuaagcacacgccuauuaauuuagugcgugaucucccucaggguuuuucggcuuuagaaccauugguagauuugccaauagguauuaacaucacuagguuucaaacuuuacuugcuuuacauagaaguuauuugacuccuggugauucuucuucagguuggacagcuggugcugcagcuuauuauguggguuaucuucaaccuaggacuuuucuauuaaaauauaaugaaaauggaaccauuacagaugcuguagacugugcacuugacccucucucagaaacaaaguguacguugaaauccuucacuguagaaaaaggaaucuaucaaacuucuaacuuuagaguccaaccaacagaaucuauuguuagauuuccuaauauuacaaacuugugcccuuuuggugaaguuuuuaacgccaccagauuugcaucuguuuaugcuuggaacaggaagagaaucagcaacuguguugcugauuauucuguccuauauaauuccgcaucauuuuccacuuuuaaguguuauggagugucuccuacuaaauuaaaugaucucugcuuuacuaaugucuaugcagauucauuuguaauuagaggugaugaagucagacaaaucgcuccagggcaaacuggaaagauugcugauuauaauuauaaauuaccagaugauuuuacaggcugcguuauagcuuggaauucuaacaaucuugauucuaagguuggugguaauuauaauuaccuguauagauuguuuaggaagucuaaucucaaaccuuuugagagagauauuucaacugaaaucuaucaggccgguagcacaccuuguaaugguguugaagguuuuaauuguuacuuuccuuuacaaucauaugguuuccaacccacuaaugguguugguuaccaaccauacagaguaguaguacuuucuuuugaacuucuacaugcaccagcaacuguuuguggaccuaaaaagucuacuaauuugguuaaaaacaaaugugucaauuucaacuucaaugguuuaacaggcacagguguucuuacugagucuaacaaaaaguuucugccuuuccaacaauuuggcagagacauugcugacacuacugaugcuguccgugauccacagacacuugagauucuugacauuacaccauguucuuuugguggugucaguguuauaacaccaggaacaaauacuucuaaccagguugcuguucuuuaucaggauguuaacugcacagaagucccuguugcuauucaugcagaucaacuuacuccuacuuggcguguuuauucuacagguucuaauguuuuucaaacacgugcaggcuguuuaauaggggcugaacaugucaacaacucauaugagugugacauacccauuggugcagguauaugcgcuaguuaucagacucagacuaauucuccucggcgggcacguaguguagcuagucaauccaucauugccuacacuaugucacuuggugcagaaaauucaguugcuuacucuaauaacucuauugccauacccacaaauuuuacuauuaguguuaccacagaaauucuaccagugucuaugaccaagacaucaguagauuguacaauguacauuuguggugauucaacugaaugcagcaaucuuuuguugcaauauggcaguuuuuguacacaauuaaaccgugcuuuaacuggaauagcuguugaacaagacaaaaacacccaagaaguuuuugcacaagucaaacaaauuuacaaaacaccaccaauuaaagauuuuggugguuuuaauuuuucacaaauauuaccagauccaucaaaaccaagcaagaggucauuuauugaagaucuacuuuucaacaaagugacacuugcagaugcuggcuucaucaaacaauauggugauugccuuggugauauugcugcuagagaccucauuugugcacaaaaguuuaacggccuuacuguuuugccaccuuugcucacagaugaaaugauugcucaauacacuucugcacuguuagcggguacaaucacuucugguuggaccuuuggugcaggugcugcauuacaaauaccauuugcuaugcaaauggcuuauagguuuaaugguauuggaguuacacagaauguucucuaugagaaccaaaaauugauugccaaccaauuuaauagugcuauuggcaaaauucaagacucacuuucuuccacagcaagugcacuuggaaaacuucaagauguggucaaccaaaaugcacaagcuuuaaacacgcuuguuaaacaacuuagcuccaauuuuggugcaauuucaaguguuuuaaaugauauccuuucacgucuugacaaaguugaggcugaagugcaaauugauagguugaucacaggcagacuucaaaguuugcagacauaugugacucaacaauuaauuagagcugcagaaaucagagcuucugcuaaucuugcugcuacuaaaaugucagaguguguacuuggacaaucaaaaagaguugauuuuuguggaaagggcuaucaucuuauguccuucccucagucagcaccucaugguguagucuucuugcaugugacuuaugucccugcacaagaaaagaacuucacaacugcuccugccauuugucaugauggaaaagcacacuuuccucgugaaggugucuuuguuucaaauggcacacacugguuuguaacacaaaggaauuuuuaugaaccacaaaucauuacuacagacaacacauuugugucugguaacugugauguuguaauaggaauugucaacaacacaguuuaugauccuuugcaaccugaauuagacucauucaaggaggaguuagauaaauauuuuaagaaucauacaucaccagauguugauuuaggugacaucucuggcauuaaugcuucaguuguaaacauucaaaaagaaauugaccgccucaaugagguugccaagaauuuaaaugaaucucucaucgaucuccaagaacuuggaaaguaugagcaguauauaaaauggccaugguacauuuggcuagguuuuauagcuggcuugauugccauaguaauggugacaauuaugcuuugcuguaugaccaguugcuguaguugucucaagggcuguuguucuuguggauccugcugcaaauuugaugaagacgacucugagccagugcucaaaggagucaaauuacauuacacauaaggacuagucccuguucccagagcccacuuuuuuuucuuuuuuugaaauaaaauagccugucuuucagaucucaaaggcucuuuucagagccaccaaaaaaaaaaaaaaaaaaaaaaaaaaaaaaaaaaaaaaaaaaaaaaaaaaaaaaaaaaaaaaaaaaaaaaaaaaaaaaaaaaaaaaaaaaaaaaaaaaaaa

SEQ ID NO: 12221 - RNA, 4094 nt, Artificial Sequence
  SARS-CoV-2/Hong Kong/case85_VM20002868/2020__EPI_ISL_414519 spike protein mRNA wt (1-1273)
aggagagucccgcagucggcguccagcggcucugcuuguucgugugugugucguugcaggccuuauucaagcuuaccauguuuguuuuucuuguuuuagugccacuagucucuagucaguguguuaaucuuacaaccagaacucaauuacccccugcauacacuaauucuuucacacgugguguuuauuacccugacaaaguuuucagauccucaguuuuacauucaacucaggacuuguucuuaccuuucuuuuccaauguuacuugguuccaugcuauacaugucucugggaccaaugguacuaagagguuugauaacccuguccuaccauuuaaugaugguguuuauuuugcuuccacugagaagucuaacauaauaagaggcuggauuuuugguacuacuuuagauucgaagacccagucccuacuuauuguuaauaacgcuacuaauguuguuauuaaagucugugaauuucaauuuuguaaugauccauuuuuggguguuuauuaccacaaaaacaacaaaaguuggauggaaagugaguucagaguuuauucuagugcgaauaauugcacuuuugaauaugucucucagccuuuucuuauggaccuugaaggaaaacaggguaauuucaaaaaucuuagggaauuuguguuuaagaauauugaugguuauuuuaaaauauauucuaagcacacgccuauuaauuuagugcgugaucucccucaggguuuuucggcuuuagaaccauugguagauuugccaauagguauuaacaucacuagguuucaaacuuuacuugcuuuacauagaaguuauuugacuccuggugauucuucuucagguuggacagcuggugcugcagcuuauuauguggguuaucuucaaccuaggacuuuucuauuaaaauauaaugaaaauggaaccauuacagaugcuguagacugugcacuugacccucucucagaaacaaaguguacguugaaauccuucacuguagaaaaaggaaucuaucaaacuucuaacuuuagaguccaaccaacagaaucuauuguuagauuuccuaauauuacaaacuugugcccuuuuggugaaguuuuuaacgccaccagauuugcaucuguuuaugcuuggaacaggaagagaaucagcaacuguguugcugauuauucuguccuauauaauuccgcaucauuuuccacuuuuaaguguuauggagugucuccuacuaaauuaaaugaucucugcuuuacuaaugucuaugcagauucauuuguaauuagaggugaugaagucagacaaaucgcuccagggcaaacuggaaagauugcugauuauaauuauaaauuaccagaugauuuuacaggcugcguuauagcuuggaauucuaacaaucuugauucuaagguuggugguaauuauaauuaccuguauagauuguuuaggaagucuaaucucaaaccuuuugagagagauauuucaacugaaaucuaucaggccgguagcacaccuuguaaugguguugaagguuuuaauuguuacuuuccuuuacaaucauaugguuuccaacccacuaaugguguugguuaccaaccauacagaguaguaguacuuucuuuugaacuucuacaugcaccagcaacuguuuguggaccuaaaaagucuacuaauuugguuaaaaacaaaugugucaauuucaacuucaaugguuuaacaggcacagguguucuuacugagucuaacaaaaaguuucugccuuuccaacaauuuggcagagacauugcugacacuacugaugcuguccgugauccacagacacuugagauucuugacauuacaccauguucuuuugguggugucaguguuauaacaccaggaacaaauacuucuaaccagguugcuguucuuuaucaggauguuaacugcacagaagucccuguugcuauucaugcagaucaacuuacuccuacuuggcguguuuauucuacagguucuaauguuuuucaaacacgugcaggcuguuuaauaggggcugaacaugucaacaacucauaugagugugacauacccauuggugcagguauaugcgcuaguuaucagacucagacuaauucuccucggcgggcacguaguguagcuagucaauccaucauugccuacacuaugucacuuggugcagaaaauucaguugcuuacucuaauaacucuauugccauacccacaaauuuuacuauuaguguuaccacagaaauucuaccagugucuaugaccaagacaucaguagauuguacaauguacauuuguggugauucaacugaaugcagcaaucuuuuguugcaauauggcaguuuuuguacacaauuaaaccgugcuuuaacuggaauagcuguugaacaagacaaaaacacccaagaaguuuuugcacaagucaaacaaauuuacaaaacaccaccaauuaaagauuuuggugguuuuaauuuuucacaaauauuaccagauccaucaaaaccaagcaagaggucauuuauugaagaucuacuuuucaacaaagugacacuugcagaugcuggcuucaucaaacaauauggugauugccuuggugauauugcugcuagagaccucauuugugcacaaaaguuuaacggccuuacuguuuugccaccuuugcucacagaugaaaugauugcucaauacacuucugcacuguuagcggguacaaucacuucugguuggaccuuuggugcaggugcugcauuacaaauaccauuugcuaugcaaauggcuuauagguuuaaugguauuggaguuacacagaauguucucuaugagaaccaaaaauugauugccaaccaauuuaauagugcuauuggcaaaauucaagacucacuuucuuccacagcaagugcacuuggaaaacuucaagauguggucaaccaaaaugcacaagcuuuaaacacgcuuguuaaacaacuuagcuccaauuuuggugcaauuucaaguguuuuaaaugauauccuuucacgucuugacaaaguugaggcugaagugcaaauugauagguugaucacaggcagacuucaaaguuugcagacauaugugacucaacaauuaauuagagcugcagaaaucagagcuucugcuaaucuugcugcuacuaaaaugucagaguguguacuuggacaaucaaaaagaguugauuuuuguggaaagggcuaucaucuuauguccuucccucagucagcaccucaugguguagucuucuugcaugugacuuaugucccugcacaagaaaagaacuucacaacugcuccugccauuugucaugauggaaaagcacacuuuccucgugaaggugucuuuguuucaaauggcacacacugguuuguaacacaaaggaauuuuuaugaaccacaaaucauuacuacagacaacacauuugugucugguaacugugauguuguaauaggaauugucaacaacacaguuuaugauccuuugcaaccugaauuagacucauucaaggaggaguuagauaaauauuuuaagaaucauacaucaccagauguugauuuaggugacaucucuggcauuaaugcuucaguuguaaacauucaaaaagaaauugaccgccucaaugagguugccaagaauuuaaaugaaucucucaucgaucuccaagaacuuggaaaguaugagcaguauauaaaauggccaugguacauuuggcuagguuuuauagcuggcuugauugccauaguaauggugacaauuaugcuuugcuguaugaccaguugcuguaguugucucaagggcuguuguucuuguggauccugcugcaaauuugaugaagacgacucugagccagugcucaaaggagucaaauuacauuacacauaaggacuagucccuguucccagagcccacuuuuuuuucuuuuuuugaaauaaaauagccugucuuucagaucucaaaggcucuuuucagagccaccaaaaaaaaaaaaaaaaaaaaaaaaaaaaaaaaaaaaaaaaaaaaaaaaaaaaaaaaaaaaaaaaaaaaaaaaaaaaaaaaaaaaaaaaaaaaaaaaaaaaa

SEQ ID NO: 12222 - RNA, 4094 nt, Artificial Sequence
  SARS-CoV-2/England/200990660/2020__EPI_ISL_414523 spike protein mRNA wt (1-1273)
aggagagucccgcagucggcguccagcggcucugcuuguucgugugugugucguugcaggccuuauucaagcuuaccauguuuguuuuucuuguuuuauugccacuagucucuagucaguguguuaaucuuacaaccagaacucaauuacccccugcauacacuaauucuuucacacgugguguuuauuacccugacaaaguuuucagauccucaguuuuacauucaacucaggacuuguucuuaccuuucuuuuccaauguuacuugguuccaugcuauacaugucucugggaccaaugguacuaagagguuugauaacccuguccuaccauuuaaugaugguguuuauuuugcuuccacugagaagucuaacauaauaagaggcuggauuuuugguacuacuuuagauucgaagacccagucccuacuuauuguuaauaacgcuacuaauguuguuauuaaagucugugaauuucaauuuuguaaugauccauuuuuggguguuuauuaccacaaaaacaacaaaaguuggauggaaagugaguucagaguuuauucuagugcgaauaauugcacuuuugaauaugucucucagccuuuucuuauggaccuugaaggaaaacaggguaauuucaaaaaucuuagggaauuuguguuuaagaauauugaugguuauuuuaaaauauauucuaagcacacgccuauuaauuuagugcgugaucucccucaggguuuuucggcuuuagaaccauugguagauuugccaauagguauuaacaucacuagguuucaaacuuuacuugcuuuacauagaaguuauuugacuccuggugauucuucuucagguuggacagcuggugcugcagcuuauuauguggguuaucuucaaccuaggacuuuucuauuaaaauauaaugaaaauggaaccauuacagaugcuguagacugugcacuugacccucucucagaaacaaaguguacguugaaauccuucacuguagaaaaaggaaucuaucaaacuucuaacuuuagaguccaaccaacagaaucuauuguuagauuuccuaauauuacaaacuugugcccuuuuggugaaguuuuuaacgccaccagauuugcaucuguuuaugcuuggaacaggaagagaaucagcaacuguguugcugauuauucuguccuauauaauuccgcaucauuuuccacuuuuaaguguuauggagugucuccuacuaaauuaaaugaucucugcuuuacuaaugucuaugcagauucauuuguaauuagaggugaugaagucagacaaaucgcuccagggcaaacuggaaagauugcugauuauaauuauaaauuaccagaugauuuuacaggcugcguuauagcuuggaauucuaacaaucuugauucuaagguuggugguaauuauaauuaccuguauagauuguuuaggaagucuaaucucaaaccuuuugagagagauauuucaacugaaaucuaucaggccgguagcacaccuuguaaugguguugaagguuuuaauuguuacuuuccuuuacaaucauaugguuuccaacccacuaaugguguugguuaccaaccauacagaguaguaguacuuucuuuugaacuucuacaugcaccagcaacuguuuguggaccuaaaaagucuacuaauuugguuaaaaacaaaugugucaauuucaacuucaaugguuuaacaggcacagguguucuuacugagucuaacaaaaaguuucugccuuuccaacaauuuggcagagacauugcugacacuacugaugcuguccgugauccacagacacuugagauucuugacauuacaccauguucuuuugguggugucaguguuauaacaccaggaacaaauacuucuaaccagguugcuguucuuuaucaggguguuaacugcacagaagucccuguugcuauucaugcagaucaacuuacuccuacuuggcguguuuauucuacagguucuaauguuuuucaaacacgugcaggcuguuuaauaggggcugaacaugucaacaacucauaugagugugacauacccauuggugcagguauaugcgcuaguuaucagacucagacuaauucuccucggcgggcacguaguguagcuagucaauccaucauugccuacacuaugucacuuggugcagaaaauucaguugcuuacucuaauaacucuauugccauacccacaaauuuuacuauuaguguuaccacagaaauucuaccagugucuaugaccaagacaucaguagauuguacaauguacauuuguggugauucaacugaaugcagcaaucuuuuguugcaauauggcaguuuuuguacacaauuaaaccgugcuuuaacuggaauagcuguugaacaagacaaaaacacccaagaaguuuuugcacaagucaaacaaauuuacaaaacaccaccaauuaaagauuuuggugguuuuaauuuuucacaaauauuaccagauccaucaaaaccaagcaagaggucauuuauugaagaucuacuuuucaacaaagugacacuugcagaugcuggcuucaucaaacaauauggugauugccuuggugauauugcugcuagagaccucauuugugcacaaaaguuuaacggccuuacuguuuugccaccuuugcucacagaugaaaugauugcucaauacacuucugcacuguuagcggguacaaucacuucugguuggaccuuuggugcaggugcugcauuacaaauaccauuugcuaugcaaauggcuuauagguuuaaugguauuggaguuacacagaauguucucuaugagaaccaaaaauugauugccaaccaauuuaauagugcuauuggcaaaauucaagacucacuuucuuccacagcaagugcacuuggaaaacuucaagauguggucaaccaaaaugcacaagcuuuaaacacgcuuguuaaacaacuuagcuccaauuuuggugcaauuucaaguguuuuaaaugauauccuuucacgucuugacaaaguugaggcugaagugcaaauugauagguugaucacaggcagacuucaaaguuugcagacauaugugacucaacaauuaauuagagcugcagaaaucagagcuucugcuaaucuugcugcuacuaaaaugucagaguguguacuuggacaaucaaaaagaguugauuuuuguggaaagggcuaucaucuuauguccuucccucagucagcaccucaugguguagucuucuugcaugugacuuaugucccugcacaagaaaagaacuucacaacugcuccugccauuugucaugauggaaaagcacacuuuccucgugaaggugucuuuguuucaaauggcacacacugguuuguaacacaaaggaauuuuuaugaaccacaaaucauuacuacagacaacacauuugugucugguaacugugauguuguaauaggaauugucaacaacacaguuuaugauccuuugcaaccugaauuagacucauucaaggaggaguuagauaaauauuuuaagaaucauacaucaccagauguugauuuaggugacaucucuggcauuaaugcuucaguuguaaacauucaaaaagaaauugaccgccucaaugagguugccaagaauuuaaaugaaucucucaucgaucuccaagaacuuggaaaguaugagcaguauauaaaauggccaugguacauuuggcuagguuuuauagcuggcuugauugccauaguaauggugacaauuaugcuuugcuguaugaccaguugcuguaguugucucaagggcuguuguucuuguggauccugcugcaaauuugaugaagacgacucugagcuagugcucaaaggagucaaauuacauuacacauaaggacuagucccuguucccagagcccacuuuuuuuucuuuuuuugaaauaaaauagccugucuuucagaucucaaaggcucuuuucagagccaccaaaaaaaaaaaaaaaaaaaaaaaaaaaaaaaaaaaaaaaaaaaaaaaaaaaaaaaaaaaaaaaaaaaaaaaaaaaaaaaaaaaaaaaaaaaaaaaaaaaaa

SEQ ID NO: 12223 - RNA, 4094 nt, Artificial Sequence
  SARS-CoV-2/Australia/NSW09/2020__EPI_ISL_413595 spike protein mRNA wt (1-1273)
aggagagucccgcagucggcguccagcggcucugcuuguucgugugugugucguugcaggccuuauucaagcuuaccauguuuguuuuucuuguuuuauugccacuagucucuagucaguguguuaaucuuacaaccagaacucaauuacccccugcauacacuaauucuuucacacgugguguuuauuacccugacaaaguuuucagauccucaguuuuacauucaacucaggacuuguucuuaccuuucuuuuccaauguuacuugguuccaugcuauacaugucucugggaccaaugguacuaagagguuugauaacccuguccuaccauuuaaugaugguguuuauuuugcuuccacugagaagucuaacauaauaagaggcuggauuuuugguacuacuuuagauucgaagacccagucccuacuuauuguuaauaacgcuacuaauguuguuauuaaagucugugaauuucaauuuuguaaugauccauuuuuggguguuuauuaccacaaaaacaacaaaaguuggauggaaagugaguucagaguuuauucuagugcgaauaauugcacuuuugaauaugucucucagccuuuucuuauggaccuugaaggaaaacaggguaauuucaaaaaucuuagggaauuuguguuuaagaauauugaugguuauuuuaaaauauauucuaagcacacgccuauuaauuuagugcgugaucucccucaggguuuuucggcuuuagaaccauugguagauuugccaauagguauuaacaucacuagguuucaaacuuuacuugcuuuacauagaaguuauuugacuccuggugauucuucuucagguuggacagcuggugcugcagcuuauuauguggguuaucuucaaccuaggacuuuucuauuaaaauauaaugaaaauggaaccauuacagaugcuguagacugugcacuugacccucucucagaaacaaaguguacguugaaauccuucacuguagaaaaaggaaucuaucaaacuucuaacuuuagaguccaaccaacagaaucuauuguuagauuuccuaauauuacaaacuugugcccuuuuggugaaguuuuuaacgccaccagauuugcaucuguuuaugcuuggaacaggaagagaaucagcaacuguguugcugauuauucuguccuauauaauuccgcaucauuuuccacuuuuaaguguuauggagugucuccuacuaaauuaaaugaucucugcuuuacuaaugucuaugcagauucauuuguaauuagaggugaugaagucagacaaaucgcuccagggcaaacuggaaagauugcugauuauaauuauaaauuaccagaugauuuuacaggcugcguuauagcuuggaauucuaacaaucuugauucuaagguuggugguaauuauaauuaccuguauagauuguuuaggaagucuaaucucaaaccuuuugagagagauauuucaacugaaaucuaucaggccgguagcacaccuuguaaugguguugaagguuuuaauuguuacuuuccuuuacaaucauaugguuuccaacccacuaaugguguugguuaccaaccauacagaguaguaguacuuucuuuugaacuucuacaugcaccagcaacuguuuguggaccuaaaaagucuacuaauuugguuaaaaacaaaugugucaauuucaacuucaaugguuuaacaggcacagguguucuuacugagucuaacaaaaaguuucugccuuuccaacaauuuggcagagacauugcugacacuacugaugcuguccgugauccacagacacuugagauucuugacauuacaccauguucuuuugguggugucaguguuauaacaccaggaacaaauacuucuaaccagguugcuguucuuuaucaggauguuaacugcacagaagucccuguugcuauucaugcagaucaacuuacuccuacuuggcguguuuauucuacagguucuaauguuuuucaaacacgugcaggcuguuuaauaggggcugaacaugucaacaacucauaugagugugacauacccauuggugcagguauaugcgcuaguuaucagacucagacuaauucuccucggcgggcacguaguguagcuagucaauccaucauugccuacacuaugucacuuggugcagaaaauucaguugcuuacucuaauaacucuauugccauacccacaaauuuuacuauuaguguuaccacagaaauucuaccagugucuaugaccaagacaucaguagauuguacaauguacauuuguggugauucaacugaaugcagcaaucuuuuguugcaauauggcaguuuuuguacacaauuaaaccgugcuuuaacuggaauagcuguugaacaagacaaaaacacccaagaaguuuuugcacaagucaaacaaauuuacaaaacaccaccaauuaaagauuuuggugguuuuaauuuuucacaaauauuaccagauccaucaaaaccaagcaagaggucauuuauugaagaucuacuuuucaacaaagugacacuugcagaugcuggcuucaucaaacaauauggugauugccuuggugauauugcugcuagagaccucauuugugcacaaaaguuuaacggccuuacuguuuugccaccuuugcucacagaugaaaugauugcucaauacacuucugcacuguuagcggguacaaucacuucugguuggaccuuuggugcaggugcugcauuacaaauaccauuugcuaugcaaauggcuuauagguuuaaugguauuggaguuacacagaauguucucuaugagaaccaaaaauugauugccaaccaauuuaauagugcuauuggcaaaauucaagacucacuuucuuucacagcaagugcacuuggaaaacuucaagauguggucaaccaaaaugcacaagcuuuaaacacgcuuguuaaacaacuuagcuccaauuuuggugcaauuucaaguguuuuaaaugauauccuuucacgucuugacaaaguugaggcugaagugcaaauugauagguugaucacaggcagacuucaaaguuugcagacauaugugacucaacaauuaauuagagcugcagaaaucagagcuucugcuaaucuugcugcuacuaaaaugucagaguguguacuuggacaaucaaaaagaguugauuuuuguggaaagggcuaucaucuuauguccuucccucagucagcaccucaugguguagucuucuugcaugugacuuaugucccugcacaagaaaagaacuucacaacugcuccugccauuugucaugauggaaaagcacacuuuccucgugaaggugucuuuguuucaaauggcacacacugguuuguaacacaaaggaauuuuuaugaaccacaaaucauuacuacagacaacacauuugugucugguaacugugauguuguaauaggaauugucaacaacacaguuuaugauccuuugcaaccugaauuagacucauucaaggaggaguuagauaaauauuuuaagaaucauacaucaccagauguugauuuaggugacaucucuggcauuaaugcuucaguuguaaacauucaaaaagaaauugaccgccucaaugagguugccaagaauuuaaaugaaucucucaucgaucuccaagaacuuggaaaguaugagcaguauauaaaauggccaugguacauuuggcuagguuuuauagcuggcuugauugccauaguaauggugacaauuaugcuuugcuguaugaccaguugcuguaguugucucaagggcuguuguucuuguggauccugcugcaaauuugaugaagacgacucugagccagugcucaaaggagucaaauuacauuacacauaaggacuagucccuguucccagagcccacuuuuuuuucuuuuuuugaaauaaaauagccugucuuucagaucucaaaggcucuuuucagagccaccaaaaaaaaaaaaaaaaaaaaaaaaaaaaaaaaaaaaaaaaaaaaaaaaaaaaaaaaaaaaaaaaaaaaaaaaaaaaaaaaaaaaaaaaaaaaaaaaaaaaa

SEQ ID NO: 12224 - RNA, 4094 nt, Artificial Sequence
  SARS-CoV-2/Australia/NSW10/2020__EPI_ISL_413596 spike protein mRNA wt (1-1273)
aggagagucccgcagucggcguccagcggcucugcuuguucgugugugugucguugcaggccuuauucaagcuuaccauguuuguuuuucuuguuuuauugccacuagucucuagucaguguguuaaucuuacaaccagaacucaauuacccccugcauacacuaauucuuucacacgugguguuuauuacccugacaaaguuuucagauccucaguuuuacauucaacucaggacuuguucuuaccuuucuuuuccaauguuacuugguuccaugcuauacaugucucugggaccaaugguacuaagagguuugauaacccuguccuaccauuuaaugaugguguuuauuuugcuuccacugagaagucuaacauaauaagaggcuggauuuuugguacuacuuuagauucgaagacccagucccuacuuauuguuaauaacgcuacuaauguuguuauuaaagucugugaauuucaauuuuguaaugauccauuuuuggguguuuauuaccacaaaaacaacaaaaguuggauggaaagugaguucagaguuuauucuagugcgaauaauugcacuuuugaauaugucucucagccuuuucuuauggaccuugaaggaaaacaggguaauuucaaaaaucuuagggaauuuguguuuaagaauauugaugguuauuuuaaaauauauucuaagcacacgccuauuaauuuagugcgugaucucccucaggguuuuucggcuuuagaaccauugguagauuugccaauagguauuaacaucacuagguuucaaacuuuacuugcuuuacauagaaguuauuugacuccuggugauucuucuucagguuggacagcuggugcugcagcuuauuauguggguuaucuucaaccuaggacuuuucuauuaaaauauaaugaaaauggaaccauuacagaugcuguagacugugcacuugacccucucucagaaacaaaguguacguugaaauccuucacuguagaaaaaggaaucuaucaaacuucuaacuuuagaguccaaccaacagaaucuauuguuagauuuccuaauauuacaaacuugugcccuuuuggugaaguuuuuaacgccaccagauuugcaucuguuuaugcuuggaacaggaagagaaucagcaacuguguugcugauuauucuguccuauauaauuccgcaucauuuuccacuuuuaaguguuauggagugucuccuacuaaauuaaaugaucucugcuuuacuaaugucuaugcagauucauuuguaauuagaggugaugaagucagacaaaucgcuccagggcaaacuggaaagauugcugauuauaauuauaaauuaccagaugauuuuacaggcugcguuauagcuuggaauucuaacaaucuugauucuaagguuggugguaauuauaauuaccuguauagauuguuuaggaagucuaaucucaaaccuuuugagagagauauuucaacugaaaucuaucaggccgguagcacaccuuguaaugguguugaagguuuuaauuguuacuuuccuuuacaaucauaugguuuccaacccacuaaugguguugguuaccaaccauacagaguaguaguacuuucuuuugaacuucuacaugcaccagcaacuguuuguggaccuaaaaagucuacuaauuugguuaaaaacaaaugugucaauuucaacuucaaugguuuaacaggcacagguguucuuacugagucuaacaaaaaguuucugccuuuccaacaauuuggcagagacauugcugacacuacugaugcuguccgugauccacagacacuugagauucuugacauuacaccauguucuuuugguggugucaguguuauaacaccaggaacaaauacuucuaaccagguugcuguucuuuaucaggauguuaacugcacagaagucccuguugcuauucaugcagaucaacuuacuccuacuuggcguguuuauucuacagguucuaauguuuuucaaacacgugcaggcuguuuaauaggggcugaacaugucaacaacucauaugagugugacauacccauuggugcagguauaugcgcuaguuaucagacucagacuaauucuccucggcgggcacguaguguagcuagucaauccaucauugccuacacuaugucacuuggugcagaaaauucaguugcuuacucuaauaacucuauugccauacccacaaauuuuacuauuaguguuaccacagaaauucuaccagugucuaugaccaagacaucaguagauuguacaauguacauuuguggugauucaacugaaugcagcaaucuuuuguugcaauauggcaguuuuuguacacaauuaaaccgugcuuuaacuggaauagcuguugaacaagacaaaaacacccaagaaguuuuugcacaagucaaacaaauuuacaaaacaccaccaauuaaagauuuuggugguuuuaauuuuucacaaauauuaccagauccaucaaaaccaagcaagaggucauuuauugaagaucuacuuuucaacaaagugacacuugcagaugcuggcuucaucaaacaauauggugauugccuuggugauauugcugcuagagaccucauuugugcacaaaaguuuaacggccuuacuguuuugccaccuuugcucacagaugaaaugauugcucaauacacuucugcacuguuagcggguacaaucacuucugguuggaccuuuggugcaggugcugcauuacaaauaccauuugcuaugcaaauggcuuauagguuuaaugguauuggaguuacacagaauguucucuaugagaaccaaaaauugauugccaaccaauuuaauagugcuauuggcaaaauucaagacucacuuucuuccacagcaagugcacuuggaaaacuucaagauguggucaaccaaaaugcacaagcuuuaaacacgcuuguuaaacaacuuagcuccaauuuuggugcaauuucaaguguuuuaaaugauauccuuucacgucuugacaaaguugaggcugaagugcaaauugauagguugaucacaggcagacuucaaaguuugcagacauaugugacucaacaauuaauuagagcugcagaaaucagagcuucugcuaaucuugcugcuacuaaaaugucagaguguguacuuggacaaucaaaaagaguugauuuuuguggaaagggcuaucaucuuauguccuucccucagucagcaccucaugguguagucuucuugcaugugacuuaugucccugcacaagaaaagaacuucacaacugcuccugccauuugucaugauggaaaagcacacuuuccucgugaaggugucuuuguuucaaauggcacacacugguuuguaacacaaaggaauuuuuaugaaccacaaaucauuacuacagacaacacauuugugucugguaacugugauguuguaauaggaauugucaacaacacaguuuaugauccuuugcaaccugaauuagacucauucaaggaggaguuagauaaauauuuuaagaaucauacaucaccagauguugauuuaggugacaucucuggcauuaaugcuucaguuguaaacauucaaaaagaaauugaccgccucaaugagguugccaagaauuuaaaugaaucucucaucgaucuccaagaacuuggaaaguaugagcaguauauaaaauggccaugguacauuuggcuagguuuuauagcuggcuugauugccauaguaauggugacaauuaugcuuugcuguaugaccaguugcuguaguugucucaagggcuguuguucuuguggauccugcuucaaauuugaugaagacgacucugagccagugcucaaaggagucaaauuacauuacacauaaggacuagucccuguucccagagcccacuuuuuuuucuuuuuuugaaauaaaauagccugucuuucagaucucaaaggcucuuuucagagccaccaaaaaaaaaaaaaaaaaaaaaaaaaaaaaaaaaaaaaaaaaaaaaaaaaaaaaaaaaaaaaaaaaaaaaaaaaaaaaaaaaaaaaaaaaaaaaaaaaaaaa

SEQ ID NO: 12225 - RNA, 4094 nt, Artificial Sequence
  SARS-CoV-2/Switzerland/1000477797/2020__EPI_ISL_413023 spike protein mRNA wt (1-1273)
aggagagucccgcagucggcguccagcggcucugcuuguucgugugugugucguugcaggccuuauucaagcuuaccauguuuguuuuucuuguuuuauugccacuagucucuagucaguguguuaaucuuacaaccagaacucaauuacccccugcauacacuaauucuuucacacgugguguuuauuacccugacaaaguuuucagauccucaguuuuacauucaacucaggacuuguucuuaccuuucuuuuccaauguuacuugguuccaugcuauacaugucucugggaccaaugguacuaagagguuugauaacccuguccuaccauuuaaugaugguguuuauuuugcuuccacugagaagucuaacauaauaagaggcuggauuuuugguacuacuuuagauucgaagacccagucccuacuuauuguuaauaacgcuacuaauguuguuauuaaagucugugaauuucaauuuuguaaugauccauuuuuggguguuuauuaccacaaaaacaacaaaaguuggauggaaagugaguucagaguuuauucuagugcgaauaauugcacuuuugaauaugucucucagccuuuucuuauggaccuugaaggaaaacaggguaauuucaaaaaucuuagggaauuuguguuuaagaauauugaugguuauuuuaacauauauucuaagcacacgccuauuaauuuagugcgugaucucccucaggguuuuucggcuuuagaaccauugguagauuugccaauagguauuaacaucacuagguuucaaacuuuacuugcuuuacauagaaguuauuugacuccuggugauucuucuucagguuggacagcuggugcugcagcuuauuauguggguuaucuucaaccuaggacuuuucuauuaaaauauaaugaaaauggaaccauuacagaugcuguagacugugcacuugacccucucucagaaacaaaguguacguugaaauccuucacuguagaaaaaggaaucuaucaaacuucuaacuuuagaguccaaccaacagaaucuauuguuagauuuccuaauauuacaaacuugugcccuuuuggugaaguuuuuaacgccaccagauuugcaucuguuuaugcuuggaacaggaagagaaucagcaacuguguugcugauuauucuguccuauauaauuccgcaucauuuuccacuuuuaaguguuauggagugucuccuacuaaauuaaaugaucucugcuuuacuaaugucuaugcagauucauuuguaauuagaggugaugaagucagacaaaucgcuccagggcaaacuggaaagauugcugauuauaauuauaaauuaccagaugauuuuacaggcugcguuauagcuuggaauucuaacaaucuugauucuaagguuggugguaauuauaauuaccuguauagauuguuuaggaagucuaaucucaaaccuuuugagagagauauuucaacugaaaucuaucaggccgguagcacaccuuguaaugguguugaagguuuuaauuguuacuuuccuuuacaaucauaugguuuccaacccacuaaugguguugguuaccaaccauacagaguaguaguacuuucuuuugaacuucuacaugcaccagcaacuguuuguggaccuaaaaagucuacuaauuugguuaaaaacaaaugugucaauuucaacuucaaugguuuaacaggcacagguguucuuacugagucuaacaaaaaguuucugccuuuccaacaauuuggcagagacauugcugacacuacugaugcuguccgugauccacagacacuugagauucuugacauuacaccauguucuuuugguggugucaguguuauaacaccaggaacaaauacuucuaaccagguugcuguucuuuaucaggguguuaacugcacagaagucccuguugcuauucaugcagaucaacuuacuccuacuuggcguguuuauucuacagguucuaauguuuuucaaacacgugcaggcuguuuaauaggggcugaacaugucaacaacucauaugagugugacauacccauuggugcagguauaugcgcuaguuaucagacucagacuaauucuccucggcgggcacguaguguagcuagucaauccaucauugccuacacuaugucacuuggugcagaaaauucaguugcuuacucuaauaacucuauugccauacccacaaauuuuacuauuaguguuaccacagaaauucuaccagugucuaugaccaagacaucaguagauuguacaauguacauuuguggugauucaacugaaugcagcaaucuuuuguugcaauauggcaguuuuuguacacaauuaaaccgugcuuuaacuggaauagcuguugaacaagacaaaaacacccaagaaguuuuugcacaagucaaacaaauuuacaaaacaccaccaauuaaagauuuuggugguuuuaauuuuucacaaauauuaccagauccaucaaaaccaagcaagaggucauuuauugaagaucuacuuuucaacaaagugacacuugcagaugcuggcuucaucaaacaauauggugauugccuuggugauauugcugcuagagaccucauuugugcacaaaaguuuaacggccuuacuguuuugccaccuuugcucacagaugaaaugauugcucaauacacuucugcacuguuagcggguacaaucacuucugguuggaccuuuggugcaggugcugcauuacaaauaccauuugcuaugcaaauggcuuauagguuuaaugguauuggaguuacacagaauguucucuaugagaaccaaaaauugauugccaaccaauuuaauagugcuauuggcaaaauucaagacucacuuucuuccacagcaagugcacuuggaaaacuucaagauguggucaaccaaaaugcacaagcuuuaaacacgcuuguuaaacaacuuagcuccaauuuuggugcaauuucaaguguuuuaaaugauauccuuucacgucuugacaaaguugaggcugaagugcaaauugauagguugaucacaggcagacuucaaaguuugcagacauaugugacucaacaauuaauuagagcugcagaaaucagagcuucugcuaaucuugcugcuacuaaaaugucagaguguguacuuggacaaucaaaaagaguugauuuuuguggaaagggcuaucaucuuauguccuucccucagucagcaccucaugguguagucuucuugcaugugacuuaugucccugcacaagaaaagaacuucacaacugcuccugccauuugucaugauggaaaagcacacuuuccucgugaaggugucuuuguuucaaauggcacacacugguuuguaacacaaaggaauuuuuaugaaccacaaaucauuacuacagacaacacauuugugucugguaacugugauguuguaauaggaauugucaacaacacaguuuaugauccuuugcaaccugaauuagacucauucaaggaggaguuagauaaauauuuuaagaaucauacaucaccagauguugauuuaggugacaucucuggcauuaaugcuucaguuguaaacauucaaaaagaaauugaccgccucaaugagguugccaagaauuuaaaugaaucucucaucgaucuccaagaacuuggaaaguaugagcaguauauaaaauggccaugguacauuuggcuagguuuuauagcuggcuugauugccauaguaauggugacaauuaugcuuugcuguaugaccaguugcuguaguugucucaagggcuguuguucuuguggauccugcugcaaauuugaugaagacgacucugagccagugcucaaaggagucaaauuacauuacacauaaggacuagucccuguucccagagcccacuuuuuuuucuuuuuuugaaauaaaauagccugucuuucagaucucaaaggcucuuuucagagccaccaaaaaaaaaaaaaaaaaaaaaaaaaaaaaaaaaaaaaaaaaaaaaaaaaaaaaaaaaaaaaaaaaaaaaaaaaaaaaaaaaaaaaaaaaaaaaaaaaaaaa

SEQ ID NO: 12226 - RNA, 4094 nt, Artificial Sequence
  SARS-CoV-2/Belgium/BA-02291/2020__EPI_ISL_415159 spike protein mRNA wt (1-1273)
aggagagucccgcagucggcguccagcggcucugcuuguucgugugugugucguugcaggccuuauucaagcuuaccauguuuguuuuucuuguuuuauugccacuagucucuagucaguguguuaaucuuacaaccagaacucaauuacccccugcauacacuaauucuuucacacgugguguuuauuacccugacaaaguuuucagauccucaguuuuacauucaacucaggacuuguucuuaccuuucuuuuccaauguuacuugguuccaugcuauacaugucucugggaccaaugguacuaagagguuugauaacccuguccuaccauuuaaugaugguguuuauuuugcuuccacugagaagucuaacauaauaagaggcuggauuuuugguacuacuuuagauucgaagacccagucccuacuuauuguuaauaacgcuacuaauguuguuauuaaagucugugaauuucaauuuuguaaugauccauuuuuggguguuuauuaccacaaaaacaacaaaaguuggauggaaagugaguucagaguuuauucuagugcgaauaauugcacuuuugaauaugucucucagccuuuucuuauggaccuugaaggaaaacaggguaauuucaaaaaucuuagggaauuuguguuuaagaauauugaugguuauuuuaaaauauauucuaagcacacgccuauuaauuuagugcgugaucucccucaggguuuuucggcuuuagaaccauugguagauuugccaauagguauuaacaucacuagguuucaaacuuuacuugcuuuacauagaaguuauuugacuccuggugauucuucuucagguuggacagcuggugcugcagcuuauuauguggguuaucuucaaccuaggacuuuucuauuaaaauauaaugaaaauggaaccauuacagaugcuguagacugugcacuugacccucucucagaaacaaaguguacguugaaauccuucacuguagaaaaaggaaucuaucaaacuucuaacuuuagaguccaaccaacagaaucuauuguuagauuuccuaauauuacaaacuugugcccuuuuggugaaguuuuuaacgccaccagauuugcaucuguuuaugcuuggaacaggaagagaaucagcaacuguguugcugauuauucuguccuauauaauuccgcaucauuuuccacuuuuaaguguuauggagugucuccuacuaaauuaaaugaucucugcuuuacuaaugucuaugcagauucauuuguaauuagaggugaugaagucagacaaaucgcuccagggcaaacuggaaagauugcugauuauaauuauaaauuaccagaugauuuuacaggcugcguuauagcuuggaauucuaacaaucuugauucuaagguuggugguaauuauaauuaccuguauagauuguuuaggaggucuaaucucaaaccuuuugagagagauauuucaacugaaaucuaucaggccgguagcacaccuuguaaugguguugaagguuuuaauuguuacuuuccuuuacaaucauaugguuuccaacccacuaaugguguugguuaccaaccauacagaguaguaguacuuucuuuugaacuucuaccugcaccagcaacuguuuguggaccuaaaaagucuacuaauuugguuaaaaacaaaugugucaauuucaacuucaaugguuuaacaggcacagguguucuuacugagucuaacaaaaaguuucugccuuuccaacaauuuggcagagacauugcugacacuacugaugcuguccgugauccacagacacuugagauucuugacauuacaccauguucuuuugguggugucaguguuauaacaccaggaacaaauacuucuaaccagguugcuguucuuuaucaggguguuaacugcacagaagucccuguugcuauucaugcagaucaacuuacuccuacuuggcguguuuauucuacagguucuaauguuuuucaaacacgugcaggcuguuuaauaggggcugaacaugucaacaacucauaugagugugacauacccauuggugcagguauaugcgcuaguuaucagacucagacuaauucuccucggcgggcacguaguguagcuagucaauccaucauugccuacacuaugucacuuggugcagaaaauucaguugcuuacucuaauaacucuauugccauacccacaaauuuuacuauuaguguuaccacagaaauucuaccagugucuaugaccaagacaucaguagauuguacaauguacauuuguggugauucaacugaaugcagcaaucuuuuguugcaauauggcaguuuuuguacacaauuaaaccgugcuuuaacuggaauagcuguugaacaagacaaaaacacccaagaaguuuuugcacaagucaaacaaauuuacaaaacaccaccaauuaaagauuuuggugguuuuaauuuuucacaaauauuaccagauccaucaaaaccaagcaagaggucauuuauugaagaucuacuuuucaacaaagugacacuugcagaugcuggcuucaucaaacaauauggugauugccuuggugauauugcugcuagagaccucauuugugcacaaaaguuuaacggccuuacuguuuugccaccuuugcucacagaugaaaugauugcucaauacacuucugcacuguuagcggguacaaucacuucugguuggaccuuuggugcaggugcugcauuacaaauaccauuugcuaugcaaauggcuuauagguuuaaugguauuggaguuacacagaauguucucuaugagaaccaaaaauugauugccaaccaauuuaauagugcuauuggcaaaauucaagacucacuuucuucugcagcaccugcacuuggaaaacuucaagauguggucaaccaaaaugcacaagcuuuaaacacgcuuguuaaacaacuuagcuccaauuuuggugcaauuucaaguguuuuaaaugauauccuuucacgucuugacaaaguugaggcugaagugcaaauugauagguugaucacaggcagacuucaaaguuugcagacauaugugacucaacaauuaauuagagcugcagaaaucagagcuucugcuaaucuugcugcuacuaaaaugucagaguguguacuuggacaaucaaaaagaguugauuuuuguggaaagggcuaucaucuuauguccuucccucagucagcaccucaugguguagucuucuugcaugugacuuaugucccugcacaagaaaagaacuucacaacugcuccugccauuugucaugauggaaaagcacacuuuccucgugaaggugucuuuguuucaaauggcacacacugguuuguaacacaaaggaauuuuuaugaaccacaaaucauuacuacagacaacacauuugugucugguaacugugauguuguaauaggaauugucaacaacacaguuuaugauccuuugcaaccugaauuagacucauucaaggaggaguuagauaaauauuuuaagaaucauacaucaccagauguugauuuaggugacaucucuggcauuaaugcuucaguuguaaacauucaaaaagaaauugaccgccucaaugagguugccaagaauuuaaaugaaucucucaucgaucuccaagaacuuggaaaguaugagcaguauauaaaauggccaugguacauuuggcuagguuuuauagcuggcuugauugccauaguaauggugacaauuaugcuuugcuguaugaccaguugcuguaguugucucaagggcuguuguucuuguggauccugcugcaaauuugaugaagacgacucugagccagugcucaaaggagucaaauuacauuacacauaaggacuagucccuguucccagagcccacuuuuuuuucuuuuuuugaaauaaaauagccugucuuucagaucucaaaggcucuuuucagagccaccaaaaaaaaaaaaaaaaaaaaaaaaaaaaaaaaaaaaaaaaaaaaaaaaaaaaaaaaaaaaaaaaaaaaaaaaaaaaaaaaaaaaaaaaaaaaaaaaaaaaa

SEQ ID NO: 12227 - RNA, 4094 nt, Artificial Sequence
  SARS-CoV-2/USA/WA8-UW5/2020__EPI_ISL_413486 spike protein mRNA wt (1-1273)
aggagagucccgcagucggcguccagcggcucugcuuguucgugugugugucguugcaggccuuauucaagcuuaccauguuuguuuuucuuguuuuauugccacuagucucuagucaguguguuaaucuuacaaccagaacucaauuacccccugcauacacuaauucuuucacacgugguguuuauuacccugacaaaguuuucagauccucaguuuuacauucaacucaggacuuguucuuaccuuucuuuuccaauguuacuugguuccaugcuauacaugucucugggaccaaugguacuaagagguuugauaacccuguccuaccauuuaaugaugguguuuauuuugcuuccacugagaagucuaacauaauaagaggcuggauuuuugguacuacuuuagauucgaagacccagucccuacuuauuguuaauaacgcuacuaauguuguuauuaaagucugugaauuucaauuuuguaaugauccauuuuuggguguuuauuaccacaaaaacaacaaaaguuggauggaaagugaguucagaguuuauucuagugcgaauaauugcacuuuugaauaugucucucagccuuuucuuauggaccuugaaggaaaacaggguaauuucaaaaaucuuagggaauuuguguuuaagaauauugaugguuauuuuaaaauauauucuaagcacacgccuauuaauuuagugcgugaucucccucaggguuuuucggcuuuagaaccauugguagauuugccaauagguauuaacaucacuagguuucaaacuuuacuugcuuuacauagaaguuauuugacuccuggugauucuucuucagguuggacagcuggugcugcagcuuauuauguggguuaucuucaaccuaggacuuuucuauuaaaauauaaugaaaauggaaccauuacagaugcuguagacugugcacuugacccucucucagaaacaaaguguacguugaaauccuucacuguagaaaaaggaaucuaucaaacuucuaacuuuagaguccaaccaacagaaucuauuguuagauuuccuaauauuacaaacuugugcccuuuuggugaaguuuuuaacgccaccagauuugcaucuguuuaugcuuggaacaggaagagaaucagcaacuguguugcugauuauucuguccuauauaauuccgcaucauuuuccacuuuuaaguguuauggagugucuccuacuaaauuaaaugaucucugcuuuacuaaugucuaugcagauucauuuguaauuagaggugaugaagucagacaaaucgcuccagggcaaacuggaaagauugcugauuauaauuauaaauuaccagaugauuuuacaggcugcguuauagcuuggaauucuaacaaucuugauucuaagguuggugguaauuauaauuaccuguauagauuguuuaggaagucuaaucucaaaccuuuugagagagauauuucaacugaaaucuaucaggccgguagcacaccuuguaaugguguugaagguuuuaauuguuacuuuccuuuacaaucauaugguuuccaacccacuaaugguguugguuaccaaccauacagaguaguaguacuuucuuuugaacuucuacaugcaccagcaacuguuuguggaccuaaaaagucuacuaauuugguuaaaaacaaaugugucaauuucaacuucaaugguuuaacaggcacagguguucuuacugagucuaacaaaaaguuucugccuuuccaacaauuuggcagagacauugcugacacuacugaugcuguccgugauccacagacacuugagauucuugacauuacaccauguucuuuugguggugucaguguuauaacaccaggaacaaauacuucuaaccagguugcuguucuuuaucaggauguuaacugcacagaagucccuguugcuauucaugcagaucaacuuacuccuacuuggcguguuuauucuacagguucuaauguuuuucaaacacgugcaggcuguuuaauaggggcugaauaugucaacaacucauaugagugugacauacccauuggugcagguauaugcgcuaguuaucagacucagacuaauucuccucggcgggcacguaguguagcuagucaauccaucauugccuacacuaugucacuuggugcagaaaauucaguugcuuacucuaauaacucuauugccauacccacaaauuuuacuauuaguguuaccacagaaauucuaccagugucuaugaccaagacaucaguagauuguacaauguacauuuguggugauucaacugaaugcagcaaucuuuuguugcaauauggcaguuuuuguacacaauuaaaccgugcuuuaacuggaauagcuguugaacaagacaaaaacacccaagaaguuuuugcacaagucaaacaaauuuacaaaacaccaccaauuaaagauuuuggugguuuuaauuuuucacaaauauuaccagauccaucaaaaccaagcaagaggucauuuauugaagaucuacuuuucaacaaagugacacuugcagaugcuggcuucaucaaacaauauggugauugccuuggugauauugcugcuagagaccucauuugugcacaaaaguuuaacggccuuacuguuuugccaccuuugcucacagaugaaaugauugcucaauacacuucugcacuguuagcggguacaaucacuucugguuggaccuuuggugcaggugcugcauuacaaauaccauuugcuaugcaaauggcuuauagguuuaaugguauuggaguuacacagaauguucucuaugagaaccaaaaauugauugccaaccaauuuaauagugcuauuggcaaaauucaagacucacuuucuuccacagcaagugcacuuggaaaacuucaagauguggucaaccaaaaugcacaagcuuuaaacacgcuuguuaaacaacuuagcuccaauuuuggugcaauuucaaguguuuuaaaugauauccuuucacgucuugacaaaguugaggcugaagugcaaauugauagguugaucacaggcagacuucaaaguuugcagacauaugugacucaacaauuaauuagagcugcagaaaucagagcuucugcuaaucuugcugcuacuaaaaugucagaguguguacuuggacaaucaaaaagaguugauuuuuguggaaagggcuaucaucuuauguccuucccucagucagcaccucaugguguagucuucuugcaugugacuuaugucccugcacaagaaaagaacuucacaacugcuccugccauuugucaugauggaaaagcacacuuuccucgugaaggugucuuuguuucaaauggcacacacugguuuguaacacaaaggaauuuuuaugaaccacaaaucauuacuacagacaacacauuugugucugguaacugugauguuguaauaggaauugucaacaacacaguuuaugauccuuugcaaccugaauuagacucauucaaggaggaguuagauaaauauuuuaagaaucauacaucaccagauguugauuuaggugacaucucuggcauuaaugcuucaguuguaaacauucaaaaagaaauugaccgccucaaugagguugccaagaauuuaaaugaaucucucaucgaucuccaagaacuuggaaaguaugagcaguauauaaaauggccaugguacauuuggcuagguuuuauagcuggcuugauugccauaguaauggugacaauuaugcuuugcuguaugaccaguugcuguaguugucucaagggcuguuguucuuguggauccugcugcaaauuugaugaagacgacucugagccagugcucaaaggagucaaauuacauuacacauaaggacuagucccuguucccagagcccacuuuuuuuucuuuuuuugaaauaaaauagccugucuuucagaucucaaaggcucuuuucagagccaccaaaaaaaaaaaaaaaaaaaaaaaaaaaaaaaaaaaaaaaaaaaaaaaaaaaaaaaaaaaaaaaaaaaaaaaaaaaaaaaaaaaaaaaaaaaaaaaaaaaaa

SEQ ID NO: 12228 - RNA, 4094 nt, Artificial Sequence
  SARS-CoV-2/England/20102000506/2020__EPI_ISL_415147 spike protein mRNA wt (1-1273)
aggagagucccgcagucggcguccagcggcucugcuuguucgugugugugucguugcaggccuuauucaagcuuaccauguuuguuuuucuuguuuuauugccacuagucucuagucaguguguuaaucuuacaaccagaacucaauuacccccugcauacacuaauucuuucacacgugguguuuauuacccugacaaaguuuucagauccucaguuuuacauucaacucaggacuuguucuuaccuuucuuuuccaauguuacuugguuccaugcuauacaugucucugggaccaaugguacuaagagguuugauaacccuguccuaccauuuaaugaugguguuuauuuugcuuccacugagaagucuaacauaauaagaggcuggauuuuugguacuacuuuagauucgaagacccagucccuacuuauuguuaauaacgcuacuaauguuguuauuaaagucugugaauuucaauuuuguaaugauccauuuuuggguguuuauuaccacaaaaacaacaaaaguuggauggaaagugaguucagaguuuauucuagugcgaauaauugcacuuuugaauaugucucucagccuuuucuuauggaccuugaaggaaaacaggguaauuucaaaaaucuuagggaauuuguguuuaagaauauugaugguuauuuuaaaauauauucuaagcacacgccuauuaauuuagugcgugaucucccucaggguuuuucggcuuuagaaccauugguagauuugccaauagguauuaacaucacuagguuucaaacuuuacuugcuuuacauagaaguuauuugacuccuggugauucuucuucagguuggacagcuggugcugcagcuuauuauguggguuaucuucaaccuaggacuuuucuauuaaaauauaaugaaaauggaaccauuacagaugcuguagacugugcacuugacccucucucagaaacaaaguguacguugaaauccuucacuguagaaaaaggaaucuaucaaacuucuaacuuuagaguccaaccaacagaaucuauuguuagauuuccuaauauuacaaacuugugcccuuuuggugaaguuuuuaacgccaccagauuugcaucuguuuaugcuuggaacaggaagagaaucagcaacuguguugcugauuauucuguccuauauaauuccgcaucauuuuccacuuuuaaguguuauggagugucuccuacuaaauuaaaugaucucugcuuuacuaaugucuaugcagauucauuuguaauuagaggugaugaagucagacaaaucgcuccagggcaaacuggaaagauugcugauuauaauuauaaauuaccagaugauuuuacaggcugcguuauagcuuggaauucuaacaaucuugauucuaagguuggugguaauuauaauuaccuguauagauuguuuaggaagucuaaucucaaaccuuuugagagagauauuucaacugaaaucuaucaggccgguagcacaccuuguaaugguguugaagguuuuaauuguuacuuuccuuuacaaucauaugguuuccaacccacuaaugguguugguuaccaaccauacagaguaguaguacuuucuuuugaacuucuacaugcaccagcaacuguuuguggaccuaaaaagucuacuaauuugguuaaaaacaaaugugucaauuucaacuucaaugguuuaacaggcacagguguucuuacugagucuaacaaaaaguuucugccuuuccaacaauuuggcagagacauugcugacacuacugaugcuguccgugauccacagacacuugagauucuugacauuacaccauguucuuuugguggugucaguguuauaacaccaggaacaaauacuucuaaccagguugcuguucuuuaucaggguguuaacugcacagaagucccuguugcuauucaugcagaucaacuuacuccuacuuggcguguuuauucuacagguucuaauguuuuucaaacacgugcaggcuguuuaauaggggcugaacaugucaacaacucauaugagugugacauacccauuggugcagguauaugcgcuaguuaucagacucagacuaauucuccucggcgggcacguaguguagcuagucaauccaucauugccuacacuaugucacuuggugcagaaaauucaguugcuuacucuaauaacucuauugccauacccacaaauuuuacuauuaguguuaccacagaaauucuaccagugucuaugaccaagacaucaguagauuguacaauguacauuuguggugauucaacugaaugcagcaaucuuuuguugcaauauggcaguuuuuguacacaauuaaaccgugcuuuaacuggaauagcuguugaacaagacaaaaacacccaagaaguuuuugcacaagucaaacaaauuuacaaaacaccaccaauuaaagauuuuggugguuuuaauuuuucacaaauauuaccagauccaucaaaaccaagcaagaggucauuuauugaagaucuacuuuucaacaaagugacacuugcagaugcuggcuucaucaaacaauaugguuauugccuuggugauauugcugcuagagaccucauuugugcacaaaaguuuaacggccuuacuguuuugccaccuuugcucacagaugaaaugauugcucaauacacuucugcacuguuagcggguacaaucacuucugguuggaccuuuggugcaggugcugcauuacaaauaccauuugcuaugcaaauggcuuauagguuuaaugguauuggaguuacacagaauguucucuaugagaaccaaaaauugauugccaaccaauuuaauagugcuauuggcaaaauucaagacucacuuucuuccacagcaagugcacuuggaaaacuucaagauguggucaaccaaaaugcacaagcuuuaaacacgcuuguuaaacaacuuagcuccaauuuuggugcaauuucaaguguuuuaaaugauauccuuucacgucuugacaaaguugaggcugaagugcaaauugauagguugaucacaggcagacuucaaaguuugcagacauaugugacucaacaauuaauuagagcugcagaaaucagagcuucugcuaaucuugcugcuacuaaaaugucagaguguguacuuggacaaucaaaaagaguugauuuuuguggaaagggcuaucaucuuauguccuucccucagucagcaccucaugguguagucuucuugcaugugacuuaugucccugcacaagaaaagaacuucacaacugcuccugccauuugucaugauggaaaagcacacuuuccucgugaaggugucuuuguuucaaauggcacacacugguuuguaacacaaaggaauuuuuaugaaccacaaaucauuacuacagacaacacauuugugucugguaacugugauguuguaauaggaauugucaacaacacaguuuaugauccuuugcaaccugaauuagacucauucaaggaggaguuagauaaauauuuuaagaaucauacaucaccagauguugauuuaggugacaucucuggcauuaaugcuucaguuguaaacauucaaaaagaaauugaccgccucaaugagguugccaagaauuuaaaugaaucucucaucgaucuccaagaacuuggaaaguaugagcaguauauaaaauggccaugguacauuuggcuagguuuuauagcuggcuugauugccauaguaauggugacaauuaugcuuugcuguaugaccaguugcuguaguugucucaagggcuguuguucuuguggauccugcugcaaauuugaugaagacgacucugagccagugcucaaaggagucaaauuacauuacacauaaggacuagucccuguucccagagcccacuuuuuuuucuuuuuuugaaauaaaauagccugucuuucagaucucaaaggcucuuuucagagccaccaaaaaaaaaaaaaaaaaaaaaaaaaaaaaaaaaaaaaaaaaaaaaaaaaaaaaaaaaaaaaaaaaaaaaaaaaaaaaaaaaaaaaaaaaaaaaaaaaaaaa

SEQ ID NO: 12229 - RNA, 4094 nt, Artificial Sequence
  SARS-CoV-2/Belgium/VAG-03013/2020__EPI_ISL_415155 spike protein mRNA wt (1-1273)
aggagagucccgcagucggcguccagcggcucugcuuguucgugugugugucguugcaggccuuauucaagcuuaccauguuuguuuuucuuguuuuauugccacuagucucuagucaguguguuaaucuuacaaccagaacucaauuacccccugcauacacuaauucuuucacacgugguguuuauuacccugacaaaguuuucagauccucaguuuuacauucaacucaggacuuguucuuaccuuucuuuuccaauguuacuugguuccaugcuauacaugucucugggaccaaugguacuaagagguuugauaacccuguccuaccauuuaaugaugguguuuauuuugcuuccacugagaagucuaacauaauaagaggcuggauuuuugguacuacuuuagauucgaagacccagucccuacuuauuguuaauaacgcuacuaauguuguuauuaaagucugugaauuucaauuuuguaaugauccauuuuuggguguuuauuaccacaaaaacaacaaaaguuggauggaaagugaguucagaguuuauucuagugcgaauaauugcacuuuugaauaugucucucagccuuuucuuauggaccuugaaggaaaacaggguaauuucaaaaaucuuagggaauuuguguuuaagaauauugaugguuauuuuaaaauauauucuaagcacacgccuauuaauuuagugcgugaucucccucaggguuuuucggcuuuagaaccauugguagauuugccaauagguauuaacaucacuagguuucaaacuuuacuugcuuuacauagaaguuauuugacuccuggugauucuucuucagguuggacagcuggugcugcagcuuauuauguggguuaucuucaaccuaggacuuuucuauuaaaauauaaugaaaauggaaccauuacagaugcuguagacugugcacuugacccucucucagaaacaaaguguacguugaaauccuucacuguagaaaaaggaaucuaucaaacuucuaacuuuagaguccaaccaacagaaucuauuguuagauuuccuaauauuacaaacuugugcccuuuuggugaaguuuuuaacgccaccagauuugcaucuguuuaugcuuggaacaggaagagaaucagcaacuguguugcugauuauucuguccuauauaauuccgcaucauuuuccacuuuuaaguguuauggagugucuccuacuaaauuaaaugaucucugcuuuacuaaugucuaugcagauucauuuguaauuagaggugaugaagucagacaaaucgcuccagggcaaacuggaaagauugcugauuauaauuauaaauuaccagaugauuuuacaggcugcguuauagcuuggaauucuaacaaucuugauucuaagguuggugguaauuauaauuaccuguauagauuguuuaggaagucuaaucucaaaccuuuugagagagauauuucaacugaaaucuaucaggccgguagcacaccuuguaaugguguugaagguuuuaauuguuacuuuccuuuacaaucauaugguuuccaacccacuaaugguguugguuaccaaccauacagaguaguaguacuuucuuuugaacuucuacaugcaccagcaacuguuuguggaccuaaaaagucuacuaauuugguuaaaaacaaaugugucaauuucaacuucaaugguuuaacaggcacagguguucuuacugagucuaacaaaaaguuucugccuuuccaacaauuuggcagagacauugcugacacuacugaugcuguccgugauccacagacacuugagauucuugacauuacaccauguucuuuugguggugucaguguuauaacaccaggaacaaauacuucuaaccagguugcuguucuuuaucaggguguuaacugcacagaagucccuguugcuauucaugcagaucaacuuacuccuacuuggcguguuuauucuacagguucuaauguuuuucaaacacgugcaggcuguuuaauaggggcugaacaugucaacaacucauaugagugugacauacccauuggugcagguauaugcgcuaguuaucagacucagacuaauucuccucggcgggcacguaguguagcuagucaauccaucauugccuacacuaugucacuuggugcagaaaauucaguugcuuacucuaauaacucuauugccauacccacaaauuuuacuauuaguguuaccacagaaauucuaccagugucuaugaccaagacaucaguagauuguacaauguacauuuguggugauucaacugaaugcagcaaucuuuuguugcaauauggcaguuuuuguacacaauuaaaccgugcuuuaacuggaauagcuguugaacaagacaaaaacacccaagaaguuuuugcacaagucaaacaaauuuacaaaacaccaccaauuaaagauuuuggugguuuuaauuuuucacaaauauuaccagauccaucaaaaccaagcaagaggucauuuauugaagaucuacuuuucaacaaagugacacuugcagaugcuggcuucaucaaacaauauggugauugccuuggugauauugcugcuagagaccucauuugugcacaaaaguuuaacggccuuacuguuuugccaccuuugcucacagaugaaaugauugcucaauacacuucugcacuguuagcggguacaaucacuucugguuggaccuuuggugcaggugcugcauuacaaauaccauuugcuaugcaaauggcuuauagguuuaaugguauuggaguuacacagaauguucucuaugagaaccaaaaauugauugccaaccaauuuaauagugcuauuggcaaaauucaagacucacuuucuuccacagcaacugcacuuggaaaacuucaagauguggucaaccaaaaugcacaagcuuuaaacacgcuuguuaaacaacuuagcuccaauuuuggugcaauuucaaguguuuuaaaugauauccuuucacgucuugacaaaguugaggcugaagugcaaauugauagguugaucacaggcagacuucaaaguuugcagacauaugugacucaacaauuaauuagagcugcagaaaucagagcuucugcuaaucuugcugcuacuaaaaugucagaguguguacuuggacaaucaaaaagaguugauuuuuguggaaagggcuaucaucuuauguccuucccucagucagcaccucaugguguagucuucuugcaugugacuuaugucccugcacaagaaaagaacuucacaacugcuccugccauuugucaugauggaaaagcacacuuuccucgugaaggugucuuuguuucaaauggcacacacugguuuguaacacaaaggaauuuuuaugaaccacaaaucauuacuacagacaacacauuugugucugguaacugugauguuguaauaggaauugucaacaacacaguuuaugauccuuugcaaccugaauuagacucauucaaggaggaguuagauaaauauuuuaagaaucauacaucaccagauguugauuuaggugacaucucuggcauuaaugcuucaguuguaaacauucaaaaagaaauugaccgccucaaugagguugccaagaauuuaaaugaaucucucaucgaucuccaagaacuuggaaaguaugagcaguauauaaaauggccaugguacauuuggcuagguuuuauagcuggcuugauugccauaguaauggugacaauuaugcuuugcuguaugaccaguugcuguaguugucucaagggcuguuguucuuguggauccugcugcaaauuugaugaagacgacucugagccagugcucaaaggagucaaauuacauuacacauaaggacuagucccuguucccagagcccacuuuuuuuucuuuuuuugaaauaaaauagccugucuuucagaucucaaaggcucuuuucagagccaccaaaaaaaaaaaaaaaaaaaaaaaaaaaaaaaaaaaaaaaaaaaaaaaaaaaaaaaaaaaaaaaaaaaaaaaaaaaaaaaaaaaaaaaaaaaaaaaaaaaaa

SEQ ID NO: 12230 - RNA, 4094 nt, Artificial Sequence
  SARS-CoV-2/Belgium/BC-03016/2020__EPI_ISL_415157 spike protein mRNA wt (1-1273)
aggagagucccgcagucggcguccagcggcucugcuuguucgugugugugucguugcaggccuuauucaagcuuaccauguuuguuuuucuuguuuuauugccacuagucucuagucaguguguuaaucuuacaaccagaacucaauuacccccugcauacacuaauucuuucacacgugguguuuauuacccugacaaaguuuucagauccucaguuuuacauucaacucaggacuuguucuuaccuuucuuuuccaauguuacuugguuccaugcuauacaugucucugggaccaaugguacuaagagguuugauaacccuguccuaccauuuaaugaugguguuuauuuugcuuccacugagaagucuaacauaauaagaggcuggauuuuugguacuacuuuagauucgaagacccagucccuacuuauuguuaauaacgcuacuaauguuguuauuaaagucugugaauuucaauuuuguaaugauccauuuuuggguguuuauuaccacaaaaacaacaaaaguuggauggaaagugaguucagaguuuauucuagugcgaauaauugcacuuuugaauaugucucucagccuuuucuuauggaccuugaaggaaaacaggguaauuucaaaaaucuuagggaauuuguguuuaagaauauugaugguuauuuuaaaauauauucuaagcacacgccuauuaauuuagugcgugaucucccucaggguuuuucggcuuuagaaccauugguagauuugccaauagguauuaacaucacuagguuucaaacuuuacuugcuuuacauagaaguuauuugacuccuggugauucuucuucagguuggacagcuggugcugcagcuuauuauguggguuaucuucaaccuaggacuuuucuauuaaaauauaaugaaaauggaaccauuacagaugcuguagacugugcacuugacccucucucagaaacaaaguguacguugaaauccuucacuguagaaaaaggaaucuaucaaacuucuaacuuuagaguccaaccaacagaaucuauuguuagauuuccuaauauuacaaacuugugcccuuuuggugaaguuuuuaacgccaccagauuugcaucuguuuaugcuuggaacaggaagagaaucagcaacuguguugcugauuauucuguccuauauaauuccgcaucauuuuccacuuuuaaguguuauggagugucuccuacuaaauuaaaugaucucugcuuuacuaaugucuaugcagauucauuuguaauuagaggugaugaagucagacaaaucgcuccagggcaaacuggaaagauugcugauuauaauuauaaauuaccagaugauuuuacaggcugcguuauagcuuggaauucuaacaaucuugauucuaagguuggugguaauuauaauuaccuguauagauuguuuaggaagucuaaucucaaaccuuuugagagagauauuucaacugaaaucuaucaggccgguagcacaccuuguaaugguguugaagguuuuaauuguuacuuuccuuuacaaucauaugguuuccaacccacuaaugguguugguuaccaaccauacagaguaguaguacuuucuuuugaacuucuacaugcaccagcaacuguuuguggaccuaaaaagucuacuaauuugguuaaaaacaaaugugucaauuucaacuucaaugguuuaacaggcacagguguucuuacugagucuaacaaaaaguuucugccuuuccaacaauuuggcagagacauugcugacacuacugaugcuguccgugauccacagacacuugagauucuugacauuacaccauguucuuuugguggugucaguguuauaacaccaggaacaaauacuucuaaccagguugcuguucuuuaucaggguguuaacugcacagaagucccuguugcuauucaugcagaucaacuuacuccuacuuggcguguuuauucuacagguucuaauguuuuucaaacacgugcaggcuguuuaauaggggcugaacaugucaacaacucauaugagugugacauacccauuggugcagguauaugcgcuaguuaucagacucagacuaauucuccucggcgggcacguaguguagcuagucaauccaucauugccuacacuaugucacuuggugcagaaaauucaguugcuuacucuaauaacucuauugccauacccacaaauuuuacuauuaguguuaccacagaaauucuaccagugucuaugaccaagacaucaguagauuguacaauguacauuuguggugauucaacugaaugcagcaaucuuuuguugcaauauggcaguuuuuguacacaauuaaaccgugcuuuaacuggaauagcuguugaacaagacaaaaacacccaagaaguuuuugcacaagucaaacaaauuuacaaaacaccaccaauuaaagauuuuggugguuuuaauuuuucacaaauauuaccagauccaucaaaaccaagcaagaggucauuuauugaagaucuacuuuucaacaaagugacacuugcagaugcuggcuucaucaaacaauauggugauugccuuggugauauugcugcuagagaccucauuugugcacaaaaguuuaacggccuuacuguuuugccaccuuugcucacagaugaaaugauugcucaauacacuucugcacuguuagcggguacaaucacuucugguuggaccuuuggugcaggugcugcauuacaaauaccauuugcuaugcaaauggcuuauagguuuaaugguauuggaguuacacagaauguucucuaugagaaccaaaaauugauugccaaccaauuuaauagugcuauuggcaaaauucaagacucacuuucuuccacagcaccugcacuuggaaaacuucaagauguggucaaccaaaaugcacaagcuuuaaacacgcuuguuaaacaacuuagcuccaauuuuggugcaauuucaaguguuuuaaaugauauccuuucacgucuugacaaaguugaggcugaagugcaaauugauagguugaucacaggcagacuucaaaguuugcagacauaugugacucaacaauuaauuagagcugcagaaaucagagcuucugcuaaucuugcugcuacuaaaaugucagaguguguacuuggacaaucaaaaagaguugauuuuuguggaaagggcuaucaucuuauguccuucccucagucagcaccucaugguguagucuucuugcaugugacuuaugucccugcacaagaaaagaacuucacaacugcuccugccauuugucaugauggaaaagcacacuuuccucgugaaggugucuuuguuucaaauggcacacacugguuuguaacacaaaggaauuuuuaugaaccacaaaucauuacuacagacaacacauuugugucugguaacugugauguuguaauaggaauugucaacaacacaguuuaugauccuuugcaaccugaauuagacucauucaaggaggaguuagauaaauauuuuaagaaucauacaucaccagauguugauuuaggugacaucucuggcauuaaugcuucaguuguaaacauucaaaaagaaauugaccgccucaaugagguugccaagaauuuaaaugaaucucucaucgaucuccaagaacuuggaaaguaugagcaguauauaaaauggccaugguacauuuggcuagguuuuauagcuggcuugauugccauaguaauggugacaauuaugcuuugcuguaugaccaguugcuguaguugucucaagggcuguuguucuuguggauccugcugcaaauuugaugaagacgacucugagccagugcucaaaggagucaaauuacauuacacauaaggacuagucccuguucccagagcccacuuuuuuuucuuuuuuugaaauaaaauagccugucuuucagaucucaaaggcucuuuucagagccaccaaaaaaaaaaaaaaaaaaaaaaaaaaaaaaaaaaaaaaaaaaaaaaaaaaaaaaaaaaaaaaaaaaaaaaaaaaaaaaaaaaaaaaaaaaaaaaaaaaaaa

SEQ ID NO: 12231 - RNA, 4094 nt, Artificial Sequence
  SARS-CoV-2/Germany/BavPat3/2020__EPI_ISL_414521 spike protein mRNA wt (1-1273)
aggagagucccgcagucggcguccagcggcucugcuuguucgugugugugucguugcaggccuuauucaagcuuaccauguuuguuuuucuuguuuuauugccacuagucucuagucaguguguuaaucuuacaaccagaacucaauuacccccugcauacacuaauucuuucacacgugguguuuauuacccugacaaaguuuucagauccucaguuuuacauucaacucaggacuuguucuuaccuuucuuuuccaauguuacuugguuccaugcuauacaugucucugggaccaaugguacuaagagguuugauaacccuguccuaccauuuaaugaugguguuuauuuugcuuccacugagaagucuaacauaauaagaggcuggauuuuugguacuacuuuagauucgaagacccagucccuacuuauuguuaauaacgcuacuaauguuguuauuaaagucugugaauuucaauuuuguaaugauccauuuuuggguguuuauuaccacaaaaacaacaaaaguuggauggaaagugaguucagaguuuauucuagugcgaauaauugcacuuuugaauaugucucucagccuuuucuuauggaccuugaaggaaaacaggguaauuucaaaaaucuuagggaauuuguguuuaagaauauugaugguuauuuuaaaauauauucuaagcacacgccuauuaauuuagugcgugaucucccucaggguuuuucggcuuuagaaccauugguagauuugccaauagguauuaacaucacuagguuucaaacuuuacuugcuuuacauagaaguuauuugacuccuggugauucuucuucagguuggacagcuggugcugcagcuuauuauguggguuaucuucaaccuaggacuuuucuauuaaaauauaaugaaaauggaaccauuacagaugcuguagacugugcacuugacccucucucagaaacaaaguguacguugaaauccuucacuguagaaaaaggaaucuaucaaacuucuaacuuuagaguccaaccaacagaaucuauuguuagauuuccuaauauuacaaacuugugcccuuuuggugaaguuuuuaacgccaccagauuugcaucuguuuaugcuuggaacaggaagagaaucagcaacuguguugcugauuauucuguccuauauaauuccgcaucauuuuccacuuuuaaguguuauggagugucuccuacuaaauuaaaugaucucugcuuuacuaaugucuaugcagauucauuuguaauuagaggugaugaagucagacaaaucgcuccagggcaaacuggaaagauugcugauuauaauuauaaauuaccagaugauuuuacaggcugcguuauagcuuggaauucuaacaaucuugauucuaagguuggugguaauuauaauuaccuguauagauuguuuaggaagucuaaucucaaaccuuuugagagagauauuucaacugaaaucuaucaggccgguagcacaccuuguaaugguguugaagguuuuaauuguuacuuuccuuuacaaucauaugguuuccaacccacuaaugguguugguuaccaaccauacagaguaguaguacuuucuuuugaacuucuacaugcaccagcaacuguuuguggaccuaaaaagucuacuaauuugguuaaaaacaaaugugucaauuucaacuucaaugguuuaacaggcacagguguucuuacugagucuaacaaaaaguuucugccuuuccaacaauuuggcagagacauugcugacacuacugaugcuguccgugauccacagacacuugagauucuugacauuacaccauguucuuuugguggugucaguguuauaacaccaggaacaaauacuucuaaccagguugcuguucuuuaucaggauguuaacugcacagaagucccuguugcuauucaugcagaucaacuuacuccuacuuggcguguuuauucuacagguucuaauguuuuucaaacacgugcaggcuguuuaauaggggcugaacaugucaacaacucauaugagugugacauacccauuggugcagguauaugcgcuaguuaucagacucagacuaauucuccucggcgggcacguaguguagcuagucaauccaucauugccuacacuaugucacuuggugcagaaaauucaguugcuuacucuaauaacucuauugccauacccacaaauuuuacuauuaguguuaccacagaaauucuaccagugucuaugaccaagacaucaguagauuguacaauguacauuuguggugauucaacugaaugcagcaaucuuuuguugcaauauggcaguuuuuguacacaauuaaaccgugcuuuaacuggaauagcuguugaacaagacaaaaacacccaacaaguuuuugcacaagucaaacaaauuuacaaaacaccaccaauuaaagauuuuggugguuuuaauuuuucacaaauauuaccagauccaucaaaaccaagcaagaggucauuuauugaagaucuacuuuucaacaaagugacacuugcagaugcuggcuucaucaaacaauauggugauugccuuggugauauugcugcuagagaccucauuugugcacaaaaguuuaacggccuuacuguuuugccaccuuugcucacagaugaaaugauugcucaauacacuucugcacuguuagcggguacaaucacuucugguuggaccuuuggugcaggugcugcauuacaaauaccauuugcuaugcaaauggcuuauagguuuaaugguauuggaguuacacagaauguucucuaugagaaccaaaaauugauugccaaccaauuuaauagugcuauuggcaaaauucaagacucacuuucuuccacagcaagugcacuuggaaaacuucaagauguggucaaccaaaaugcacaagcuuuaaacacgcuuguuaaacaacuuagcuccaauuuuggugcaauuucaaguguuuuaaaugauauccuuucacgucuugacaaaguugaggcugaagugcaaauugauagguugaucacaggcagacuucaaaguuugcagacauaugugacucaacaauuaauuagagcugcagaaaucagagcuucugcuaaucuugcugcuacuaaaaugucagaguguguacuuggacaaucaaaaagaguugauuuuuguggaaagggcuaucaucuuauguccuucccucagucagcaccucaugguguagucuucuugcaugugacuuaugucccugcacaagaaaagaacuucacaacugcuccugccauuugucaugauggaaaagcacacuuuccucgugaaggugucuuuguuucaaauggcacacacugguuuguaacacaaaggaauuuuuaugaaccacaaaucauuacuacagacaacacauuugugucugguaacugugauguuguaauaggaauugucaacaacacaguuuaugauccuuugcaaccugaauuagacucauucaaggaggaguuagauaaauauuuuaagaaucauacaucaccagauguugauuuaggugacaucucuggcauuaaugcuucaguuguaaacauucaaaaagaaauugaccgccucaaugagguugccaagaauuuaaaugaaucucucaucgaucuccaagaacuuggaaaguaugagcaguauauaaaauggccaugguacauuuggcuagguuuuauagcuggcuugauugccauaguaauggugacaauuaugcuuugcuguaugaccaguugcuguaguugucucaagggcuguuguucuuguggauccugcugcaaauuugaugaagacgacucugagccagugcucaaaggagucaaauuacauuacacauaaggacuagucccuguucccagagcccacuuuuuuuucuuuuuuugaaauaaaauagccugucuuucagaucucaaaggcucuuuucagagccaccaaaaaaaaaaaaaaaaaaaaaaaaaaaaaaaaaaaaaaaaaaaaaaaaaaaaaaaaaaaaaaaaaaaaaaaaaaaaaaaaaaaaaaaaaaaaaaaaaaaaa

SEQ ID NO: 12232 - RNA, 4094 nt, Artificial Sequence
  SARS-CoV-2/France/HF1805/2020__EPI_ISL_414628 spike protein mRNA wt (1-1273)
aggagagucccgcagucggcguccagcggcucugcuuguucgugugugugucguugcaggccuuauucaagcuuaccauguuuguuuuucuuguuuuauugccacuagucucuagucaguguguuaaucuuacaaccagaacucaauuacccccugcauacacuaauucuuucacacgugguguuuauuacccugacaaaguuuucagauccucaguuuuacauucaacucaggacuuguucuuaccuuucuuuuccaauguuacuugguuccaugcuauacaugucucugggaccaaugguacuaagagguuugauaacccuguccuaccauuuaaugaugguguuuauuuugcuuccacugagaagucuaacauaauaagaggcuggauuuuugguacuacuuuagauucgaagacccagucccuacuuauuguuaauaacgcuacuaauguuguuauuaaagucugugaauuucaauuuuguaaugauccauuuuuggguguuuauuaccacaaaaacaacaaaaguuggauggaaagugaguucagaguuuauucuagugcgaauaauugcacuuuugaauaugucucucagccuuuucuuauggaccuugaaggaaaacaggguaauuucaaaaaucuuagggaauuuguguuuaagaauauugaugguuauuuuaaaauauauucuaagcacacgccuauuaauuuagugcgugaucucccucaggguuuuucggcuuuagaaccauugguagauuugccaauagguauuaacaucacuagguuucaaacuuuacuugcuuuacauagaaguuauuugacuccuggugauucuucuucagguuggacagcuggugcugcagcuuauuauguggguuaucuucaaccuaggacuuuucuauuaaaauauaaugaaaauggaaccauuacagaugcuguagacugugcacuugacccucucucagaaacaaaguguacguugaaauccuucacuguagaaaaaggaaucuaucaaacuucuaacuuuagaguccaaccaacagaaucuauuguuagauuuccuaauauuacaaacuugugcccuuuuggugaaguuuuuaacgccaccagauuugcaucuguuuaugcuuggaacaggaagagaaucagcaacuguguugcugauuauucuguccuauauaauuccgcaucauuuuccacuuuuaaguguuauggagugucuccuacuaaauuaaaugaucucugcuuuacuaaugucuaugcagauucauuuguaauuagaggugaugaagucagacaaaucgcuccagggcaaacuggaaagauugcugauuauaauuauaaauuaccagaugauuuuacaggcugcguuauagcuuggaauucuaacaaucuugauucuaagguuggugguaauuauaauuaccuguauagauuguuuaggaagucuaaucucaaaccuuuugagagagauauuucaacugaaaucuaucaggccgguagcacaccuuguaaugguguugaagguuuuaauuguuacuuuccuuuacaaucauaugguuuccaacccacuaaugguguugguuaccaaccauacagaguaguaguacuuucuuuugaacuucuacaugcaccagcaacuguuuguggaccuaaaaagucuacuaauuugguuaaaaacaaaugugucaauuucaacuucaaugguuuaacaggcacagguguucuuacugagucuaacaaaaaguuucugccuuuccaacaauuuggcagagacauugcugacacuacugaugcuguccgugauccacagacacuugagauucuugacauuacaccauguucuuuugguggugucaguguuauaacaccaggaacaaauacuucuaaccagguugcuguucuuuaucaggguguuaacugcacagaagucccuguugcuauucaugcagaucaacuuacuccuacuuggcguguuuauucuacagguucuaauguuuuucaaacacgugcaggcuguuuaauaggggcugaacaugucaacaacucauaugagugugacauacccauuggugcagguauaugcgcuaguuaucagacucagacuaauucuccucggcgggcacguaguguagcuagucaauccaucauugccuacacuaugucacuuggugcagaaaauucaguugcuuacucuaauaacucuauugccauacccacaaauuuuacuauuaguguuaccacagaaauucuaccagugucuaugaccaagacaucaguagauuguacaauguacauuuguggugauucaacugaaugcagcaaucuuuuguugcaauauggcaguuuuuguacacaauuaaaccgugcuuuaacuggaauagcuguugaacaagacaaaaacacccaagaaguuuuugcacaagucaaacaaauuuacaaaacaccaccaauuaaagauuuuggugguuuuaauuuuucacaaauauuaccagauccaucaaaaccaagcaagaggucauuuauugaagaucuacuuuucaacaaagugacacuugcagaugcuggcuucaucaaacaauauggugauugccuuggugauauugcugcuagagaccucauuugugcacaaaaguuuaacggccuuacuguuuugccaccuuugcucacagaugaaaugauugcucaauacacuucugcacuguuagcggguacaaucacuucugguuggaccuuuggugcaggugcugcauuacaaauaccauuugcuaugcaaauggcuuauagguuuaaugguauuggaguuacacagaauguucucuaugagaaccaaaaauugauugccaaccaauuuaauagugcuauuggcaaaauucaagacucacuuucuuccacagcaagugcacuuggaaaacuucaagauguggucaaccaaaaugcacaagcuuuaaacacgcuuguuaaacaacuuagcuccaauuuuggugcaauuucaaguguuuuaaaugauauccuuucacgucuugacaaaguugaggcugaagugcaaauugauagguugaucacaggcagacuucaaaguuugcagacauaugugacucaacaauuaauuagagcugcagaaaucagagcuucugcuaaucuugcugcuacuaaaaugucagaguguguacuuggacaaucaaaaagaguugauuuuuguggaaagggcuaucaucuuauguccuucccucagucagcaccucaugguguagucuucuugcaugugacuuaugucccugcacaagaaaagaacuucacaacugcuccugccauuugucaugauggaaaagcacacuuuccucgugaaggugucuuuguuucaaauggcacacacugguuuguaacacaaaggaauuuuuaugaaccacaaaucauuacuacagacaacacauuugugucugguaacugugauguuguaauaggaguugucaacaacacaguuuaugauccuuugcaaccugaauuagacucauucaaggaggaguuagauaaauauuuuaagaaucauacaucaccagauguugauuuaggugacaucucuggcauuaaugcuucaguuguaaacauucaaaaagaaauugaccgccucaaugagguugccaagaauuuaaaugaaucucucaucgaucuccaagaacuuggaaaguaugagcaguauauaaaauggccaugguacauuuggcuagguuuuauagcuggcuugauugccauaguaauggugacaauuaugcuuugcuguaugaccaguugcuguaguugucucaagggcuguuguucuuguggauccugcugcaaauuugaugaagacgacucugagccagugcucaaaggagucaaauuacauuacacauaaggacuagucccuguucccagagcccacuuuuuuuucuuuuuuugaaauaaaauagccugucuuucagaucucaaaggcucuuuucagagccaccaaaaaaaaaaaaaaaaaaaaaaaaaaaaaaaaaaaaaaaaaaaaaaaaaaaaaaaaaaaaaaaaaaaaaaaaaaaaaaaaaaaaaaaaaaaaaaaaaaaaa

SEQ ID NO: 12233 - RNA, 4094 nt, Artificial Sequence
  SARS-CoV-2/Netherlands/ZuidHolland_9/2020__EPI_ISL_414445 spike protein mRNA wt (1-1273)
aggagagucccgcagucggcguccagcggcucugcuuguucgugugugugucguugcaggccuuauucaagcuuaccauguuuguuuuucuuguuuuauugccacuagucucuagucaguguguuaaucuuacaaccagaacucaauuacccccugcauacacuaauucuuucacacgugguguuuauuacccugacaaaguuuucagauccucaguuuuacauucaacucaggacuuguucuuaccuuucuuuuccaauguuacuugguuccaugcuauacaugucucugggaccaaugguacuaagagguuugauaacccuguccuaccauuuaaugaugguguuuauuuugcuuccacugagaagucuaacauaauaagaggcuggauuuuugguacuacuuuagauucgaagacccagucccuacuuauuguuaauaacgcuacuaauguuguuauuaaagucugugaauuucaauuuuguaaugauccauuuuuggguguuuauuaccacaaaaacaacaaaaguuggauggaaagugaguucagaguuuauucuagugcgaauaauugcacuuuugaauaugucucucagccuuuucuuauggaccuugaaggaaaacaggguaauuucaaaaaucuuagggaauuuguguuuaagaauauugaugguuauuuuaaaauauauucuaagcacacgccuauuaauuuagugcgugaucucccucaggguuuuucggcuuuagaaccauugguagauuugccaauagguauuaacaucacuagguuucaaacuuuacuugcuuuacauagaaguuauuugacuccuggugauucuucuucagguuggacagcuggugcugcagcuuauuauguggguuaucuucaaccuaggacuuuucuauuaaaauauaaugaaaauggaaccauuacagaugcuguagacugugcacuugacccucucucagaaacaaaguguacguugaaauccuucacuguagaaaaaggaaucuaucaaacuucuaacuuuagaguccaaccaacagaaucuauuguuagauuuccuaauauuacaaacuugugcccuuuuggugaaguuuuuaacgccaccagauuugcaucuguuuaugcuuggaacaggaagagaaucagcaacuguguugcugauuauucuguccuauauaauuccgcaucauuuuccacuuuuaaguguuauggagugucuccuacuaaauuaaaugaucucugcuuuacuaaugucuaugcagauucauuuguaauuagaggugaugaagucagacaaaucgcuccagggcaaacuggaaagauugcugauuauaauuauaaauuaccagaugauuuuacaggcugcguuauagcuuggaauucuaacaaucuugauucuaagguuggugguaauuauaauuaccuguauagauuguuuaggaagucuaaucucaaaccuuuugagagagauauuucaacugaaaucuaucaggccgguagcacaccuuguaaugguguugaagguuuuaauuguuacuuuccuuuacaaucauaugguuuccaacccacuaaugguguugguuaccaaccauacagaguaguaguacuuucuuuugaacuucuacaugcaccagcaacuguuuguggaccuaaaaagucuacuaauuugguuaaaaacaaaugugucaauuucaacuucaaugguuuaacaggcacagguguucuuacugagucuaacaaaaaguuucugccuuuccaacaauuuggcagagacauugcugacacuacugaugcuguccgugauccacagacacuugagauucuugacauuacaccauguucuuuugguggugucaguguuauaacaccaggaacaaauacuucuaaccagguugcuguucuuuaucaggguguuaacugcacagaagucccuguugcuauucaugcagaucaacuuacuccuacuuggcguguuuauucuacagguucuaauguuuuucaaacacgugcaggcuguuuaauaggggcugaacaugucaacaacucauaugagugugacauacccauuggugcagguauaugcgcuaguuaucagacucagacuaauucuccucggcgggcacguaguguagcuagucaauccaucauugccuacacuaugucacuuggugcagaaaauucaguugcuuacucuaauaacucuauugccauacccacaaauuuuacuauuaguguuaccacagaaauucuaccagugucuaugaccaagacaucaguagauuguacaauguacauuuguggugauucaacugaaugcagcaaucuuuuguugcaauauggcaguuuuuguacacaauuaaaccgugcuuuaacuggaauagcuguugaacaagacaaaaacacccaagaaguuuuugcacaagucaaacaaauuuacaaaacaccaccaauuaaagauuuuggugguuuuaauuuuucacaaauauuaccagauccaucaaaaccaagcaagaggucauuuauugaagaucuacuuuucaacaaagugacacuugcagaugcuggcuucaucaaacaauauggugauugccuuggugauauugcugcuagagaccucauuuguguacaaaaguuuaacggccuuacuguuuugccaccuuugcucacagaugaaaugauugcucaauacacuucugcacuguuagcggguacaaucacuucugguuggaccuuuggugcaggugcugcauuacaaauaccauuugcuaugcaaauggcuuauagguuuaaugguauuggaguuacacagaauguucucuaugagaaccaaaaauugauugccaaccaauuuaauagugcuauuggcaaaauucaagacucacuuucuuccacagcaagugcacuuggaaaacuucaagauguggucaaccaaaaugcacaagcuuuaaacacgcuuguuaaacaacuuagcuccaauuuuggugcaauuucaaguguuuuaaaugauauccuuucacgucuugacaaaguugaggcugaagugcaaauugauagguugaucacaggcagacuucaaaguuugcagacauaugugacucaacaauuaauuagagcugcagaaaucagagcuucugcuaaucuugcugcuacuaaaaugucagaguguguacuuggacaaucaaaaagaguugauuuuuguggaaagggcuaucaucuuauguccuucccucagucagcaccucaugguguagucuucuugcaugugacuuaugucccugcacaagaaaagaacuucacaacugcuccugccauuugucaugauggaaaagcacacuuuccucgugaaggugucuuuguuucaaauggcacacacugguuuguaacacaaaggaauuuuuaugaaccacaaaucauuacuacagacaacacauuugugucugguaacugugauguuguaauaggaauugucaacaacacaguuuaugauccuuugcaaccugaauuagacucauucaaggaggaguuagauaaauauuuuaagaaucauacaucaccagauguugauuuaggugacaucucuggcauuaaugcuucaguuguaaacauucaaaaagaaauugaccgccucaaugagguugccaagaauuuaaaugaaucucucaucgaucuccaagaacuuggaaaguaugagcaguauauaaaauggccaugguacauuuggcuagguuuuauagcuggcuugauugccauaguaauggugacaauuaugcuuugcuguaugaccaguugcuguaguugucucaagggcuguuguucuuguggauccugcugcaaauuugaugaagacgacucugagccagugcucaaaggagucaaauuacauuacacauaaggacuagucccuguucccagagcccacuuuuuuuucuuuuuuugaaauaaaauagccugucuuucagaucucaaaggcucuuuucagagccaccaaaaaaaaaaaaaaaaaaaaaaaaaaaaaaaaaaaaaaaaaaaaaaaaaaaaaaaaaaaaaaaaaaaaaaaaaaaaaaaaaaaaaaaaaaaaaaaaaaaaa

SEQ ID NO: 12234 - RNA, 4094 nt, Artificial Sequence
  SARS-CoV-2/Finland/FIN03032020A/2020__EPI_ISL_413602 spike protein mRNA wt (1-1273)
aggagagucccgcagucggcguccagcggcucugcuuguucgugugugugucguugcaggccuuauucaagcuuaccauguuuguuuuucuuguuuuauugccacuagucucuagucaguguguuaaucuuacaaccagaacucaauuacccccugcauacacuaauucuuucacacgugguguuuauuacccugacaaaguuuucagauccucaguuuuacauucaacucaggacuuguucuuaccuuucuuuuccaauguuacuugguuccaugcuauacaugucucugggaccaaugguacuaagagguuugauaacccuguccuaccauuuaaugaugguguuuauuuugcuuccacugagaagucuaacauaauaagaggcuggauuuuugguacuacuuuagauucgaagacccagucccuacuuauuguuaauaacgcuacuaauguuguuauuaaagucugugaauuucaauuuuguaaugauccauuuuuggguguuuauuaccacaaaaacaacaaaaguuggauggaaagugaguucagaguuuauucuagugcgaauaauugcacuuuugaauaugucucucagccuuuucuuauggaccuugaaggaaaacaggguaauuucaaaaaucuuagggaauuuguguuuaagaauauugaugguuauuuuaaaauauauucuaagcacacgccuauuaauuuagugcgugaucucccucaggguuuuucggcuuuagaaccauugguagauuugccaauagguauuaacaucacuagguuucaaacuuuacuugcuuuacauagaaguuauuugacuccuggugauucuucuucagguuggacagcuggugcugcagcuuauuauguggguuaucuucaaccuaggacuuuucuauuaaaauauaaugaaaauggaaccauuacagaugcuguagacugugcacuugacccucucucagaaacaaaguguacguugaaauccuucacuguagaaaaaggaaucuaucaaacuucuaacuuuagaguccaaccaacagaaucuauuguuagauuuccuaauauuacaaacuugugcccuuuuggugaaguuuuuaacgccaccagauuugcaucuguuuaugcuuggaacaggaagagaaucagcaacuguguugcugauuauucuguccuauauaauuccgcaucauuuuccacuuuuaaguguuauggagugucuccuacuaaauuaaaugaucucugcuuuacuaaugucuaugcagauucauuuguaauuagaggugaugaagucagacaaaucgcuccagggcaaacuggaaagauugcugauuauaauuauaaauuaccagaugauuuuacaggcugcguuauaucuuggaauucuaacaaucuugauucuaagguuggugguaauuauaauuaccuguauagauuguuuaggaagucuaaucucaaaccuuuugagagagauauuucaacugaaaucuaucaggccgguagcacaccuuguaaugguguugaagguuuuaauuguuacuuuccuuuacaaucauaugguuuccaacccacuaaugguguugguuaccaaccauacagaguaguaguacuuucuuuugaacuucuacaugcaccagcaacuguuuguggaccuaaaaagucuacuaauuugguuaaaaacaaaugugucaauuucaacuucaaugguuuaacaggcacagguguucuuacugagucuaacaaaaaguuucugccuuuccaacaauuuggcagagacauugcugacacuacugaugcuguccgugauccacagacacuugagauucuugacauuacaccauguucuuuugguggugucaguguuauaacaccaggaacaaauacuucuaaccagguugcuguucuuuaucaggguguuaacugcacagaagucccuguugcuauucaugcagaucaacuuacuccuacuuggcguguuuauucuacagguucuaauguuuuucaaacacgugcaggcuguuuaauaggggcugaacaugucaacaacucauaugagugugacauacccauuggugcagguauaugcgcuaguuaucagacucagacuaauucuccucggcgggcacguaguguagcuagucaauccaucauugccuacacuaugucacuuggugcagaaaauucaguugcuuacucuaauaacucuauugccauacccacaaauuuuacuauuaguguuaccacagaaauucuaccagugucuaugaccaagacaucaguagauuguacaauguacauuuguggugauucaacugaaugcagcaaucuuuuguugcaauauggcaguuuuuguacacaauuaaaccgugcuuuaacuggaauagcuguugaacaagacaaaaacacccaagaaguuuuugcacaagucaaacaaauuuacaaaacaccaccaauuaaagauuuuggugguuuuaauuuuucacaaauauuaccagauccaucaaaaccaagcaagaggucauuuauugaagaucuacuuuucaacaaagugacacuugcagaugcuggcuucaucaaacaauauggugauugccuuggugauauugcugcuagagaccucauuugugcacaaaaguuuaacggccuuacuguuuugccaccuuugcucacagaugaaaugauugcucaauacacuucugcacuguuagcggguacaaucacuucugguuggaccuuuggugcaggugcugcauuacaaauaccauuugcuaugcaaauggcuuauagguuuaaugguauuggaguuacacagaauguucucuaugagaaccaaaaauugauugccaaccaauuuaauagugcuauuggcaaaauucaagacucacuuucuuccacagcaagugcacuuggaaaacuucaagauguggucaaccaaaaugcacaagcuuuaaacacgcuuguuaaacaacuuagcuccaauuuuggugcaauuucaaguguuuuaaaugauauccuuucacgucuugacaaaguugaggcugaagugcaaauugauagguugaucacaggcagacuucaaaguuugcagacauaugugacucaacaauuaauuagagcugcagaaaucagagcuucugcuaaucuugcugcuacuaaaaugucagaguguguacuuggacaaucaaaaagaguugauuuuuguggaaagggcuaucaucuuauguccuucccucagucagcaccucaugguguagucuucuugcaugugacuuaugucccugcacaagaaaagaacuucacaacugcuccugccauuugucaugauggaaaagcacacuuuccucgugaaggugucuuuguuucaaauggcacacacugguuuguaacacaaaggaauuuuuaugaaccacaaaucauuacuacagacaacacauuugugucugguaacugugauguuguaauaggaauugucaacaacacaguuuaugauccuuugcaaccugaauuagacucauucaaggaggaguuagauaaauauuuuaagaaucauacaucaccagauguugauuuaggugacaucucuggcauuaaugcuucaguuguaaacauucaaaaagaaauugaccgccucaaugagguugccaagaauuuaaaugaaucucucaucgaucuccaagaacuuggaaaguaugagcaguauauaaaauggccaugguacauuuggcuagguuuuauagcuggcuugauugccauaguaauggugacaauuaugcuuugcuguaugaccaguugcuguaguugucucaagggcuguuguucuuguggauccugcugcaaauuugaugaagacgacucugagccagugcucaaaggagucaaauuacauuacacauaaggacuagucccuguucccagagcccacuuuuuuuucuuuuuuugaaauaaaauagccugucuuucagaucucaaaggcucuuuucagagccaccaaaaaaaaaaaaaaaaaaaaaaaaaaaaaaaaaaaaaaaaaaaaaaaaaaaaaaaaaaaaaaaaaaaaaaaaaaaaaaaaaaaaaaaaaaaaaaaaaaaaa

SEQ ID NO: 12235 - RNA, 4094 nt, Artificial Sequence
  SARS-CoV-2/France/GE1977/2020__EPI_ISL_414632 spike protein mRNA wt (1-1273)
aggagagucccgcagucggcguccagcggcucugcuuguucgugugugugucguugcaggccuuauucaagcuuaccauguuuguuuuucuuguuuuauugccacuagucucuagucaguguguuaaucuuacaaccagaacucaauuacccccugcauacacuaauucuuucacacgugguguuuauuacccugacaaaguuuucagauccucaguuuuacauucaacucaggacuuguucuuaccuuucuuuuccaauguuacuugguuccaugcuauacaugucucugggaccaaugguacuaagagguuugauaacccuguccuaccauuuaaugaugguguuuauuuugcuuccacugagaagucuaacauaauaagaggcuggauuuuugguacuacuuuagauucgaagacccagucccuacuuauuguuaauaacgcuacuaauguuguuauuaaagucugugaauuucaauuuuguaaugauccauuuuuggguguuuauuaccacaaaaacaacaaaaguuggauggaaagugaguucagaguuuauucuagugcgaauaauugcacuuuugaauaugucucucagccuuuucuuauggaccuugaaggaaaacaggguaauuucaaaaaucuuagggaauuuguguuuaagaauauugaugguuauuuuaaaauauauucuaagcacacgccuauuaauuuagugcgugaucucccucaggguuuuucggcuuuagaaccauugguagauuugccaauagguauuaacaucacuagguuucaaacuuuacuugcuuuacauagaaguuauuugacuccuggugauucuucuucagguuggacagcuggugcugcagcuuauuauguggguuaucuucaaccuaggacuuuucuauuaaaauauaaugaaaauggaaccauuacagaugcuguagacugugcacuugacccucucucagaaacaaaguguacguugaaauccuucacuguagaaaaaggaaucuaucaaacuucuaacuuuagaguccaaccaacagaaucuauuguuagauuuccuaauauuacaaacuugugcccuuuuggugaaguuuuuaacgccaccagauuugcaucuguuuaugcuuggaacaggaagagaaucagcaacuguguugcugauuauucuguccuauauaauuccgcaucauuuuccacuuuuaaguguuauggagugucuccuacuaaauuaaaugaucucugcuuuacuaaugucuaugcagauucauuuguaauuagaggugaugaagucagacaaaucgcuccagggcaaacuggaaagauugcugauuauaauuauaaauuaccagaugauuuuacaggcugcguuauagcuuggaauucuaacaaucuugauucuaagguuggugguaauuauaauuaccuguauagauuguuuaggaagucuaaucucaaaccuuuugagagagauauuucaacugaaaucuaucaggccgguagcacaccuuguaaugguguugaagguuuuaauuguuacuuuccuuuacaaucauaugguuuccaacccacuaaugguguugguuaccaaccauacagaguaguaguacuuucuuuugaacuucuacaugcaccagcaacuguuuguggaccuaaaaagucuacuaauuugguuaaaaacaaaugugucaauuucaacuucaaugguuuaacaggcacagguguucuuacugagucuaacaaaaaguuucugccuuuccaacaauuuggcagagacauugcugacacuacugaugcuguccgugauccacagacacuugagauucuugacauuacaccauguucuuuugguggugucaguguuauaacaccaggaacaaauacuucuaaccagguugcuguucuuuaucaggguguuaacugcacagaagucccuguugcuauucaugcagaucaacuuacuccuacuuggcguguuuauucuacagguucuaauguuuuucaaacacgugcaggcuguuuaauaggggcugaacaugucaacaacucauaugagugugacauacccauuggugcagguauaugcgcuaguuaucagacucagacuaauucuccucggcgggcacguaguguagcuagucaauccaucauugccuacacuaugucacuuggugcagaaaauucaguugcuuacucuaauaacucuauugccauacccacaaauuuuacuauuaguguuaccacagaaauucuaccagugucuaugaccaagacaucaguagauuguacaauguacauuuguggugauucaacugaaugcagcaaucuuuuguugcaauauggcaguuuuuguacacaauuaaaccgugcuuuaacuggaauagcuguugaacaagacaaaaacacccaagaaguuuuugcacaagucaaacaaauuuacaaaacaccaccaauuaaagauuuuggugguuuuaauuuuucacaaauauuaccagauccaucaaaaccaagcaagaggucauuuauugaagaucuacuuuucaacaaagugacacuugcagaugcuggcuucaucaaacaauauggugauugccuuggugauauugcugcuagagaccucauuugugcacaaaaguuuaacggccuuacuguuuugccaccuuugcucacagaugaaaugauugcucaauacacuucugcacuguuagcggguacaaucacuucugguuggaccuuuggugcaggugcugcauuacaaauaccauuugcuaugcaaauggcuuauagguuuaaugguauuggaguuacacagaauguucucuaugagaaccaaaaauugauugccaaccaauuuaauagugcuauuggcaaaauucaagacucacuuuuuuccacagcaagugcacuuggaaaacuucaagauguggucaaccaaaaugcacaagcuuuaaacacgcuuguuaaacaacuuagcuccaauuuuggugcaauuucaaguguuuuaaaugauauccuuucacgucuugacaaaguugaggcugaagugcaaauugauagguugaucacaggcagacuucaaaguuugcagacauaugugacucaacaauuaauuagagcugcagaaaucagagcuucugcuaaucuugcugcuacuaaaaugucagaguguguacuuggacaaucaaaaagaguugauuuuuguggaaagggcuaucaucuuauguccuucccucagucagcaccucaugguguagucuucuugcaugugacuuaugucccugcacaagaaaagaacuucacaacugcuccugccauuugucaugauggaaaagcacacuuuccucgugaaggugucuuuguuucaaauggcacacacugguuuguaacacaaaggaauuuuuaugaaccacaaaucauuacuacagacaacacauuugugucugguaacugugauguuguaauaggaauugucaacaacacaguuuaugauccuuugcaaccugaauuagacucauucaaggaggaguuagauaaauauuuuaagaaucauacaucaccagauguugauuuaggugacaucucuggcauuaaugcuucaguuguaaacauucaaaaagaaauugaccgccucaaugagguugccaagaauuuaaaugaaucucucaucgaucuccaagaacuuggaaaguaugagcaguauauaaaauggccaugguacauuuggcuagguuuuauagcuggcuugauugccauaguaauggugacaauuaugcuuugcuguaugaccaguugcuguaguugucucaagggcuguuguucuuguggauccugcugcaaauuugaugaagacgacucugagccagugcucaaaggagucaaauuacauuacacauaaggacuagucccuguucccagagcccacuuuuuuuucuuuuuuugaaauaaaauagccugucuuucagaucucaaaggcucuuuucagagccaccaaaaaaaaaaaaaaaaaaaaaaaaaaaaaaaaaaaaaaaaaaaaaaaaaaaaaaaaaaaaaaaaaaaaaaaaaaaaaaaaaaaaaaaaaaaaaaaaaaaaa

SEQ ID NO: 12236 - RNA, 4094 nt, Artificial Sequence
  SARS-CoV-2/Finland/FIN-313/2020__EPI_ISL_414641 spike protein mRNA wt (1-1273)
aggagagucccgcagucggcguccagcggcucugcuuguucgugugugugucguugcaggccuuauucaagcuuaccauguuuguuuuucuuguuuuauugccacuagucucuagucaguguguuaaucuuacaaccagaacucaauuacccccugcauacacuaauucuuucacacgugguguuuauuacccugacaaaguuuucagauccucaguuuuacauucaacucaggacuuguucuuaccuuucuuuuccaauguuacuugguuccaugcuauacaugucucugggaccaaugguacuaagagguuugauaacccuguccuaccauuuaaugaugguguuuauuuugcuuccacugagaagucuaacauaauaagaggcuggauuuuugguacuacuuuagauucgaagacccagucccuacuuauuguuaauaacgcuacuaauguuguuauuaaagucugugaauuucaauuuuguaaugauccauuuuuggguguuuauuaccacaaaaacaacaaaaguuggauggaaagugaguucagaguuuauucuagugcgaauaauugcacuuuugaauaugucucucagccuuuucuuauggaccuugaaggaaaacaggguaauuucaaaaaucuuagggaauuuguguuuaagaauauugaugguuauuuuaaaauauauucuaagcacacgccuauuaauuuagugcgugaucucccucaggguuuuucggcuuuagaaccauugguagauuugccaauagguauuaacaucacuagguuuaaaacuuuacuugcuuuacauagaaguuauuugacuccuggugauucuucuucagguuggacagcuggugcugcagcuuauuauguggguuaucuucaaccuaggacuuuucuauuaaaauauaaugaaaauggaaccauuacagaugcuguagacugugcacuugacccucucucagaaacaaaguguacguugaaauccuucacuguagaaaaaggaaucuaucaaacuucuaacuuuagaguccaaccaacagaaucuauuguuagauuuccuaauauuacaaacuugugcccuuuuggugaaguuuuuaacgccaccagauuugcaucuguuuaugcuuggaacaggaagagaaucagcaacuguguugcugauuauucuguccuauauaauuccgcaucauuuuccacuuuuaaguguuauggagugucuccuacuaaauuaaaugaucucugcuuuacuaaugucuaugcagauucauuuguaauuagaggugaugaagucagacaaaucgcuccagggcaaacuggaaagauugcugauuauaauuauaaauuaccagaugauuuuacaggcugcguuauagcuuggaauucuaacaaucuugauucuaagguuggugguaauuauaauuaccuguauagauuguuuaggaagucuaaucucaaaccuuuugagagagauauuucaacugaaaucuaucaggccgguagcacaccuuguaaugguguugaagguuuuaauuguuacuuuccuuuacaaucauaugguuuccaacccacuaaugguguugguuaccaaccauacagaguaguaguacuuucuuuugaacuucuacaugcaccagcaacuguuuguggaccuaaaaagucuacuaauuugguuaaaaacaaaugugucaauuucaacuucaaugguuuaacaggcacagguguucuuacugagucuaacaaaaaguuucugccuuuccaacaauuuggcagagacauugcugacacuacugaugcuguccgugauccacagacacuugagauucuugacauuacaccauguucuuuugguggugucaguguuauaacaccaggaacaaauacuucuaaccagguugcuguucuuuaucaggguguuaacugcacagaagucccuguugcuauucaugcagaucaacuuacuccuacuuggcguguuuauucuacagguucuaauguuuuucaaacacgugcaggcuguuuaauaggggcugaacaugucaacaacucauaugagugugacauacccauuggugcagguauaugcgcuaguuaucagacucagacuaauucuccucggcgggcacguaguguagcuagucaaucuaucauugccuacacuaugucacuuggugcagaaaauucaguugcuuacucuaauaacucuauugccauacccacaaauuuuacuauuaguguuaccacagaaauucuaccagugucuaugaccaagacaucaguagauuguacaauguacauuuguggugauucaacugaaugcagcaaucuuuuguugcaauauggcaguuuuuguacacaauuaaaccgugcuuuaacuggaauagcuguugaacaagacaaaaacacccaagaaguuuuugcacaagucaaacaaauuuacaaaacaccaccaauuaaagauuuuggugguuuuaauuuuucacaaauauuaccagauccaucaaaaccaagcaagaggucauuuauugaagaucuacuuuucaacaaagugacacuugcagaugcuggcuucaucaaacaauauggugauugccuuggugauauugcugcuagagaccucauuugugcacaaaaguuuaacggccuuacuguuuugccaccuuugcucacagaugaaaugauugcucaauacacuucugcacuguuagcggguacaaucacuucugguuggaccuuuggugcaggugcugcauuacaaauaccauuugcuaugcaaauggcuuauagguuuaaugguauuggaguuacacagaauguucucuaugagaaccaaaaauugauugccaaccaauuuaauagugcuauuggcaaaauucaagacucacuuucuuccacagcaagugcacuuggaaaacuucaagauguggucaaccaaaaugcacaagcuuuaaacacgcuuguuaaacaacuuagcuccaauuuuggugcaauuucaaguguuuuaaaugauauccuuucacgucuugacaaaguugaggcugaagugcaaauugauagguugaucacaggcagacuucaaaguuugcagacauaugugacucaacaauuaauuagagcugcagaaaucagagcuucugcuaaucuugcugcuacuaaaaugucagaguguguacuuggacaaucaaaaagaguugauuuuuguggaaagggcuaucaucuuauguccuucccucagucagcaccucaugguguagucuucuugcaugugacuuaugucccugcacaagaaaagaacuucacaacugcuccugccauuugucaugauggaaaagcacacuuuccucgugaaggugucuuuguuucaaauggcacacacugguuuguaacacaaaggaauuuuuaugaaccacaaaucauuacuacagacaacacauuugugucugguaacugugauguuguaauaggaauugucaacaacacaguuuaugauccuuugcaaccugaauuagacucauucaaggaggaguuagauaaauauuuuaagaaucauacaucaccagauguugauuuaggugacaucucuggcauuaaugcuucaguuguaaacauucaaaaagaaauugaccgccucaaugagguugccaagaauuuaaaugaaucucucaucgaucuccaagaacuuggaaaguaugagcaguauauaaaauggccaugguacauuuggcuagguuuuauagcuggcuugauugccauaguaauggugacaauuaugcuuugcuguaugaccaguugcuguaguugucucaagggcuguuguucuuguggauccugcugcaaauuugaugaagacgacucugagccagugcucaaaggagucaaauuacauuacacauaaggacuagucccuguucccagagcccacuuuuuuuucuuuuuuugaaauaaaauagccugucuuucagaucucaaaggcucuuuucagagccaccaaaaaaaaaaaaaaaaaaaaaaaaaaaaaaaaaaaaaaaaaaaaaaaaaaaaaaaaaaaaaaaaaaaaaaaaaaaaaaaaaaaaaaaaaaaaaaaaaaaaa

SEQ ID NO: 12237 - RNA, 4094 nt, Artificial Sequence
  SARS-CoV-2/Netherlands/ZuidHolland_2/2020__EPI_ISL_414556 spike protein mRNA wt (1-1273)
aggagagucccgcagucggcguccagcggcucugcuuguucgugugugugucguugcaggccuuauucaagcuuaccauguuuguuuuucuuguuuuauugccacuagucucuagucaguguguuaaucuuacaaccagaacucaauuacccccugcauacacuaauucuuucacacgugguguuuauuacccugacaaaguuuucagauccucaguuuuacauucaacucaggacuuguucuuaccuuucuuuuccaauguuacuugguuccaugcuauacaugucucugggaccaaugguacuaagagguuugauaacccuguccuaccauuuaaugaugguguuuauuuugcuuccacugagaagucuaacauaauaagaggcuggauuuuugguacuacuuuagauucgaagacccagucccuacuuauuguuaauaacgcuacuaauguuguuauuaaagucugugaauuucaauuuuguaaugauccauuuuuggguguuuauuaccacaaaaacaacaaaaguuggauggaaagugaguucagaguuuauucuagugcgaauaauugcacuuuugaauaugucucucagccuuuucuuauggaccuugaaggaaaacaggguaauuucaaaaaucuuagggaauuuguguuuaagaauauugaugguuauuuuaaaauauauucuaagcacacgccuauuaauuuagugcgugaucucccucaggguuuuucggcuuuagaaccauugguagauuugccaauagguauuaacaucacuagguuucaaacuuuacuugcuuuacauagaaguuauuugacuccuggugauucuucuucagguuggacagcuggugcugcagcuuauuauguggguuaucuucaaccuaggacuuuucuauuaaaauauaaugaaaauggaaccauuacagaugcuguagacugugcacuugacccucucucagaaacaaaguguacguugaaauccuucacuguagaaaaaggaaucuaucaaacuucuaacuuuagaguccaaccaacagaaucuauuguuagauuuccuaauauuacaaacuugugcccuuuuggugaaguuuuuaacgccaccagauuugcaucuguuuaugcuuggaacaggaagagaaucagcaacuguguugcugauuauucuguccuauauaauuccgcaucauuuuccacuuuuaaguguuauggagugucuccuacuaaauuaaaugaucucugcuuuacuaaugucuaugcagauucauuuguaauuagaggugaugaagucagacaaaucgcuccagggcaaacuggaaagauugcugauuauaauuauaaauuaccagaugauuuuacaggcugcguuauagcuuggaauucuaacaaucuugauucuaagguuggugguaauuauaauuaccuguauagauuguuuaggaagucuaaucucaaaccuuuugagagagauauuucaacugaaaucuaucaggccgguagcacaccuuguaaugguguugaagguuuuaauuguuacuuuccuuuacaaucauaugguuuccaacccacuaaugguguugguuaccaaccauacagaguaguaguacuuucuuuugaacuucuacaugcaccagcaacuguuuguggaccuaaaaagucuacuaauuugguuaaaaacaaaugugucaauuucaacuucaaugguuuaacaggcacagguguucuuacugagucuaacaaaaaguuucugccuuuccaacaauuuggcagagacauugcugacacuacugaugcuguccgugauccacagacacuugagauucuugacauuacaccauguucuuuugguggugucaguguuauaacaccaggaacaaauacuucuaaccagguugcuguucuuuaucaggguguuaacugcacagaagucccuguugcuauucaugcagaucaacuuacuccuacuuggcguguuuauucuacagguucuaauguuuuucaaacacgugcaggcuguuuaauaggggcugaacaugucaacaacucauaugagugugacauacccauuggugcagguauaugcgcuaguuaucagacucagacuaauucuccucggcgggcacguaguguagcuagucaauccaucauugccuacacuaugucacuuggugcagaaaauucaguugcuuacucuaauaacucuauugccauacccacaaauuuuacuauuaguguuaccacagaaauucuaccagugucuaugaccaagacaucaguagauuguacaauguacauuuguggugauucaacugaaugcagcaaucuuuuguugcaauauggcaguuuuuguacacaauuaaaccgugcuuuaacuggaauagcucuugaacaagacaaaaacacccaagaaguuuuugcacaagucaaacaaauuuacaaaacaccaccaauuaaagauuuuggugguuuuaauuuuucacaaauauuaccagauccaucaaaaccaagcaagaggucauuuauugaagaucuacuuuucaacaaagugacacuugcagaugcuggcuucaucaaacaauauggugauugccuuggugauauugcugcuagagaccucauuugugcacaaaaguuuaacggccuuacuguuuugccaccuuugcucacagaugaaaugauugcucaauacacuucugcacuguuagcggguacaaucacuucugguuggaccuuuggugcaggugcugcauuacaaauaccauuugcuaugcaaauggcuuauagguuuaaugguauuggaguuacacagaauguucucuaugagaaccaaaaauugauugccaaccaauuuaauagugcuauuggcaaaauucaagacucacuuucuuccacagcaagugcacuuggaaaacuucaagauguggucaaccaaaaugcacaagcuuuaaacacgcuuguuaaacaacuuagcuccaauuuuggugcaauuucaaguguuuuaaaugauauccuuucacgucuugacaaaguugaggcugaagugcaaauugauagguugaucacaggcagacuucaaaguuugcagacauaugugacucaacaauuaauuagagcugcagaaaucagagcuucugcuaaucuugcugcuacuaaaaugucagaguguguacuuggacaaucaaaaagaguugauuuuuguggaaagggcuaucaucuuauguccuucccucagucagcaccucaugguguagucuucuugcaugugacuuaugucccugcacaagaaaagaacuucacaacugcuccugccauuugucaugauggaaaagcacacuuuccucgugaaggugucuuuguuucaaauggcacacacugguuuguaacacaaaggaauuuuuaugaaccacaaaucauuacuacagacaacacauuugugucugguaacugugauguuguaauaggaauugucaacaacacaguuuaugauccuuugcaaccugaauuagacucauucaaggaggaguuagauaaauauuuuaagaaucauacaucaccagauguugauuuaggugacaucucuggcauuaaugcuucaguuguaaacauucaaaaagaaauugaccgccucaaugagguugccaagaauuuaaaugaaucucucaucgaucuccaagaacuuggaaaguaugagcaguauauaaaauggccaugguacauuuggcuagguuuuauagcuggcuugauugccauaguaauggugacaauuaugcuuugcuguaugaccaguugcuguaguugucucaagggcuguuguucuuguggauccugcugcaaauuugaugaagacgacucugagccagugcucaaaggagucaaauuacauuacacauaaggacuagucccuguucccagagcccacuuuuuuuucuuuuuuugaaauaaaauagccugucuuucagaucucaaaggcucuuuucagagccaccaaaaaaaaaaaaaaaaaaaaaaaaaaaaaaaaaaaaaaaaaaaaaaaaaaaaaaaaaaaaaaaaaaaaaaaaaaaaaaaaaaaaaaaaaaaaaaaaaaaaa

SEQ ID NO: 12238 - RNA, 4094 nt, Artificial Sequence
  SARS-CoV-2/USA/WA-UW31/2020__EPI_ISL_414618 spike protein mRNA wt (1-1273)
aggagagucccgcagucggcguccagcggcucugcuuguucgugugugugucguugcaggccuuauucaagcuuaccauguuuguuuuucuuguuuuauugccacuagucucuagucaguguguuaaucuuacaaccagaacucaauuacccccugcauacacuaauucuuucacacgugguguuuauuacccugacaaaguuuucagauccucaguuuuacauucaacucaggacuuguucuuaccuuucuuuuccaauguuacuugguuccaugcuauacaugucucugggaccaaugguacuaagagguuugauaacccuguccuaccauuuaaugaugguguuuauuuugcuuccacugagaagucuaacauaauaagaggcuggauuuuugguacuacuuuagauucgaagacccagucccuacuuauuguuaauaacgcuacuaauguuguuauuaaagucugugaauuucaauuuuguaaugauccauuuuuggguguuuauuaccacaaaaacaacaaaaguuggauggaaagugaguucagaguuuauucuagugcgaauaauugcacuuuugaauaugucucucagccuuuucuuauggaccuugaaggaaaacaggguaauuucaaaaaucuuagggaauuuguguuuaagaauauugaugguuauuuuaaaauauauucuaagcacacgccuauuaauuuagugcgugaucucccucaggguuuuucggcuuuagaaccauugguagauuugccaauagguauuaacaucacuagguuucaaacuuuacuugcuuuacauagaaguuauuugacuccuggugauucuucuucagguuggacagcuggugcugcagcuuauuauguggguuaucuucaaccuaggacuuuucuauuaaaauauaaugaaaauggaaccauuacagaugcuguagacugugcacuugacccucucucagaaacaaaguguacguugaaauccuucacuguagaaaaaggaaucuaucaaacuucuaacuuuagaguccaaccaacagaaucuauuguuagauuuccuaauauuacaaacuugugcccuuuuggugaaguuuuuaacgccaccagauuugcaucuguuuaugcuuggaacaggaagagaaucagcaacuguguugcugauuauucuguccuauauaauuccgcaucauuuuccacuuuuaaguguuauggagugucuccuacuaaauuaaaugaucucugcuuuacuaaugucuaugcagauucauuuguaauuagaggugaugaagucagacaaaucgcuccagggcaaacuggaaagauugcugauuauaauuauaaauuaccagaugauuuuacaggcugcguuauagcuuggaauucuaacaaucuugauucuaagguuggugguaauuauaauuaccuguauagauuguuuaggaagucuaaucucaaaccuuuugagagagauauuucaacugaaaucuaucaggccgguagcacaccuuguaauggugcugaagguuuuaauuguuacuuuccuuuacaaucauaugguuuccaacccacuaaugguguugguuaccaaccauacagaguaguaguacuuucuuuugaacuucuacaugcaccagcaacuguuuguggaccuaaaaagucuacuaauuugguuaaaaacaaaugugucaauuucaacuucaaugguuuaacaggcacagguguucuuacugagucuaacaaaaaguuucugccuuuccaacaauuuggcagagacauugcugacacuacugaugcuguccgugauccacagacacuugagauucuugacauuacaccauguucuuuugguggugucaguguuauaacaccaggaacaaauacuucuaaccagguugcuguucuuuaucaggauguuaacugcacagaagucccuguugcuauucaugcagaucaacuuacuccuacuuggcguguuuauucuacagguucuaauguuuuucaaacacgugcaggcuguuuaauaggggcugaacaugucaacaacucauaugagugugacauacccauuggugcagguauaugcgcuaguuaucagacucagacuaauucuccucggcgggcacguaguguagcuagucaauccaucauugccuacacuaugucacuuggugcagaaaauucaguugcuuacucuaauaacucuauugccauacccacaaauuuuacuauuaguguuaccacagaaauucuaccagugucuaugaccaagacaucaguagauuguacaauguacauuuguggugauucaacugaaugcagcaaucuuuuguugcaauauggcaguuuuuguacacaauuaaaccgugcuuuaacuggaauagcuguugaacaagacaaaaacacccaagaaguuuuugcacaagucaaacaaauuuacaaaacaccaccaauuaaagauuuuggugguuuuaauuuuucacaaauauuaccagauccaucaaaaccaagcaagaggucauuuauugaagaucuacuuuucaacaaagugacacuugcagaugcuggcuucaucaaacaauauggugauugccuuggugauauugcugcuagagaccucauuugugcacaaaaguuuaacggccuuacuguuuugccaccuuugcucacagaugaaaugauugcucaauacacuucugcacuguuagcggguacaaucacuucugguuggaccuuuggugcaggugcugcauuacaaauaccauuugcuaugcaaauggcuuauagguuuaaugguauuggaguuacacagaauguucucuaugagaaccaaaaauugauugccaaccaauuuaauagugcuauuggcaaaauucaagacucacuuucuuccacagcaagugcacuuggaaaacuucaagauguggucaaccaaaaugcacaagcuuuaaacacgcuuguuaaacaacuuagcuccaauuuuggugcaauuucaaguguuuuaaaugauauccuuucacgucuugacaaaguugaggcugaagugcaaauugauagguugaucacaggcagacuucaaaguuugcagacauaugugacucaacaauuaauuagagcugcagaaaucagagcuucugcuaaucuugcugcuacuaaaaugucagaguguguacuuggacaaucaaaaagaguugauuuuuguggaaagggcuaucaucuuauguccuucccucagucagcaccucaugguguagucuucuugcaugugacuuaugucccugcacaagaaaagaacuucacaacugcuccugccauuugucaugauggaaaagcacacuuuccucgugaaggugucuuuguuucaaauggcacacacugguuuguaacacaaaggaauuuuuaugaaccacaaaucauuacuacagacaacacauuugugucugguaacugugauguuguaauaggaauugucaacaacacaguuuaugauccuuugcaaccugaauuagacucauucaaggaggaguuagauaaauauuuuaagaaucauacaucaccagauguugauuuaggugacaucucuggcauuaaugcuucaguuguaaacauucaaaaagaaauugaccgccucaaugagguugccaagaauuuaaaugaaucucucaucgaucuccaagaacuuggaaaguaugagcaguauauaaaauggccaugguacauuuggcuagguuuuauagcuggcuugauugccauaguaauggugacaauuaugcuuugcuguaugaccaguugcuguaguugucucaagggcuguuguucuuguggauccugcugcaaauuugaugaagacgacucugagccagugcucaaaggagucaaauuacauuacacauaaggacuagucccuguucccagagcccacuuuuuuuucuuuuuuugaaauaaaauagccugucuuucagaucucaaaggcucuuuucagagccaccaaaaaaaaaaaaaaaaaaaaaaaaaaaaaaaaaaaaaaaaaaaaaaaaaaaaaaaaaaaaaaaaaaaaaaaaaaaaaaaaaaaaaaaaaaaaaaaaaaaaa

SEQ ID NO: 12239 - RNA, 4094 nt, Artificial Sequence
  SARS-CoV-2/South Korea/SNU01/2020__EPI_ISL_411929 spike protein mRNA wt (1-1273)
aggagagucccgcagucggcguccagcggcucugcuuguucgugugugugucguugcaggccuuauucaagcuuaccauguuuguuuuucuuguuuuauugccacuagucucuagucaguguguuaaucuuacaaccagaacucaauuacccccugcauacacuaauucuuucacacgugguguuuauuacccugacaaaguuuucagauccucaguuuuacauucaacucaggacuuguucuuaccuuucuuuuccaauguuacuugguuccaugcuauacaugucucugggaccaaugguacuaagagguuugauaacccuguccuaccauuuaaugaugguguuuauuuugcuuccacugagaagucuaacauaauaagaggcuggauuuuugguacuacuuuagauucgaagacccagucccuacuuauuguuaauaacgcuacuaauguuguuauuaaagucugugaauuucaauuuuguaaugauccauuuuuggguguuuauuaccacaaaaacaacaaaaguuggauggaaagugaguucagaguuuauucuagugcgaauaauugcacuuuugaauaugucucucagccuuuucuuauggaccuugaaggaaaacaggguaauuucaaaaaucuuagggaauuuguguuuaagaauauugaugguuauuuuaaaauauauucuaagcacacgccuauuaauuuagugcgugaucucccucaggguuuuugggcuuuagaaccauugguagauuugccaauagguauuaacaucacuagguuucaaacuuuacuugcuuuacauagaaguuauuugacuccuggugauucuucuucagguuggacagcuggugcugcagcuuauuauguggguuaucuucaaccuaggacuuuucuauuaaaauauaaugaaaauggaaccauuacagaugcuguagacugugcacuugacccucucucagaaacaaaguguacguugaaauccuucacuguagaaaaaggaaucuaucaaacuucuaacuuuagaguccaaccaacagaaucuauuguuagauuuccuaauauuacaaacuugugcccuuuuggugaaguuuuuaacgccaccagauuugcaucuguuuaugcuuggaacaggaagagaaucagcaacuguguugcugauuauucuguccuauauaauuccgcaucauuuuccacuuuuaaguguuauggagugucuccuacuaaauuaaaugaucucugcuuuacuaaugucuaugcagauucauuuguaauuagaggugaugaagucagacaaaucgcuccagggcaaacuggaaagauugcugauuauaauuauaaauuaccagaugauuuuacaggcugcguuauagcuuggaauucuaacaaucuugauucuaagguuggugguaauuauaauuaccuguauagauuguuuaggaagucuaaucucaaaccuuuugagagagauauuucaacugaaaucuaucaggccgguagcacaccuuguaaugguguugaagguuuuaauuguuacuuuccuuuacaaucauaugguuuccaacccacuaaugguguugguuaccaaccauacagaguaguaguacuuucuuuugaacuucuacaugcaccagcaacuguuuguggaccuaaaaagucuacuaauuugguuaaaaacaaaugugucaauuucaacuucaaugguuuaacaggcacagguguucuuacugagucuaacaaaaaguuucugccuuuccaacaauuuggcagagacauugcugacacuacugaugcuguccgugauccacagacacuugagauucuugacauuacaccauguucuuuugguggugucaguguuauaacaccaggaacaaauacuucuaaccagguugcuguucuuuaucaggauguuaacugcacagaagucccuguugcuauucaugcagaucaacuuacuccuacuuggcguguuuauucuacagguucuaauguuuuucaaacacgugcaggcuguuuaauaggggcugaacaugucaacaacucauaugagugugacauacccauuggugcagguauaugcgcuaguuaucagacucagacuaauucuccucggcgggcacguaguguagcuagucaauccaucauugccuacacuaugucacuuggugcagaaaauucaguugcuuacucuaauaacucuauugccauacccacaaauuuuacuauuaguguuaccacagaaauucuaccagugucuaugaccaagacaucaguagauuguacaauguacauuuguggugauucaacugaaugcagcaaucuuuuguugcaauauggcaguuuuuguacacaauuaaaccgugcuuuaacuggaauagcuguugaacaagacaaaaacacccaagaaguuuuugcacaagucaaacaaauuuacaaaacaccaccaauuaaagauuuuggugguuuuaauuuuucacaaauauuaccagauccaucaaaaccaagcaagaggucauuuauugaagaucuacuuuucaacaaagugacacuugcagaugcuggcuucaucaaacaauauggugauugccuuggugauauugcugcuagagaccucauuugugcacaaaaguuuaacggccuuacuguuuugccaccuuugcucacagaugaaaugauugcucaauacacuucugcacuguuagcggguacaaucacuucugguuggaccuuuggugcaggugcugcauuacaaauaccauuugcuaugcaaauggcuuauagguuuaaugguauuggaguuacacagaauguucucuaugagaaccaaaaauugauugccaaccaauuuaauagugcuauuggcaaaauucaagacucacuuucuuccacagcaagugcacuuggaaaacuucaagauguggucaaccaaaaugcacaagcuuuaaacacgcuuguuaaacaacuuagcuccaauuuuggugcaauuucaaguguuuuaaaugauauccuuucacgucuugacaaaguugaggcugaagugcaaauugauagguugaucacaggcagacuucaaaguuugcagacauaugugacucaacaauuaauuagagcugcagaaaucagagcuucugcuaaucuugcugcuacuaaaaugucagaguguguacuuggacaaucaaaaagaguugauuuuuguggaaagggcuaucaucuuauguccuucccucagucagcaccucaugguguagucuucuugcaugugacuuaugucccugcacaagaaaagaacuucacaacugcuccugccauuugucaugauggaaaagcacacuuuccucgugaaggugucuuuguuucaaauggcacacacugguuuguaacacaaaggaauuuuuaugaaccacaaaucauuacuacagacaacacauuugugucugguaacugugauguuguaauaggaauugucaacaacacaguuuaugauccuuugcaaccugaauuagacucauucaaggaggaguuagauaaauauuuuaagaaucauacaucaccagauguugauuuaggugacaucucuggcauuaaugcuucaguuguaaacauucaaaaagaaauugaccgccucaaugagguugccaagaauuuaaaugaaucucucaucgaucuccaagaacuuggaaaguaugagcaguauauaaaauggccaugguacauuuggcuagguuuuauagcuggcuugauugccauaguaauggugacaauuaugcuuugcuguaugaccaguugcuguaguugucucaagggcuguuguucuuguggauccugcugcaaauuugaugaagacgacucugagccagugcucaaaggagucaaauuacauuacacauaaggacuagucccuguucccagagcccacuuuuuuuucuuuuuuugaaauaaaauagccugucuuucagaucucaaaggcucuuuucagagccaccaaaaaaaaaaaaaaaaaaaaaaaaaaaaaaaaaaaaaaaaaaaaaaaaaaaaaaaaaaaaaaaaaaaaaaaaaaaaaaaaaaaaaaaaaaaaaaaaaaaaa

SEQ ID NO: 12240 - RNA, 4094 nt, Artificial Sequence
  SARS-CoV-2/China/WF0004/2020__EPI_ISL_413694 spike protein mRNA wt (1-1273)
aggagagucccgcagucggcguccagcggcucugcuuguucgugugugugucguugcaggccuuauucaagcuuaccauguuuguuuuucuuguuuuauugccacuagucucuagucaguguguuaaucuuacaaccagaacucaauuacccccugcauacacuaauucuuucacacgugguguuuauuacccugacaaaguuuucagauccucaguuuuacauucaacucaggacuuguucuuaccuuucuuuuccaauguuacuugguuccaugcuauacaugucucugggaccaaugguacuaagagguuugauaacccuguccuaccauuuaaugaugguguuuauuuugcuuccacugagaagucuaacauaauaagaggcuggauuuuugguacuacuuuagauucgaagacccagucccuacuuauuguuaauaacgcuacuaauguuguuauuaaagucugugaauuucaauuuuguaaugauccauuuuuggguguuuauuaccacaaaaacaacaaaaguuggacggaaagugaguucagaguuuauucuagugcgaauaauugcacuuuugaauaugucucucagccuuuucuuauggaccuugaaggaaaacaggguaauuucaaaaaucuuagggaauuuguguuuaagaauauugaugguuauuuuaaaauauauucuaagcacacgccuauuaauuuagugcgugaucucccucaggguuuuucggcuuuagaaccauugguagauuugccaauagguauuaacaucacuagguuucaaacuuuacuugcuuuacauagaaguuauuugacuccuggugauucuucuucagguuggacagcuggugcugcagcuuauuauguggguuaucuucaaccuaggacuuuucuauuaaaauauaaugaaaauggaaccauuacagaugcuguagacugugcacuugacccucucucagaaacaaaguguacguugaaauccuucacuguagaaaaaggaaucuaucaaacuucuaacuuuagaguccaaccaacagaaucuauuguuagauuuccuaauauuacaaacuugugcccuuuuggugaaguuuuuaacgccaccagauuugcaucuguuuaugcuuggaacaggaagagaaucagcaacuguguugcugauuauucuguccuauauaauuccgcaucauuuuccacuuuuaaguguuauggagugucuccuacuaaauuaaaugaucucugcuuuacuaaugucuaugcagauucauuuguaauuagaggugaugaagucagacaaaucgcuccagggcaaacuggaaagauugcugauuauaauuauaaauuaccagaugauuuuacaggcugcguuauagcuuggaauucuaacaaucuugauucuaagguuggugguaauuauaauuaccuguauagauuguuuaggaagucuaaucucaaaccuuuugagagagauauuucaacugaaaucuaucaggccgguagcacaccuuguaaugguguugaagguuuuaauuguuacuuuccuuuacaaucauaugguuuccaacccacuaaugguguugguuaccaaccauacagaguaguaguacuuucuuuugaacuucuacaugcaccagcaacuguuuguggaccuaaaaagucuacuaauuugguuaaaaacaaaugugucaauuucaacuucaaugguuuaacaggcacagguguucuuacugagucuaacaaaaaguuucugccuuuccaacaauuuggcagagacauugcugacacuacugaugcuguccgugauccacagacacuugagauucuugacauuacaccauguucuuuugguggugucaguguuauaacaccaggaacaaauacuucuaaccagguugcuguucuuuaucaggauguuaacugcacagaagucccuguugcuauucaugcagaucaacuuacuccuacuuggcguguuuauucuacagguucuaauguuuuucaaacacgugcaggcuguuuaauaggggcugaacaugucaacaacucauaugagugugacauacccauuggugcagguauaugcgcuaguuaucagacucagacuaauucuccucggcgggcacguaguguagcuagucaauccaucauugccuacacuaugucacuuggugcagaaaauucaguugcuuacucuaauaacucuauugccauacccacaaauuuuacuauuaguguuaccacagaaauucuaccagugucuaugaccaagacaucaguagauuguacaauguacauuuguggugauucaacugaaugcagcaaucuuuuguugcaauauggcaguuuuuguacacaauuaaaccgugcuuuaacuggaauagcuguugaacaagacaaaaacacccaagaaguuuuugcacaagucaaacaaauuuacaaaacaccaccaauuaaagauuuuggugguuuuaauuuuucacaaauauuaccagauccaucaaaaccaagcaagaggucauuuauugaagaucuacuuuucaacaaagugacacuugcagaugcuggcuucaucaaacaauauggugauugccuuggugauauugcugcuagagaccucauuugugcacaaaaguuuaacggccuuacuguuuugccaccuuugcucacagaugaaaugauugcucaauacacuucugcacuguuagcggguacaaucacuucugguuggaccuuuggugcaggugcugcauuacaaauaccauuugcuaugcaaauggcuuauagguuuaaugguauuggaguuacacagaauguucucuaugagaaccaaaaauugauugccaaccaauuuaauagugcuauuggcaaaauucaagacucacuuucuuccacagcaagugcacuuggaaaacuucaagauguggucaaccaaaaugcacaagcuuuaaacacgcuuguuaaacaacuuagcuccaauuuuggugcaauuucaaguguuuuaaaugauauccuuucacgucuugacaaaguugaggcugaagugcaaauugauagguugaucacaggcagacuucaaaguuugcagacauaugugacucaacaauuaauuagagcugcagaaaucagagcuucugcuaaucuugcugcuacuaaaaugucagaguguguacuuggacaaucaaaaagauuugauuuuuguggaaagggcuaucaucuuauguccuucccucagucagcaccucaugguguagucuucuugcaugugacuuaugucccugcacaagaaaagaacuucacaacugcuccugccauuugucaugauggaaaagcacacuuuccucgugaaggugucuuuguuucaaauggcacacacugguuuguaacacaaaggaauuuuuaugaaccacaaaucauuacuacagacaacacauuugugucugguaacugugauguuguaauaggaauugucaacaacacaguuuaugauccuuugcaaccugaauuagacucauucaaggaggaguuagauaaauauuuuaagaaucauacaucaccagauguugauuuaggugacaucucuggcauuaaugcuucaguuguaaacauucaaaaagaaauugaccgccucaaugagguugccaagaauuuaaaugaaucucucaucgaucuccaagaacuuggaaaguaugagcaguauauaaaauggccaugguacauuuggcuagguuuuauagcuggcuugauugccauaguaauggugacaauuaugcuuugcuguaugaccaguugcuguaguugucucaagggcuguuguucuuguggauccugcugcaaauuugaugaagacgacucugagccagugcucaaaggagucaaauuacauuacacauaaggacuagucccuguucccagagcccacuuuuuuuucuuuuuuugaaauaaaauagccugucuuucagaucucaaaggcucuuuucagagccaccaaaaaaaaaaaaaaaaaaaaaaaaaaaaaaaaaaaaaaaaaaaaaaaaaaaaaaaaaaaaaaaaaaaaaaaaaaaaaaaaaaaaaaaaaaaaaaaaaaaaa

SEQ ID NO: 12241 - RNA, 4094 nt, Artificial Sequence
  SARS-CoV-2/China/WF0028/2020__EPI_ISL_413791 spike protein mRNA wt (1-1273)
aggagagucccgcagucggcguccagcggcucugcuuguucgugugugugucguugcaggccuuauucaagcuuaccauguuuguuuuucuuguuuuauugccacuagucucuagucaguguguuaaucuuacaaccagaacucaauuacccccugcauacacuaauucuuucacacgugguguuuauuacccugacaaaguuuucagauccucaguuuuacauucaacucaggacuuguucuuaccuuucuuuuccaauguuacuugguuccaugcuauacaugucucugggaccaaugguacuaagagguuugauaacccuguccuaccauuuaaugaugguguuuauuuugcuuccacugagaagucuaacauaauaagaggcuggauuuuugguacuacuuuagauucgaagacccagucccuacuuauuguuaauaacgcuacuaauguuguuauuaaagucugugaauuucaauuuuguaaugauccauuuuuggguguuuauuaccacaaaaacaacaaaaguuggauggaaagugaguucagaguuuauucuagugcgaauaauugcacuuuugaauaugucucucagccuuuucuuauggaccuugaaggaaaacaggguaauuucaaaaaucuuagggaauuuguguuuaagaauauugaugguuauuuuaaaauauauucuaagcacacgccuauuaauuuagugcgugaucucccucaggguuuuucggcuuuagaaccauugguagauuugccaauagguauuaacaucacuagguuucaaacuuuacuugcuuuacauagaaguuauuugacuccuggugauucuucuucagguuggacagcuggugcugcagcuuauuauguggguuaucuucaaccuaggacuuuucuauuaaaauauaaugaaaauggaaccauuacagaugcuguagacugugcacuugacccucucucagaaacaaaguguacguugaaauccuucacuguagaaaaaggaaucuaucaaacuucuaacuuuagaguccaaccaacagaaucuauuguuagauuuccuaauauuacaaacuugugcccuuuuggugaaguuuuuaacgccaccagauuugcaucuguuuaugcuuggaacaggaagagaaucagcaacuguguugcugauuauucuguccuauauaauuccgcaucauuuuccacuuuuaaguguuauggagugucuccuacuaaauuaaaugaucucugcuuuacuaaugucuaugcagauucauuuguaauuagaggugaugaagucagacaaaucgcuccagggcaaacuggaaagauugcugauuauaauuauaaauuaccagaugauuuuacaggcugcguuauagcuuggaauucuaacaaucuugauucuaagguuggugguaauuauaauuaccuguauagauuguuuaggaagucuaaucucaaaccuuuugagagagauauuucaacugaaaucuaucaggccgguagcacaccuuguaaugguguugaagguuuuaauuguuacuuuccuuuacaaucauaugguuuccaacccacuaaugguguugguuaccaaccauacagaguaguaguacuuucuuuugaacuucuacaugcaccagcaacuguuuguggaccuaaaaagucuacuaauuugguuaaaaacaaaugugucaauuucaacuucaaugguuuaacaggcacagguguucuuacugagucuaacaaaaaguuucugccuuuccaacaauuuggcagagacauugcugacacuacugaugcuguccgugauccacagacacuugagauucuugacauuacaccauguucuuuugguggugucaguguuauaacaccaggaacaaauacuucuaaccagguugcuguucuuuaucaggauguuaacugcacagaagucccuguugcuauucaugcagaucaacuuacuccuacuuggcguguuuauucuacagguucuaauguuuuucaaacacgugcaggcuguuuaauaggggcugaacaugucaacaacucauaugagugugacauacccauuggugcagguauaugcgcuaguuaucagacucagacuaauucuccucggcgggcacguaguguagcuagucaauccaucauugccuacacuaugucacuuggugcagaaaauucaguugcuuacucuaauaacucuauugccauacccacaaauuuuacuauuaguguuaccacagaaauucuaccagugucuaugaccaagacaucaguagauuguacaauguacauuuguggugauucaacugaaugcagcaaucuuuuguugcaauauggcaguuuuuguacacaauuaaaccgugcuuuaacuggaauagcuguugaacaagacaaaaacacccaagaaguuuuugcacaagucaaacaaauuuacaaaacaccaccaauuaaagauuuuggugguuuuaauuuuucacaaauauuaccagauccaucaaaaccaagcaagaggucauuuauugaagaucuacuuuucaacaaagugacacuugcagaugcuggcuucaucaaacaauauggugauugccuuggugauauugcugcuagagaccucauuugugcacaaaaguuuaacggccuuacuguuuugccaccuuugcucacagaugaaaugauugcucaauacacuucugcacuguuagcggguacaaucacuucugguuggaccuuuggugcaggugcugcauuacaaauaccauuugcuaugcaaauggcuuauagguuuaaugguauuggaguuacacagaauguucucuaugagaaccaaaaauugauugccaaccaauuuaauagugcuauuggcaaaauucaagacucacuuucuuccacagcaagugcacuuggaaaacuucaagauguggucaaccaaaaugcacaagcuuuaaacacgcuuguuaaacaacuuagcuccaauuuuggugcaauuucaaguguuuuaaaugauauccuuucacgucuugacaaaguugaggcugaagugcaaauugauagguugaucacaggcagacuucaaaguuugcagacauaugugacucaacaauuaauuagagcugcagaaaucagagcuucugcuaaucuugcugcuacuaaaaugucagaguguguacuuggacaaucaaaaagaguugauuuuuguggaaagggcuaucaucuuauguccuucccucagucagcaccucaugguguagucuucuugcaugugacuuaugucccugcacaagaaaagaacuucacaacugcuccugccauuugucaugauggaaaagcacacuuuccucgugaaggugucuuuguuucaaauggcacacacugguuuguaacacaaaggaauuuuuaugaaccacaaaucauuacuacagacaacacauuugugucugguaacugugauguuguaauaggaauugucaacaacacaguuuaugauccuuugcaaccugaauuagaaucauucaaggaggaguuagauaaauauuuuaagaaucauacaucaccagauguugauuuaggugacaucucuggcauuaaugcuucaguuguaaacauucaaaaagaaauugaccgccucaaugagguugccaagaauuuaaaugaaucucucaucgaucuccaagaacuuggaaaguaugagcaguauauaaaauggccaugguacauuuggcuagguuuuauagcuggcuugauugccauaguaauggugacaauuaugcuuugcuguaugaccaguugcuguaguugucucaagggcuguuguucuuguggauccugcugcaaauuugaugaagacgacucugagccagugcucaaaggagucaaauuacauuacacauaaggacuagucccuguucccagagcccacuuuuuuuucuuuuuuugaaauaaaauagccugucuuucagaucucaaaggcucuuuucagagccaccaaaaaaaaaaaaaaaaaaaaaaaaaaaaaaaaaaaaaaaaaaaaaaaaaaaaaaaaaaaaaaaaaaaaaaaaaaaaaaaaaaaaaaaaaaaaaaaaaaaaa

SEQ ID NO: 12242 - RNA, 4094 nt, Artificial Sequence
  SARS-CoV-2/2019-nCoV/USA-CruiseA-18/2020__MT159716.1 spike protein mRNA wt (1-1273)
aggagagucccgcagucggcguccagcggcucugcuuguucgugugugugucguugcaggccuuauucaagcuuaccauguuuguuuuucuuguuuuauugccacuagucucuagucaguguguuaaucuuacaaccagaacucaauuacccccugcauacacuaauucuuucacacgugguguuuauuacccugacaaaguuuucagauccucaguuuuacauucaacucaggacuuguucuuaccuuucuuuuccaauguuacuugguuccaugcuauacaugucucugggaccaaugguacuaagagguuugauaacccuguccuaccauuuaaugaugguguuuauuuugcuuccacugagaagucuaacauaauaagaggcuggauuuuugguacuacuuuagauucgaagacccagucccuacuuauuguuaauaacgcuacuaauguuguuauuaaagucugugaauuucaauuuuguaaugauccauuuuuggguguuuauuaccacaaaaacaacaaaaguuggauggaaagugaguuaagaguuuauucuagugcgaauaauugcacuuuugaauaugucucucagccuuuucuuauggaccuugaaggaaaacaggguaauuucaaaaaucuuagggaauuuguguuuaagaauauugaugguuauuuuaaaauauauucuaagcacacgccuauuaauuuagugcgugaucucccucaggguuuuucggcuuuagaaccauugguagauuugccaauagguauuaacaucacuagguuucaaacuuuacuugcuuuacauagaaguuauuugacuccuggugauucuucuucagguuggacagcuggugcugcagcuuauuauguggguuaucuucaaccuaggacuuuucuauuaaaauauaaugaaaauggaaccauuacagaugcuguagacugugcacuugacccucucucagaaacaaaguguacguugaaauccuucacuguagaaaaaggaaucuaucaaacuucuaacuuuagaguccaaccaacagaaucuauuguuagauuuccuaauauuacaaacuugugcccuuuuggugaaguuuuuaacgccaccagauuugcaucuguuuaugcuuggaacaggaagagaaucagcaacuguguugcugauuauucuguccuauauaauuccgcaucauuuuccacuuuuaaguguuauggagugucuccuacuaaauuaaaugaucucugcuuuacuaaugucuaugcagauucauuuguaauuagaggugaugaagucagacaaaucgcuccagggcaaacuggaaagauugcugauuauaauuauaaauuaccagaugauuuuacaggcugcguuauagcuuggaauucuaacaaucuugauucuaagguuggugguaauuauaauuaccuguauagauuguuuaggaagucuaaucucaaaccuuuugagagagauauuucaacugaaaucuaucaggccgguagcacaccuuguaaugguguugaagguuuuaauuguuacuuuccuuuacaaucauaugguuuccaacccacuaaugguguugguuaccaaccauacagaguaguaguacuuucuuuugaacuucuacaugcaccagcaacuguuuguggaccuaaaaagucuacuaauuugguuaaaaacaaaugugucaauuucaacuucaaugguuuaacaggcacagguguucuuacugagucuaacaaaaaguuucugccuuuccaacaauuuggcagagacauugcugacacuacugaugcuguccgugauccacagacacuugagauucuugacauuacaccauguucuuuugguggugucaguguuauaacaccaggaacaaauacuucuaaccagguugcuguucuuuaucaggauguuaacugcacagaagucccuguugcuauucaugcagaucaacuuacuccuacuuggcguguuuauucuacagguucuaauguuuuucaaacacgugcaggcuguuuaauaggggcugaacaugucaacaacucauaugagugugacauacccauuggugcagguauaugcgcuaguuaucagacucagacuaauucuccucggcgggcacguaguguagcuagucaauccaucauugccuacacuaugucacuuggugcagaaaauucaguugcuuacucuaauaacucuauugccauacccacaaauuuuacuauuaguguuaccacagaaauucuaccagugucuaugaccaagacaucaguagauuguacaauguacauuuguggugauucaacugaaugcagcaaucuuuuguugcaauauggcaguuuuuguacacaauuaaaccgugcuuuaacuggaauagcuguugaacaagacaaaaacacccaagaaguuuuugcacaagucaaacaaauuuacaaaacaccaccaauuaaagauuuuggugguuuuaauuuuucacaaauauuaccagauccaucaaaaccaagcaagaggucauuuauugaagaucuacuuuucaacaaagugacacuugcagaugcuggcuucaucaaacaauauggugauugccuuggugauauugcugcuagagaccucauuugugcacaaaaguuuaacggccuuacuguuuugccaccuuugcucacagaugaaaugauugcucaauacacuucugcacuguuagcggguacaaucacuucugguuggaccuuuggugcaggugcugcauuacaaauaccauuugcuaugcaaauggcuuauagguuuaaugguauuggaguuacacagaauguucucuaugagaaccaaaaauugauugccaaccaauuuaauagugcuauuggcaaaauucaagacucacuuucuuccacagcaagugcacuuggaaaacuucaagauguggucaaccaaaaugcacaagcuuuaaacacgcuuguuaaacaacuuagcuccaauuuuggugcaauuucaaguguuuuaaaugauauccuuucacgucuugacaaaguugaggcugaagugcaaauugauagguugaucacaggcagacuucaaaguuugcagacauaugugacucaacaauuaauuagagcugcagaaaucagagcuucugcuaaucuugcugcuacuaaaaugucagaguguguacuuggacaaucaaaaagaguugauuuuuguggaaagggcuaucaucuuauguccuucccucagucagcaccucaugguguagucuucuugcaugugacuuaugucccugcacaagaaaagaacuucacaacugcuccugccauuugucaugauggaaaagcacacuuuccucgugaaggugucuuuguuucaaauggcacacacugguuuguaacacaaaggaauuuuuaugaaccacaaaucauuacuacagacaacacauuugugucugguaacugugauguuguaauaggaauugucaacaacacaguuuaugauccuuugcaaccugaauuagacucauucaaggaggaguuagauaaauauuuuaagaaucauacaucaccagauguugauuuaggugacaucucuggcauuaaugcuucaguuguaaacauucaaaaagaaauugaccgccucaaugagguugccaagaauuuaaaugaaucucucaucgaucuccaagaacuuggaaaguaugagcaguauauaaaauggccaugguacauuuggcuagguuuuauagcuggcuugauugccauaguaauggugacaauuaugcuuugcuguaugaccaguugcuguaguugucucaagggcuguuguucuuguggauccugcugcaaauuugaugaagacgacucugagccagugcucaaaggagucaaauuacauuacacauaaggacuagucccuguucccagagcccacuuuuuuuucuuuuuuugaaauaaaauagccugucuuucagaucucaaaggcucuuuucagagccaccaaaaaaaaaaaaaaaaaaaaaaaaaaaaaaaaaaaaaaaaaaaaaaaaaaaaaaaaaaaaaaaaaaaaaaaaaaaaaaaaaaaaaaaaaaaaaaaaaaaaa

SEQ ID NO: 12243 - RNA, 4094 nt, Artificial Sequence
  SARS-CoV-2/SARS-CoV-2/Yunnan-01/human/2020/CHN__MT049951.1 spike protein mRNA wt (1-1273)
aggagagucccgcagucggcguccagcggcucugcuuguucgugugugugucguugcaggccuuauucaagcuuaccauguuuguuuuucuuguuuuauugccacuagucucuagucaguguguuaaucuuacaaccagaacucaauuacccccugcaaacacuaauucuuucacacgugguguuuauuacccugacaaaguuuucagauccucaguuuuacauucaacucaggacuuguucuuaccuuucuuuuccaauguuacuugguuccaugcuauacaugucucugggaccaaugguacuaagagguuugauaacccuguccuaccauuuaaugaugguguuuauuuugcuuccacugagaagucuaacauaauaagaggcuggauuuuugguacuacuuuagauucgaagacccagucccuacuuauuguuaauaacgcuacuaauguuguuauuaaagucugugaauuucaauuuuguaaugauccauuuuuggguguuuauuaccacaaaaacaacaaaaguuggauggaaagugaguucagaguuuauucuagugcgaauaauugcacuuuugaauaugucucucagccuuuucuuauggaccuugaaggaaaacaggguaauuucaaaaaucuuagggaauuuguguuuaagaauauugaugguuauuuuaaaauauauucuaagcacacgccuauuaauuuagugcgugaucucccucaggguuuuucggcuuuagaaccauugguagauuugccaauagguauuaacaucacuagguuucaaacuuuacuugcuuuacauagaaguuauuugacuccuggugauucuucuucagguuggacagcuggugcugcagcuuauuauguggguuaucuucaaccuaggacuuuucuauuaaaauauaaugaaaauggaaccauuacagaugcuguagacugugcacuugacccucucucagaaacaaaguguacguugaaauccuucacuguagaaaaaggaaucuaucaaacuucuaacuuuagaguccaaccaacagaaucuauuguuagauuuccuaauauuacaaacuugugcccuuuuggugaaguuuuuaacgccaccagauuugcaucuguuuaugcuuggaacaggaagagaaucagcaacuguguugcugauuauucuguccuauauaauuccgcaucauuuuccacuuuuaaguguuauggagugucuccuacuaaauuaaaugaucucugcuuuacuaaugucuaugcagauucauuuguaauuagaggugaugaagucagacaaaucgcuccagggcaaacuggaaagauugcugauuauaauuauaaauuaccagaugauuuuacaggcugcguuauagcuuggaauucuaacaaucuugauucuaagguuggugguaauuauaauuaccuguauagauuguuuaggaagucuaaucucaaaccuuuugagagagauauuucaacugaaaucuaucaggccgguagcacaccuuguaaugguguugaagguuuuaauuguuacuuuccuuuacaaucauaugguuuccaacccacuaaugguguugguuaccaaccauacagaguaguaguacuuucuuuugaacuucuacaugcaccagcaacuguuuguggaccuaaaaagucuacuaauuugguuaaaaacaaaugugucaauuucaacuucaaugguuuaacaggcacagguguucuuacugagucuaacaaaaaguuucugccuuuccaacaauuuggcagagacauugcugacacuacugaugcuguccgugauccacagacacuugagauucuugacauuacaccauguucuuuugguggugucaguguuauaacaccaggaacaaauacuucuaaccagguugcuguucuuuaucaggauguuaacugcacagaagucccuguugcuauucaugcagaucaacuuacuccuacuuggcguguuuauucuacagguucuaauguuuuucaaacacgugcaggcuguuuaauaggggcugaacaugucaacaacucauaugagugugacauacccauuggugcagguauaugcgcuaguuaucagacucagacuaauucuccucggcgggcacguaguguagcuagucaauccaucauugccuacacuaugucacuuggugcagaaaauucaguugcuuacucuaauaacucuauugccauacccacaaauuuuacuauuaguguuaccacagaaauucuaccagugucuaugaccaagacaucaguagauuguacaauguacauuuguggugauucaacugaaugcagcaaucuuuuguugcaauauggcaguuuuuguacacaauuaaaccgugcuuuaacuggaauagcuguugaacaagacaaaaacacccaagaaguuuuugcacaagucaaacaaauuuacaaaacaccaccaauuaaagauuuuggugguuuuaauuuuucacaaauauuaccagauccaucaaaaccaagcaagaggucauuuauugaagaucuacuuuucaacaaagugacacuugcagaugcuggcuucaucaaacaauauggugauugccuuggugauauugcugcuagagaccucauuugugcacaaaaguuuaacggccuuacuguuuugccaccuuugcucacagaugaaaugauugcucaauacacuucugcacuguuagcggguacaaucacuucugguuggaccuuuggugcaggugcugcauuacaaauaccauuugcuaugcaaauggcuuauagguuuaaugguauuggaguuacacagaauguucucuaugagaaccaaaaauugauugccaaccaauuuaauagugcuauuggcaaaauucaagacucacuuucuuccacagcaagugcacuuggaaaacuucaagauguggucaaccaaaaugcacaagcuuuaaacacgcuuguuaaacaacuuagcuccaauuuuggugcaauuucaaguguuuuaaaugauauccuuucacgucuugacaaaguugaggcugaagugcaaauugauagguugaucacaggcagacuucaaaguuugcagacauaugugacucaacaauuaauuagagcugcagaaaucagagcuucugcuaaucuugcugcuacuaaaaugucagaguguguacuuggacaaucaaaaagaguugauuuuuguggaaagggcuaucaucuuauguccuucccucagucagcaccucaugguguagucuucuugcaugugacuuaugucccugcacaagaaaagaacuucacaacugcuccugccauuugucaugauggaaaagcacacuuuccucgugaaggugucuuuguuucaaauggcacacacugguuuguaacacaaaggaauuuuuaugaaccacaaaucauuacuacagacaacacauuugugucugguaacugugauguuguaauaggaauugucaacaacacaguuuaugauccuuugcaaccugaauuagacucauucaaggaggaguuagauaaauauuuuaagaaucauacaucaccagauguugauuuaggugacaucucuggcauuaaugcuucaguuguaaacauucaaaaagaaauugaccgccucaaugagguugccaagaauuuaaaugaaucucucaucgaucuccaagaacuuggaaaguaugagcaguauauaaaauggccaugguacauuuggcuagguuuuauagcuggcuugauugccauaguaauggugacaauuaugcuuugcuguaugaccaguugcuguaguugucucaagggcuguuguucuuguggauccugcugcaaauuugaugaagacgacucugagccagugcucaaaggagucaaauuacauuacacauaaggacuagucccuguucccagagcccacuuuuuuuucuuuuuuugaaauaaaauagccugucuuucagaucucaaaggcucuuuucagagccaccaaaaaaaaaaaaaaaaaaaaaaaaaaaaaaaaaaaaaaaaaaaaaaaaaaaaaaaaaaaaaaaaaaaaaaaaaaaaaaaaaaaaaaaaaaaaaaaaaaaaa

SEQ ID NO: 12244 - RNA, 4094 nt, Artificial Sequence
  SARS-CoV-2/USA/WA-UW292/2020__EPI_ISL_418077 spike protein mRNA wt (1-1273)
aggagagucccgcagucggcguccagcggcucugcuuguucgugugugugucguugcaggccuuauucaagcuuaccauguuuguuuuucuuguuuuauugccacuagucucuagucaguguguuaaucuuacaaccagaacucaauuacccccugcauacacuaauucuuucacacgugguguuuauuacccugacaaaguuuucagauccucaguuuuacauucaacucaggacuuguucuuaccuuucuuuuccaauguuacuugguuccaugcuauacaugucucugggaccaaugguacuaagagguuugauaacccuguccuaccauuuaaugaugguguuuauuuugcuuccacugagaagucuaacauaauaagaggcuggauuuuugguacuacuuuagauucgaagacccagucccuacuuauuguuaauaacgcuacuaauguuguuauuaaagucugugaauuucaauuuuguaaugauccauuuuuggguguuuauuaccacaaaaacaacaaaaguuggauggaaagugaguucagaguuuauucuagugcgaauaauugcacuuuugaauaugucucucagccuuuucuuauggaccuugaaggaaaacaggguaauuucaaaaaucuuagggaauuuguguuuaagaauauugaugguuauuuuaaaauauauucuaagcacacgccuauuaauuuagugcgugaucucccucaggguuuuucggcuuuagaaccauugguagauuugccaauagguauuaacaucacuagguuucaaacuuuacuugcuuuacauagaaguuauuugacuccuggugauucuucuucagguuggacagcuggugcugcagcuuauuauguggguuaucuucaaccuaggacuuuucuauuaaaauauaaugaaaauggaaccauuacagaugcuguagacugugcacuugacccucucucagaaacaaaguguacguugaaauccuucacuguagaaaaaggaaucuaucaaacuucuaacuuuagaguccaaccaacagaaucuauuguuagauuuccuaauauuacaaacuugugcccuuuuggugaaguuuuuaacgccaccagauuugcaucuguuuaugcuuggaacaggaagagaaucagcaacuguguugcugauuauucuguccuauauaauuccgcaucauuuuccacuuuuaaguguuauggagugucuccuacuaaauuaaaugaucucugcuuuacuaaugucuaugcagauucauuuguaauuagaggugaugaagucagacaaaucgcuccagggcaaacuggaaagauugcugauuauaauuauaaauuaccagaugauuuuacaggcugcguuauagcuuggaauucuaacaaucuugauucuaagguuggugguaauuauaauuaccuguauagauuguuuaggaagucuaaucucaaaccuuuugagagagauauuucaacugaaaucuaucaggccaguagcacaccuuguaaugguguugaagguuuuaauuguuacuuuccuuuacaaucauaugguuuccaacccacuaaugguguugguuaccaaccauacagaguaguaguacuuucuuuugaacuucuacaugcaccagcaacuguuuguggaccuaaaaagucuacuaauuugguuaaaaacaaaugugucaauuucaacuucaaugguuuaacaggcacagguguucuuacugagucuaacaaaaaguuucugccuuuccaacaauuuggcagagacauugcugacacuacugaugcuguccgugauccacagacacuugagauucuugacauuacaccauguucuuuugguggugucaguguuauaacaccaggaacaaauacuucuaaccagguugcuguucuuuaucaggauguuaacugcacagaagucccuguugcuauucaugcagaucaacuuacuccuacuuggcguguuuauucuacagguucuaauguuuuucaaacacgugcaggcuguuuaauaggggcugaacaugucaacaacucauaugagugugacauacccauuggugcagguauaugcgcuaguuaucagacucagacuaauucuccucggcgggcacguaguguagcuagucaauccaucauugccuacacuaugucacuuggugcagaaaauucaguugcuuacucuaauaacucuauugccauacccacaaauuuuacuauuaguguuaccacagaaauucuaccagugucuaugaccaagacaucaguagauuguacaauguacauuuguggugauucaacugaaugcagcaaucuuuuguugcaauauggcaguuuuuguacacaauuaaaccgugcuuuaacuggaauagcuguugaacaagacaaaaacacccaagaaguuuuugcacaagucaaacaaauuuacaaaacaccaccaauuaaagauuuuggugguuuuaauuuuucacaaauauuaccagauccaucaaaaccaagcaagaggucauuuauugaagaucuacuuuucaacaaagugacacuugcagaugcuggcuucaucaaacaauauggugauugccuuggugauauugcugcuagagaccucauuugugcacaaaaguuuaacggccuuacuguuuugccaccuuugcucacagaugaaaugauugcucaauacacuucugcacuguuagcggguacaaucacuucugguuggaccuuuggugcaggugcugcauuacaaauaccauuugcuaugcaaauggcuuauagguuuaaugguauuggaguuacacagaauguucucuaugagaaccaaaaauugauugccaaccaauuuaauagugcuauuggcaaaauucaagacucacuuucuuccacagcaagugcacuuggaaaacuucaagauguggucaaccaaaaugcacaagcuuuaaacacgcuuguuaaacaacuuagcuccaauuuuggugcaauuucaaguguuuuaaaugauauccuuucacgucuugacaaaguugaggcugaagugcaaauugauagguugaucacaggcagacuucaaaguuugcagacauaugugacucaacaauuaauuagagcugcagaaaucagagcuucugcuaaucuugcugcuacuaaaaugucagaguguguacuuggacaaucaaaaagaguugauuuuuguggaaagggcuaucaucuuauguccuucccucagucagcaccucaugguguagucuucuugcaugugacuuaugucccugcacaagaaaagaacuucacaacugcuccugccauuugucaugauggaaaagcacacuuuccucgugaaggugucuuuguuucaaauggcacacacugguuuguaacacaaaggaauuuuuaugaaccacaaaucauuacuacagacaacacauuugugucugguaacugugauguuguaauaggaauugucaacaacacaguuuaugauccuuugcaaccugaauuagacucauucaaggaggaguuagauaaauauuuuaagaaucauacaucaccagauguugauuuaggugacaucucuggcauuaaugcuucaguuguaaacauucaaaaagaaauugaccgccucaaugagguugccaagaauuuaaaugaaucucucaucgaucuccaagaacuuggaaaguaugagcaguauauaaaauggccaugguacauuuggcuagguuuuauagcuggcuugauugccauaguaauggugacaauuaugcuuugcuguaugaccaguugcuguaguugucucaagggcuguuguucuuguggauccugcugcaaauuugaugaagacgacucugagccagugcucaaaggagucaaauuacauuacacauaaggacuagucccuguucccagagcccacuuuuuuuucuuuuuuugaaauaaaauagccugucuuucagaucucaaaggcucuuuucagagccaccaaaaaaaaaaaaaaaaaaaaaaaaaaaaaaaaaaaaaaaaaaaaaaaaaaaaaaaaaaaaaaaaaaaaaaaaaaaaaaaaaaaaaaaaaaaaaaaaaaaaa

SEQ ID NO: 12245 - RNA, 4094 nt, Artificial Sequence
  SARS-CoV-2/Iceland/192/2020__EPI_ISL_417819 spike protein mRNA wt (1-1273)
aggagagucccgcagucggcguccagcggcucugcuuguucgugugugugucguugcaggccuuauucaagcuuaccauguuuguuuuuuuuguuuuauugccacuagucucuagucaguguguuaaucuuacaaccagaacucaauuacccccugcauacacuaauucuuucacacgugguguuuauuacccugacaaaguuuucagauccucaguuuuacauucaacucaggacuuguucuuaccuuucuuuuccaauguuacuugguuccaugcuauacaugucucugggaccaaugguacuaagagguuugauaacccuguccuaccauuuaaugaugguguuuauuuugcuuccacugagaagucuaacauaauaagaggcuggauuuuugguacuacuuuagauucgaagacccagucccuacuuauuguuaauaacgcuacuaauguuguuauuaaagucugugaauuucaauuuuguaaugauccauuuuuggguguuuauuaccacaaaaacaacaaaaguuggauggaaagugaguucagaguuuauucuagugcgaauaauugcacuuuugaauaugucucucagccuuuucuuauggaccuugaaggaaaacaggguaauuucaaaaaucuuagggaauuuguguuuaagaauauugaugguuauuuuaaaauauauucuaagcacacgccuauuaauuuagugcgugaucucccucaggguuuuucggcuuuagaaccauugguagauuugccaauagguauuaacaucacuagguuucaaacuuuacuugcuuuacauagaaguuauuugacuccuggugauucuucuucagguuggacagcuggugcugcagcuuauuauguggguuaucuucaaccuaggacuuuucuauuaaaauauaaugaaaauggaaccauuacagaugcuguagacugugcacuugacccucucucagaaacaaaguguacguugaaauccuucacuguagaaaaaggaaucuaucaaacuucuaacuuuagaguccaaccaacagaaucuauuguuagauuuccuaauauuacaaacuugugcccuuuuggugaaguuuuuaacgccaccagauuugcaucuguuuaugcuuggaacaggaagagaaucagcaacuguguugcugauuauucuguccuauauaauuccgcaucauuuuccacuuuuaaguguuauggagugucuccuacuaaauuaaaugaucucugcuuuacuaaugucuaugcagauucauuuguaauuagaggugaugaagucagacaaaucgcuccagggcaaacuggaaagauugcugauuauaauuauaaauuaccagaugauuuuacaggcugcguuauagcuuggaauucuaacaaucuugauucuaagguuggugguaauuauaauuaccuguauagauuguuuaggaagucuaaucucaaaccuuuugagagagauauuucaacugaaaucuaucaggccgguagcacaccuuguaaugguguugaagguuuuaauuguuacuuuccuuuacaaucauaugguuuccaacccacuaaugguguugguuaccaaccauacagaguaguaguacuuucuuuugaacuucuacaugcaccagcaacuguuuguggaccuaaaaagucuacuaauuugguuaaaaacaaaugugucaauuucaacuucaaugguuuaacaggcacagguguucuuacugagucuaacaaaaaguuucugccuuuccaacaauuuggcagagacauugcugacacuacugaugcuguccgugauccacagacacuugagauucuugacauuacaccauguucuuuugguggugucaguguuauaacaccaggaacaaauacuucuaaccagguugcuguucuuuaucaggguguuaacugcacagaagucccuguugcuauucaugcagaucaacuuacuccuacuuggcguguuuauucuacagguucuaauguuuuucaaacacgugcaggcuguuuaauaggggcugaacaugucaacaacucauaugagugugacauacccauuggugcagguauaugcgcuaguuaucagacucagacuaauucuccucggcgggcacguaguguagcuagucaauccaucauugccuacacuaugucacuuggugcagaaaauucaguugcuuacucuaauaacucuauugccauacccacaaauuuuacuauuaguguuaccacagaaauucuaccagugucuaugaccaagacaucaguagauuguacaauguacauuuguggugauucaacugaaugcagcaaucuuuuguugcaauauggcaguuuuuguacacaauuaaaccgugcuuuaacuggaauagcuguugaacaagacaaaaacacccaagaaguuuuugcacaagucaaacaaauuuacaaaacaccaccaauuaaagauuuuggugguuuuaauuuuucacaaauauuaccagauccaucaaaaccaagcaagaggucauuuauugaagaucuacuuuucaacaaagugacacuugcagaugcuggcuucaucaaacaauauggugauugccuuggugauauugcugcuagagaccucauuugugcacaaaaguuuaacggccuuacuguuuugccaccuuugcucacagaugaaaugauugcucaauacacuucugcacuguuagcggguacaaucacuucugguuggaccuuuggugcaggugcugcauuacaaauaccauuugcuaugcaaauggcuuauagguuuaaugguauuggaguuacacagaauguucucuaugagaaccaaaaauugauugccaaccaauuuaauagugcuauuggcaaaauucaagacucacuuucuuccacagcaagugcacuuggaaaacuucaagauguggucaaccaaaaugcacaagcuuuaaacacgcuuguuaaacaacuuagcuccaauuuuggugcaauuucaaguguuuuaaaugauauccuuucacgucuugacaaaguugaggcugaagugcaaauugauagguugaucacaggcagacuucaaaguuugcagacauaugugacucaacaauuaauuagagcugcagaaaucagagcuucugcuaaucuugcugcuacuaaaaugucagaguguguacuuggacaaucaaaaagaguugauuuuuguggaaagggcuaucaucuuauguccuucccucagucagcaccucaugguguagucuucuugcaugugacuuaugucccugcacaagaaaagaacuucacaacugcuccugccauuugucaugauggaaaagcacacuuuccucgugaaggugucuuuguuucaaauggcacacacugguuuguaacacaaaggaauuuuuaugaaccacaaaucauuacuacagacaacacauuugugucugguaacugugauguuguaauaggaauugucaacaacacaguuuaugauccuuugcaaccugaauuagacucauucaaggaggaguuagauaaauauuuuaagaaucauacaucaccagauguugauuuaggugacaucucuggcauuaaugcuucaguuguaaacauucaaaaagaaauugaccgccucaaugagguugccaagaauuuaaaugaaucucucaucgaucuccaagaacuuggaaaguaugagcaguauauaaaauggccaugguacauuuggcuagguuuuauagcuggcuugauugccauaguaauggugacaauuaugcuuugcuguaugaccaguugcuguaguugucucaagggcuguuguucuuguggauccugcugcaaauuugaugaagacgacucugagccagugcucaaaggagucaaauuacauuacacauaaggacuagucccuguucccagagcccacuuuuuuuucuuuuuuugaaauaaaauagccugucuuucagaucucaaaggcucuuuucagagccaccaaaaaaaaaaaaaaaaaaaaaaaaaaaaaaaaaaaaaaaaaaaaaaaaaaaaaaaaaaaaaaaaaaaaaaaaaaaaaaaaaaaaaaaaaaaaaaaaaaaaa

SEQ ID NO: 12246 - RNA, 4094 nt, Artificial Sequence
  SARS-CoV-2/Belgium/ULG-6939/2020__EPI_ISL_417020 spike protein mRNA wt (1-1273)
aggagagucccgcagucggcguccagcggcucugcuuguucgugugugugucguugcaggccuuauucaagcuuaccauguuuguuuuucuuguuuuauugccacuagucucuagucaguguguuaaucuuacaaccagaacucaauuacccccugcauacacuaauucuuucacacgugguguuuauuacccugacaaaguuuucagauccucaguuuuacauucaacucaggacuuguucuuaccuuucuuuuccaauguuacuugguuccaugcuauacaugucucugggaccaaugguacuaagagguuugauaacccuguccuaccauuuaaugaugguguuuauuuugcuuccacugagaagucuaacauaauaagaggcuggauuuuugguacuacuuuagauucgaagacccagucccuacuuauuguuaauaacgcuacuaauguuguuauuaaagucugugaauuucaauuuuguaaugauccauuuuuggguguuuauuaccacaaaaacaacaaaaguuggauggaaagugaguucagaguuuauucuagugcgaauaauugcacuuuugaauaugucucucagccuuuucuuauggaccuugaaggaaaacaggguaauuucaaaaaucuuagggaauuuguguuuaagaauauugaugguuauuuuaaaauauauucuaagcacacgccuauuaauuuagugcgugaucucccucaggguuuuucggcuuuagaaccauugguagauuugccaauagguauuaacaucacuagguuucaaacuuuacuugcuuuacauagaaguuauuugacuccuggugauucuucuucagguuggacagcuggugcugcagcuuauuauguggguuaucuucaaccuaggacuuuucuauuaaaauauaaugaaaauggaaccauuacagaugcuguagacugugcacuugacccucucucagaaacaaaguguacguugaaauccuucacuguagaaaaaggaaucuaucaaacuucuaacuuuagaguccaaccaacagaaucuauuguuagauuuccuaauauuacaaacuugugcccuuuuggugaaguuuuuaacgccaccagauuugcaucuguuuaugcuuggaacaggaagagaaucagcaacuguguugcugauuauucuguccuauauaauuccgcaucauuuuccacuuuuaaguguuauggagugucuccuacuaaauuaaaugaucucugcuuuacuaaugucuaugcagauucauuuguaauuagaggugaugaagucagacaaaucgcuccagggcaaacuggaaagauugcugauuauaauuauaaauuaccagaugauuuuacaggcugcguuauagcuuggaauucuaacaaucuugauucuaagguuggugguaauuauaauuaccuguauagauuguuuaggaagucuaaucucaaaccuuuugagagagauauuucaacugaaaucuaucaggccgguagcacaccuuguaaugguguugaagguuuuaauuguuacuuuccuuuacaaucauaugguuuccaacccacuaaugguguugguuaccaaccauacagaguaguaguacuuucuuuugaacuucuacaugcaccagcaacuguuuguggaccuaaaaagucuacuaauuugguuaaaaacaaaugugucaauuucaacuucaaugguuuaacaggcacagguguucuuacugagucuaacaaaaaguuucugccuuuccaacaauuuggcagagacauugcugacacuacugaugcuguccgugauccacagacacuugagauucuugacauuacaccauguucuuuugguggugucaguguuauaacaccaggaacaaauacuucuaaccagguugcuguucuuuaucaggguguuaacugcacagaagucccuguugcuauucaugcagaucaacuuacuccuacuuggcguguuuauucuacagguucuaauguuuuucaaacacgugcaggcuguuuaauaggggcugaacaugucaacaacucauaugagugugacauacccauuggugcagguauaugcgcuaguuaucagacucagacuaauucuccucggcgggcacguaguguagcuagucaauccaucauugccuacacuaugucacuuggugcagaaaauucaguuguuuacucuaauaacucuauugccauacccacaaauuuuacuauuaguguuaccacagaaauucuaccagugucuaugaccaagacaucaguagauuguacaauguacauuuguggugauucaacugaaugcagcaaucuuuuguugcaauauggcaguuuuuguacacaauuaaaccgugcuuuaacuggaauagcuguugaacaagacaaaaacacccaagaaguuuuugcacaagucaaacaaauuuacaaaacaccaccaauuaaagauuuuggugguuuuaauuuuucacaaauauuaccagauccaucaaaaccaagcaagaggucauuuauugaagaucuacuuuucaacaaagugacacuugcagaugcuggcuucaucaaacaauauggugauugccuuggugauauugcugcuagagaccucauuugugcacaaaaguuuaacggccuuacuguuuugccaccuuugcucacagaugaaaugauugcucaauacacuucugcacuguuagcggguacaaucacuucugguuggaccuuuggugcaggugcugcauuacaaauaccauuugcuaugcaaauggcuuauagguuuaaugguauuggaguuacacagaauguucucuaugagaaccaaaaauugauugccaaccaauuuaauagugcuauuggcaaaauucaagacucacuuucuuccacagcaagugcacuuggaaaacuucaagauguggucaaccaaaaugcacaagcuuuaaacacgcuuguuaaacaacuuagcuccaauuuuggugcaauuucaaguguuuuaaaugauauccuuucacgucuugacaaaguugaggcugaagugcaaauugauagguugaucacaggcagacuucaaaguuugcagacauaugugacucaacaauuaauuagagcugcagaaaucagagcuucugcuaaucuugcugcuacuaaaaugucagaguguguacuuggacaaucaaaaagaguugauuuuuguggaaagggcuaucaucuuauguccuucccucagucagcaccucaugguguagucuucuugcaugugacuuaugucccugcacaagaaaagaacuucacaacugcuccugccauuugucaugauggaaaagcacacuuuccucgugaaggugucuuuguuucaaauggcacacacugguuuguaacacaaaggaauuuuuaugaaccacaaaucauuacuacagacaacacauuugugucugguaacugugauguuguaauaggaauugucaacaacacaguuuaugauccuuugcaaccugaauuagacucauucaaggaggaguuagauaaauauuuuaagaaucauacaucaccagauguugauuuaggugacaucucuggcauuaaugcuucaguuguaaacauucaaaaagaaauugaccgccucaaugagguugccaagaauuuaaaugaaucucucaucgaucuccaagaacuuggaaaguaugagcaguauauaaaauggccaugguacauuuggcuagguuuuauagcuggcuugauugccauaguaauggugacaauuaugcuuugcuguaugaccaguugcuguaguugucucaagggcuguuguucuuguggauccugcugcaaauuugaugaagacgacucugagccagugcucaaaggagucaaauuacauuacacauaaggacuagucccuguucccagagcccacuuuuuuuucuuuuuuugaaauaaaauagccugucuuucagaucucaaaggcucuuuucagagccaccaaaaaaaaaaaaaaaaaaaaaaaaaaaaaaaaaaaaaaaaaaaaaaaaaaaaaaaaaaaaaaaaaaaaaaaaaaaaaaaaaaaaaaaaaaaaaaaaaaaaa

SEQ ID NO: 12247 - RNA, 4094 nt, Artificial Sequence
  SARS-CoV-2/France/HF2496/2020__EPI_ISL_418231 spike protein mRNA wt (1-1273)
aggagagucccgcagucggcguccagcggcucugcuuguucgugugugugucguugcaggccuuauucaagcuuaccauguuuguuuuucuuguuuuauugccacuagucucuagucaguguguuaaucuuacaaccagaacucaauuacccccugcauacacuaauucuuucacacgugguguuuauuacccugacaaaguuuucagauccucaguuuuacauucaacucaggacuuguucuuaccuuucuuuuccaauguuacuugguuccaugcuauacaugucucugggaccaaugguacuaagagguuugauaacccuguccuaccauuuaaugaugguguuuauuuugcuuccacugagaagucuaacauaauaagaggcuggauuuuugguacuacuuuagauucgaagacccagucccuacuuauuguuaauaacgcuacuaauguuguuauuaaagucugugaauuucaauuuuguaaugauccauuuuuggguguuuauuaccacaaaaacaacaaaaguuggauggaaagugaguucagaguuuauucuagugcgaauaauugcacuuuugaauaugucucucagccuuuucuuauggaccuugaaggaaaacaggguaauuucaaaaaucuuagggaauuuguguuuaagaauauugaugguuauuuuaaaauauauucuaagcacacgccuauuaauuuagugcgugaucucccucaggguuuuucggcuuuagaaccauugguagauuugccaauagguauuaacaucacuagguuucaaacuuuacuugcuuuacauagaaguuauuugacuccuggugauucuucuucagguuggacagcuggugcugcagcuuauuauguggguuaucuucaaccuaggacuuuucuauuaaaauauaaugaaaauggaaccauuacagaugcuguagacugugcacuugacccucucucagaaacaaaguguacguugaaauccuucacuguagaaaaaggaaucuaucaaacuucuaacuuuagaguccaaccaacagaaucuauuguuagauuuccuaauauuacaaacuugugcccuuuuggugaaguuuuuaacgccaccagauuugcaucuguuuaugcuuggaacaggaagagaaucagcaacuguguugcugauuauucuguccuauauaauuccgcaucauuuuccacuuuuaaguguuauggagugucuccuacuaaauuaaaugaucucugcuuuacuaaugucuaugcagauucauuuguaauuagaggugaugaagucagacaaaucgcuccagggcaaacuggaaagauugcugauuauaauuauaaauuaccagaugauuuuacaggcugcguuauagcuuggaauucuaacaaucuugauucuaagguuggugguaauuauaauuaccuguauagauuguuuaggaagucuaaucucaaaccuuuugagagagauauuucaacugaaaucuaucaggccgguagcacaccuuguaaugguguugaagguuuuaauuguuacuuuccuuuacaaucauaugguuuccaacccacuaaugguguugguuaccaaccauacagaguaguaguacuuucuuuugaacuucuacaugcaccagcaacuguuuguggaccuaaaaagucuacuaauuugguuaaaaacaaaugugucaauuucaacuucaaugguuuaacaggcacagguguucuuacugagucuaacaaaaaguuucugccuuuccaacaauuuggcagagacauugcugacacuacugaugcuguccgugauccacagacacuugagauucuugacauuacaccauguucuuuugguggugucaguguuauaacaccaggaacaaauacuucuaaccagguugcuguucuuuaucaggguguuaacugcacagaagucccuguugcuauucaugcagaucaacuuacuccuacuuggcguguuuauucuacagguucuaauguuuuucaaacacgugcaggcuguuuaauaggggcugaacaugucaacaacucauaugagugugacauacccauuggugcagguauaugcgcuaguuaucagacucagacuaauucuccucggcgggcacguaguguagcuagucaauccaucauugccuacacuaugucacuuggugcagaaaauucaguugcuuacucuaauaacucuauugccauacccacaaauuuuacuauuaguguuaccacagaaauucuaccagugucuaugaccaagacaucaguagauuguacaauguacauuuguggugauucaacugaaugcagcaaucuuuuguugcaauauggcaguuuuuguacacaauuaaaccgugcuuuaacuggaauagcuguugaacaagacaaaaacacccaagaaguuuuugcacaagucaaacaaauuuacaaaacaccaccaauuaaagauuuuggugguuuuaauuuuucacaaauauuaccagauccaucaaaaccaagcaagaggucauuuauugaagaucuacuuuucaacaaagugacacuugcagaugcuggcuucaucaaacaauauggugauugccuuggugauauuguugcuagagaccucauuugugcacaaaaguuuaacggccuuacuguuuugccaccuuugcucacagaugaaaugauugcucaauacacuucugcacuguuagcggguacaaucacuucugguuggaccuuuggugcaggugcugcauuacaaauaccauuugcuaugcaaauggcuuauagguuuaaugguauuggaguuacacagaauguucucuaugagaaccaaaaauugauugccaaccaauuuaauagugcuauuggcaaaauucaagacucacuuucuuccacagcaagugcacuuggaaaacuucaagauguggucaaccaaaaugcacaagcuuuaaacacgcuuguuaaacaacuuagcuccaauuuuggugcaauuucaaguguuuuaaaugauauccuuucacgucuugacaaaguugaggcugaagugcaaauugauagguugaucacaggcagacuucaaaguuugcagacauaugugacucaacaauuaauuagagcugcagaaaucagagcuucugcuaaucuugcugcuacuaaaaugucagaguguguacuuggacaaucaaaaagaguugauuuuuguggaaagggcuaucaucuuauguccuucccucagucagcaccucaugguguagucuucuugcaugugacuuaugucccugcacaagaaaagaacuucacaacugcuccugccauuugucaugauggaaaagcacacuuuccucgugaaggugucuuuguuucaaauggcacacacugguuuguaacacaaaggaauuuuuaugaaccacaaaucauuacuacagacaacacauuugugucugguaacugugauguuguaauaggaauugucaacaacacaguuuaugauccuuugcaaccugaauuagacucauucaaggaggaguuagauaaauauuuuaagaaucauacaucaccagauguugauuuaggugacaucucuggcauuaaugcuucaguuguaaacauucaaaaagaaauugaccgccucaaugagguugccaagaauuuaaaugaaucucucaucgaucuccaagaacuuggaaaguaugagcaguauauaaaauggccaugguacauuuggcuagguuuuauagcuggcuugauugccauaguaauggugacaauuaugcuuugcuguaugaccaguugcuguaguugucucaagggcuguuguucuuguggauccugcugcaaauuugaugaagacgacucugagccagugcucaaaggagucaaauuacauuacacauaaggacuagucccuguucccagagcccacuuuuuuuucuuuuuuugaaauaaaauagccugucuuucagaucucaaaggcucuuuucagagccaccaaaaaaaaaaaaaaaaaaaaaaaaaaaaaaaaaaaaaaaaaaaaaaaaaaaaaaaaaaaaaaaaaaaaaaaaaaaaaaaaaaaaaaaaaaaaaaaaaaaaa

SEQ ID NO: 12248 - RNA, 4094 nt, Artificial Sequence
  SARS-CoV-2/USA/WA-UW291/2020__EPI_ISL_418076 spike protein mRNA wt (1-1273)
aggagagucccgcagucggcguccagcggcucugcuuguucgugugugugucguugcaggccuuauucaagcuuaccauguuuguuuuucuuguuuuauugccacuagucucuagucaguguguuaaucuuacaaccagaacucaauuacccccugcauacacuaauucuuucacacgugguguuuauuacccugacaaaguuuucagauccucaguuuuacauucaacucaggacuuguucuuaccuuucuuuuccaauguuacuugguuccaugcuauacaugucucugggaccaaugguacuaagagguuugauaacccuguccuaccauuuaaugaugguguuuauuuugcuuccacugagaagucuaacauaauaagaggcuggauuuuugguacuacuuuagauucgaagacccagucccuacuuauuguuaauaacgcuacuaauguuguuauuaaagucugugaauuucaauuuuguaaugauccauuuuuggguguuuauuaccacaaaaacaacaaaaguuggauggaaagugaguucagaguuuauucuagugcgaauaauugcacuuuugaauaugucucucagccuuuucuuauggaccuugaaggaaaacaggguaauuucaaaaaucuuagggaauuuguguuuaagaauauugaugguuauuuuaaaauauauucuaagcacacgccuauuaauuuagugcgugaucucccucaggguuuuucggcuuuagaaccauugguagauuugccaauagguauuaacaucacuagguuucaaacuuuacuugcuuuacauagaaguuauuugacuccuggugauucuucuucagguuggacagcuggugcugcagcuuauuauguggguuaucuucaaccuaggacuuuucuauuaaaauauaaugaaaauggaaccauuacagaugcuguagacugugcacuugacccucucucagaaacaaaguguacguugaaauccuucacuguagaaaaaggaaucuaucaaacuucuaacuuuagaguccaaccaacagaaucuauuguuagauuuccuaauauuacaaacuugugcccuuuuggugaaguuuuuaacgccaccagauuugcaucuguuuaugcuuggaacaggaagagaaucagcaacuguguugcugauuauucuguccuauauaauuccgcaucauuuuccacuuuuaaguguuauggagugucuccuacuaaauuaaaugaucucugcuuuacuaaugucuaugcagauucauuuguaauuagaggugaugaagucagacaaaucgcuccagggcaaacuggaaagauugcugauuauaauuauaaauuaccagaugauuuuacaggcugcguuauagcuuggaauucuaacaaucuugauucuaagguuggugguaauuauaauuaccuguauagauuguuuaggaagucuaaucucaaaccuuuugagagagauauuucaacugaaaucuaucaggccgguagcacaccuuguaaugguguugaagguuuuaauuguuacuuuccuuuacaaucauaugguuuccaacccacuaaugguguugguuaccaaccauacagaguaguaguacuuucuuuugaacuucuacaugcaccagcaacuguuuguggaccuaaaaagucuacuaauuugguuaaaaacaaaugugucaauuucaacuucaaugguuuaacaggcacagguguucuuacugagucuaacaaaaaguuucugccuuuccaacaauuuggcagagacauugcugacacuacugaugcuguccgugauccacagacacuugagauucuugacauuacaccauguucuuuugguggugucaguguuauaacaccaggaacaaauacuucuaaccagguugcuguucuuuaucaggguguuaacugcacagaagucccuguugcuauucaugcagaucaacuuacuccuacuuggcguguuuauucuacagguucuaauguuuuucaaacacgugcaggcuguuuaauaggggcugaacaugucaacaacucauaugagugugacauacccauuggugcagguauaugcgcuaguuaucagacucagacuaauucuccucggcgggcacguaguguagcuagucaauccaucauugccuacacuaugucacuuggugcagaaaauucaguugcuuacucuaauaacucuauugccauacccacaaauuuuacuauuaguguuaccacagaaauucuaccagugucuaugaccaagacaucaguagauuguacaauguacauuuguggugauucaacugaaugcagcaaucuuuuguugcaauauggcaguuuuuguacacaauuaaaccgugcuuuaacuggaauagcuguugaacaagacaaaaacacccaagaaguuuuugcacaagucaaacaaauuuacaaaacaccaccaauuaaagauuuuggugguuuuaauuuuucacaaauauuaccagauccaucaaaaccaagcaagaggucauuuauugaagaucuacuuuucaacaaagugacacuugcagaugcuggcuucaucaaacaauauggugauugccuuggugauauugcugcuagagaccucauuugugcacaaaaguuuaacggccuuacuguuuugccaccuuugcucacagaugaaaugauugcucaauacacuucugcacuguuagcggguacaaucacuucugguuggaccuuuggugcaggugcugcauuacaaauaccauuugcuaugcaaauggcuuauagguuuaaugguauuggaguuacacagaauguucucuaugagaaccaaaaauugauugccaaccaauuuaauagugcuauuggcaaaauucaauacucacuuucuuccacagcaagugcacuuggaaaacuucaagauguggucaaccaaaaugcacaagcuuuaaacacgcuuguuaaacaacuuagcuccaauuuuggugcaauuucaaguguuuuaaaugauauccuuucacgucuugacaaaguugaggcugaagugcaaauugauagguugaucacaggcagacuucaaaguuugcagacauaugugacucaacaauuaauuagagcugcagaaaucagagcuucugcuaaucuugcugcuacuaaaaugucagaguguguacuuggacaaucaaaaagaguugauuuuuguggaaagggcuaucaucuuauguccuucccucagucagcaccucaugguguagucuucuugcaugugacuuaugucccugcacaagaaaagaacuucacaacugcuccugccauuugucaugauggaaaagcacacuuuccucgugaaggugucuuuguuucaaauggcacacacugguuuguaacacaaaggaauuuuuaugaaccacaaaucauuacuacagacaacacauuugugucugguaacugugauguuguaauaggaauugucaacaacacaguuuaugauccuuugcaaccugaauuagacucauucaaggaggaguuagauaaauauuuuaagaaucauacaucaccagauguugauuuaggugacaucucuggcauuaaugcuucaguuguaaacauucaaaaagaaauugaccgccucaaugagguugccaagaauuuaaaugaaucucucaucgaucuccaagaacuuggaaaguaugagcaguauauaaaauggccaugguacauuuggcuagguuuuauagcuggcuugauugccauaguaauggugacaauuaugcuuugcuguaugaccaguugcuguaguugucucaagggcuguuguucuuguggauccugcugcaaauuugaugaagacgacucugagccagugcucaaaggagucaaauuacauuacacauaaggacuagucccuguucccagagcccacuuuuuuuucuuuuuuugaaauaaaauagccugucuuucagaucucaaaggcucuuuucagagccaccaaaaaaaaaaaaaaaaaaaaaaaaaaaaaaaaaaaaaaaaaaaaaaaaaaaaaaaaaaaaaaaaaaaaaaaaaaaaaaaaaaaaaaaaaaaaaaaaaaaaa

SEQ ID NO: 12249 - RNA, 4094 nt, Artificial Sequence
  SARS-CoV-2/Portugal/PT0034/2020__EPI_ISL_418019 spike protein mRNA wt (1-1273)
aggagagucccgcagucggcguccagcggcucugcuuguucgugugugugucguugcaggccuuauucaagcuuaccauguuuguuuuucuuguuuuauugccacuagucucuagucaguguguuaaucuuacaaccagaacucaauuacccccugcauacacuaauucuuucacacgugguguuuauuacccugacaaaguuuucagauccucaguuuuacauucaacucaggacuuguucuuaccuuucuuuuccaauguuacuugguuccaugcuauacaugucucugggaccaaugguacuaagagguuugauaacccuguccuaccauuuaaugaugguguuuauuuugcuuccacugagaagucuaacauaauaagaggcuggauuuuugguacuacuuuagauucgaagacccagucccuacuuauuguuaauaacgcuacuaauguuguuauuaaagucugugaauuucaauuuuguaaugauccauuuuuggguguuuauuaccacaaaaacaacaaaaguuggauggaaagugaguucagaguuuauucuagugcgaauaauugcacuuuugaauaugucucucagccuuuucuuauggaccuugaaggaaaacaggguaauuucaaaaaucuuagggaauuuguguuuaagaauauugaugguuauuuuaaaauauauucuaagcacacgccuauuaauuuagugcgugaucucccucaggguuuuucggcuuuagaaccauugguagauuugccaauagguauuaacaucacuagguuucaaacuuuacuugcuuuacauagaaguuauuugacuccuggugauucuucuucagguuggacagcuggugcugcagcuuauuauguggguuaucuucaaccuaggacuuuucuauuaaaauauaaugaaaauggaaccauuacagaugcuguagacugugcacuugacccucucucagaaacaaaguguacguugaaauccuucacuguagaaaaaggaaucuaucaaacuucuaacuuuagaguccaaccaacagaaucuauuguuagauuuccuaauauuacaaacuugugcccuuuuggugaaguuuuuaacgccaccagauuugcaucuguuuaugcuuggaacaggaagagaaucagcaacuguguugcugauuauucuguccuauauaauuccgcaucauuuuccacuuuuaaguguuauggagugucuccuacuaaauuaaaugaucucugcuuuacuaaugucuaugcagauucauuuguaauuagaggugaugaagucagacaaaucgcuccagggcaaacuggaaagauugcugauuauaauuauaaauuaccagaugauuuuacaggcugcguuauagcuuggaauucuaacaaucuugauucuaagguuggugguaauuauaauuaccuguauagauuguuuaggaagucuaaucucaaaccuuuugagagagauauuucaacugaaaucuaucaggccgguagcacaccuuguaaugguguugaagguuuuaauuguuacuuuccuuuacaaucauaugguuuccaacccacuaaugguguugguuaccaaccauacagaguaguaguacuuucuuuugaacuucuacaugcaccagcaacuguuuguggaccuaaaaagucuacuaauuugguuaaaaacaaaugugucaauuucaacuucaaugguuuaacaggcacagguguucuuacugagucuaacaaaaaguuucugccuuuccaacaauuuggcagagacauugcugacacuacugaugcuguccgugauccacagacacuugagauucuugacauuacaccauguucuuuugguggugucaguguuauaacaccaggaacaaauacuucuaaccagguugcuguucuuuaucaggguguuaacugcacagaagucccuguugcuauucaugcagaucaacuuacuccuacuuggcguguuuauucuacagguucuaauguuuuucaaacacgugcaggcuguuuaauaggggcugaacaugucaacaacucauaugagugugacauacccauuggugcagguauaugcgcuaguuaucagacucagacuaauucuccucggcgggcacguaguguagcuagucaauccaucauugccuacacuaugucacuuggugcagaaaauucaguugcuuacucuaauaacucuauugccauacccacaaauuuuacuauuaguguuaccacagaaauucuaccagugucuaugaccaagacaucaguagauuguacaauguacauuuguggugauucaacugaaugcagcaaucuuuuguugcaauauggcaguuuuuguacacaauuaaaccgugcuuuaacuggaauagcuguugaacaagacaaaaacacccaagaaguuuuugcacaagucaaacaaauuuacaaaacaccaccaauuaaagauuuuggugguuuuaauuuuucacaaauauuaccagauccaucaaaaccaagcaagaggucauuuauugaagaucuacuuuucaacaaagugacacuugcagaugcuggcuucaucaaacaauauggugauugccuuggugauauugcugcuagagaccucauuugugcacaaaaguuuaacggccuuacuguuuugccaccuuugcucacagaugaaaugauugcucaauacacuucugcacuguuagcggguacaaucacuucugguuggaccuuuggugcaggugcugcauuacaaauaccauuugcuaugcaaauggcuuauagguuuaaugguauuggaguuacacagaauguucucuaugagaaccaaaaauugauugccaaccaauuuaauagugcuauuggcaaaauucaagacucacuuucuuccacagcaagugcacuuggaaaacuucaagauguggucaaccaaaaugcacaagcuuuaaacacgcuuguuaaacaacuuagcuccaauuuuggugcaauuucaaguguuuuaaaugauauccuuucacgucuugacaaaguugaggcugaagugcaaauugauagguugaucacaggcagacuucaaaguuugcagacauaugugacucaacaauuaauuagagcugcagaaaucagagcuucugcuaaucuugcugcuacuaaaaugucagaguguguacuuggacaaucaaaaagaguugauuuuuguggaaagggcuaucaucuuauguccuucccucagucagcaccucaugguguagucuucuugcaugugacuuaugucccugcacaagaaaagaacuucacaacugcuccugccauuugucaugauggaaaagcacacuuuccucgugaaggugucuuuguuucaaauggcacacacugguuuguaacacaaaggaauuuuuaugaaccacaaaucauuacuacagacaacacauuugugucugguaacugugauguuguaauaggaauugucaacaacacaguuuaugauccuuugcaaccugaauuagacucauucaaggaggaguuagauaaauauuuuaagaaucauacaucaccagauguugauuuaggugacaucucuggcauuaaugcuucaguuguaaacauucaaaaagaaauugaccgccucaaugagguugccaagaauuuaaaugaaucucucaucgaucuccaagaacuuggaaaguaugagcaguauauaaaauggccaugguacauuuggcuagguuuuauagcuggcuugauugccauaguaauggugacaauuaugcuuugcuguauuaccaguugcuguaguugucucaagggcuguuguucuuguggauccugcugcaaauuugaugaagacgacucugagccagugcucaaaggagucaaauuacauuacacauaaggacuagucccuguucccagagcccacuuuuuuuucuuuuuuugaaauaaaauagccugucuuucagaucucaaaggcucuuuucagagccaccaaaaaaaaaaaaaaaaaaaaaaaaaaaaaaaaaaaaaaaaaaaaaaaaaaaaaaaaaaaaaaaaaaaaaaaaaaaaaaaaaaaaaaaaaaaaaaaaaaaaa

SEQ ID NO: 12250 - RNA, 4094 nt, Artificial Sequence
  SARS-CoV-2/Iceland/202/2020__EPI_ISL_417750 spike protein mRNA wt (1-1273)
aggagagucccgcagucggcguccagcggcucugcuuguucgugugugugucguugcaggccuuauucaagcuuaccauguuuguuuuucuuguuuuauugccacuagucucuagucaguguguuaaucuuacaaccagaacucaauuacccccugcauacacuaauucuuucacacgugguguuuauuacccugacaaaguuuucagauccucaguuuuacauucaacucaggacuuguucuuaccuuucuuuuccaauguuacuugguuccaugcuauacaugucucugggaccaaugguacuaagagguuugauaacccuguccuaccauuuaaugaugguguuuauuuugcuuccacugagaagucuaacauaauaagaggcuggauuuuugguacuacuuuagauucgaagacccagucccuacuuauuguuaauaacgcuacuaauguuguuauuaaagucugugaauuucaauuuuguaaugauccauuuuuggguguuuauuaccacaaaaacaacaaaaguuggauggaaagugaguucagaguuuauucuagugcgaauaauugcacuuuugaauaugucucucagccuuuucuuauggaccuugaaggaaaacaggguaauuucaaaaaucuuagggaauuuguguuuaagaauauugaugguuauuuuaaaauauauucuaagcacacgccuauuaauuuagugcgugaucucccucaggguuuuucggcuuuagaaccauugguagauuugccaauagguauuaacaucacuagguuucaaacuuuacuugcuuuacauagaaguuauuugacuccuggugauucuucuucagguuggacagcuggugcugcagcuuauuauguggguuaucuucaaccuaggacuuuucuauuaaaauauaaugaaaauggaaccauuacagaugcuguagacugugcacuugacccucucucagaaacaaaguguacguugaaauccuucacuguagaaaaaggaaucuaucaaacuucuaacuuuagaguccaaccaacagaaucuauuguuagauuuccuaauauuacaaacuugugcccuuuuggugaaguuuuuaacgccaccagauuugcaucuguuuaugcuuggaacaggaagagaaucagcaacuguguugcugauuauucuguccuauauaauuccgcaucauuuuccacuuuuaaguguuauggagugucuccuacuaaauuaaaugaucucugcuuuacuaaugucuaugcagauucauuuguaauuagaggugaugaagucagacaaaucgcuccagggcaaacuggaaagauugcugauuauaauuauaaauuaccagaugauuuuacaggcugcguuauagcuuggaauucuaacaaucuugauucuaagguuggugguaauuauaauuaccuguauagauuguuuaggaagucuaaucucaaaccuuuugagagagauauuucaacugaaaucuaucaggccgguagcacaccuuguaaugguguugaagguuuuaauuguuacuuuccuuuacaaucauaugguuuccaacccacuaaugguguugguuaccaaccauacagaguaguaguacuuucuuuugaacuucuacaugcaccagcaacuguuuguggaccuaaaaagucuacuaauuugguuaaaaacaaaugugucaauuucaacuucaaugguuuaacaggcacagguguucuuacugagucuaacaaaaaguuucugccuuuccaacaauuuggcagagacauugcugacacuacugaugcuguccgugauccacagacacuugagauucuugacauuacaccauguucuuuugguggugucaguguuauaacaccaggaacaaauacuucuaaccagguugcuguucuuuaucaggauguuaacugcacagaagucccuguugcuauucaugcagaucaacuuacuccuacuuggcguguuuauucuacagguucuaauguuuuucaaacacgugcaggcuguuuaauaggggcugaacaugucaacaacucauaugagugugacauacccauuggugcagguauaugcgcuaguuaucagacucagacuaauucuccucggcgggcacguaguguagcuagucaauccaucauugccuacacuaugucacuuggugcagaaaauucaguugcuuacucuaauaacucuauugccauacccacaaauuuuacuauuaguguuaccacagaaauucuaccagugucuaugaccaagacaucaguagauuguacaauguacauuuguggugauucaacugaaugcagcaaucuuuuguugcaauauggcaguuuuuguacacaauuaaaccgugcuuuaacuggaauagcuguugaacaagacaaaaacacccaagaaguuuuugcacaagucaaacaaauuuacaaaacaccaccaauuaaagauuuuggugguuuuaauuuuucacaaauauuaccagauccaucaaaaccaagcaagaggucauuuauugaagaucuacuuuucaacaaagugacacuugcagaugcuggcuucaucaaacaauauggugauugccuuggugauauugcugcuagagaccucauuugugcacaaaaguuuaacggccuuacuguuuugccaccuuugcucacagaugaaaugauugcucaauacacuucugcacuguuagcggguacaaucacuucugguuggaccuuuggugcaggugcugcauuacaaauaccauuugcuaugcaaauggcuuauagguuuaaugguauuggaguuacacagaauguucucuaugagaaccaaaaauugauugccaaccaauuuaauagugcuauuggcaaaauucaagacucacuuucuuccacagcaagugcacuuggaaaacuucaagauguggucaaccaaaaugcacaagcuuuaaacacgcuuguuaaacaacuuagcuccaauuuuggugcaauuucaaguguuuuaaaugauauccuuucacgucuugacaaaguugaggcugaagugcaaauugauagguugaucacaggcagacuucaaaguuugcagacauaugugacucaacaauuaauuagagcugcagaaaucagagcuucugcuaaucuugcugcuacuaaaaugucagaguguguacuuggacaaucaaaaagaguugauuuuuguggaaagggcuaucaucuuauguccuucccucagucagcaccucaugguguagucuucuugcaugugacuuaugucccugcacaagaaaagaacuucacaacugcuccugccauuugucaugauggaaaagcacacuuuccucgugaaggugucuuuguuucaaauggcacacacugguuuguaacacaaaggaauuuuuaugaaccacaaaucauuacuacagacaacacauuugugucugguaacugugauguuguaauaggaauugucaacaacacaguuuaugauccuuugcaaccugaauuagacucauucaaggaggaguuagauaaauauuuuaagaaucauacaucaccagauguugauuuaggugacaucccuggcauuaaugcuucaguuguaaacauucaaaaagaaauugaccgccucaaugagguugccaagaauuuaaaugaaucucucaucgaucuccaagaacuuggaaaguaugagcaguauauaaaauggccaugguacauuuggcuagguuuuauagcuggcuugauugccauaguaauggugacaauuaugcuuugcuguaugaccaguugcuguaguugucucaagggcuguuguucuuguggauccugcugcaaauuugaugaagacgacucugagccagugcucaaaggagucaaauuacauuacacauaaggacuagucccuguucccagagcccacuuuuuuuucuuuuuuugaaauaaaauagccugucuuucagaucucaaaggcucuuuucagagccaccaaaaaaaaaaaaaaaaaaaaaaaaaaaaaaaaaaaaaaaaaaaaaaaaaaaaaaaaaaaaaaaaaaaaaaaaaaaaaaaaaaaaaaaaaaaaaaaaaaaaa

SEQ ID NO: 12251 - RNA, 4094 nt, Artificial Sequence
  SARS-CoV-2/USA/WA-UW261/2020__EPI_ISL_418046 spike protein mRNA wt (1-1273)
aggagagucccgcagucggcguccagcggcucugcuuguucgugugugugucguugcaggccuuauucaagcuuaccauguuuguuuuucuuguuuuauugccacuagucucuagucaguguguuaaucuuacaaccagaacucaauuacccccugcauacacuaauucuuucacacgugguguuuauuacccugacaaaguuuucagauccucaguuuuacauucaacucaggacuuguucuuaccuuucuuuuccaauguuacuugguuccaugcuauacaugucucugggaccaaugguacuaagagguuugauaacccuguccuaccauuuaaugaugguguuuauuuugcuuccacugagaagucuaacauaauaagaggcuggauuuuugguacuacuuuagauucgaagacccagucccuacuuauuguuaauaacgcuacuaauguuguuauuaaagucugugaauuucaauuuuguaaugauccauuuuuggguguuuauuaccacaaaaacaacaaaaguuggauggaaagugaguucagaguuuauucuagugcgaauaauugcacuuuugaauaugucucucagccuuuucuuauggaccuugaaggaaaacaggguaauuucaaaaaucuuagggaauuuguguuuaagaauauugaugguuauuuuaaaauauauucuaagcacacgccuauuaauuuagugcgugaucucccucaggguuuuucggcuuuagaaccauugguagauuugccaauagguauuaacaucacuagguuucaaacuuuacuugcuuuacauagaaguuauuugacuccuggugauucuucuucagguuggacagcuggugcugcagcuuauuauguggguuaucuucaaccuaggacuuuucuauuaaaauauaaugaaaauggaaccauuacagaugcuguagacugugcacuugacccucucucagaaacaaaguguacguugaaauccuucacuguagaaaaaggaaucuaucaaacuucuaacuuuagaguccaaccaacagaaucuauuguuagauuuccuaauauuacaaacuugugcccuuuuggugaaguuuuuaacgccaccagauuuacaucuguuuaugcuuggaacaggaagagaaucagcaacuguguugcugauuauucuguccuauauaauuccgcaucauuuuccacuuuuaaguguuauggagugucuccuacuaaauuaaaugaucucugcuuuacuaaugucuaugcagauucauuuguaauuagaggugaugaagucagacaaaucgcuccagggcaaacuggaaagauugcugauuauaauuauaaauuaccagaugauuuuacaggcugcguuauagcuuggaauucuaacaaucuugauucuaagguuggugguaauuauaauuaccuguauagauuguuuaggaagucuaaucucaaaccuuuugagagagauauuucaacugaaaucuaucaggccgguagcacaccuuguaaugguguugaagguuuuaauuguuacuuuccuuuacaaucauaugguuuccaacccacuaaugguguugguuaccaaccauacagaguaguaguacuuucuuuugaacuucuacaugcaccagcaacuguuuguggaccuaaaaagucuacuaauuugguuaaaaacaaaugugucaauuucaacuucaaugguuuaacaggcacagguguucuuacugagucuaacaaaaaguuucugccuuuccaacaauuuggcagagacauugcugacacuacugaugcuguccgugauccacagacacuugagauucuugacauuacaccauguucuuuugguggugucaguguuauaacaccaggaacaaauacuucuaaccagguugcuguucuuuaucaggauguuaacugcacagaagucccuguugcuauucaugcagaucaacuuacuccuacuuggcguguuuauucuacagguucuaauguuuuucaaacacgugcaggcuguuuaauaggggcugaacaugucaacaacucauaugagugugacauacccauuggugcagguauaugcgcuaguuaucagacucagacuaauucuccucggcgggcacguaguguagcuagucaauccaucauugccuacacuaugucacuuggugcagaaaauucaguugcuuacucuaauaacucuauugccauacccacaaauuuuacuauuaguguuaccacagaaauucuaccagugucuaugaccaagacaucaguagauuguacaauguacauuuguggugauucaacugaaugcagcaaucuuuuguugcaauauggcaguuuuuguacacaauuaaaccgugcuuuaacuggaauagcuguugaacaagacaaaaacacccaagaaguuuuugcacaagucaaacaaauuuacaaaacaccaccaauuaaagauuuuggugguuuuaauuuuucacaaauauuaccagauccaucaaaaccaagcaagaggucauuuauugaagaucuacuuuucaacaaagugacacuugcagaugcuggcuucaucaaacaauauggugauugccuuggugauauugcugcuagagaccucauuugugcacaaaaguuuaacggccuuacuguuuugccaccuuugcucacagaugaaaugauugcucaauacacuucugcacuguuagcggguacaaucacuucugguuggaccuuuggugcaggugcugcauuacaaauaccauuugcuaugcaaauggcuuauagguuuaaugguauuggaguuacacagaauguucucuaugagaaccaaaaauugauugccaaccaauuuaauagugcuauuggcaaaauucaagacucacuuucuuccacagcaagugcacuuggaaaacuucaagauguggucaaccaaaaugcacaagcuuuaaacacgcuuguuaaacaacuuagcuccaauuuuggugcaauuucaaguguuuuaaaugauauccuuucacgucuugacaaaguugaggcugaagugcaaauugauagguugaucacaggcagacuucaaaguuugcagacauaugugacucaacaauuaauuagagcugcagaaaucagagcuucugcuaaucuugcugcuacuaaaaugucagaguguguacuuggacaaucaaaaagaguugauuuuuguggaaagggcuaucaucuuauguccuucccucagucagcaccucaugguguagucuucuugcaugugacuuaugucccugcacaagaaaagaacuucacaacugcuccugccauuugucaugauggaaaagcacacuuuccucgugaaggugucuuuguuucaaauggcacacacugguuuguaacacaaaggaauuuuuaugaaccacaaaucauuacuacagacaacacauuugugucugguaacugugauguuguaauaggaauugucaacaacacaguuuaugauccuuugcaaccugaauuagacucauucaaggaggaguuagauaaauauuuuaagaaucauacaucaccagauguugauuuaggugacaucucuggcauuaaugcuucaguuguaaacauucaaaaagaaauugaccgccucaaugagguugccaagaauuuaaaugaaucucucaucgaucuccaagaacuuggaaaguaugagcaguauauaaaauggccaugguacauuuggcuagguuuuauagcuggcuugauugccauaguaauggugacaauuaugcuuugcuguaugaccaguugcuguaguugucucaagggcuguuguucuuguggauccugcugcaaauuugaugaagacgacucugagccagugcucaaaggagucaaauuacauuacacauaaggacuagucccuguucccagagcccacuuuuuuuucuuuuuuugaaauaaaauagccugucuuucagaucucaaaggcucuuuucagagccaccaaaaaaaaaaaaaaaaaaaaaaaaaaaaaaaaaaaaaaaaaaaaaaaaaaaaaaaaaaaaaaaaaaaaaaaaaaaaaaaaaaaaaaaaaaaaaaaaaaaaa

SEQ ID NO: 12252 - RNA, 4094 nt, Artificial Sequence
  SARS-CoV-2/Portugal/PT0035/2020__EPI_ISL_418020 spike protein mRNA wt (1-1273)
aggagagucccgcagucggcguccagcggcucugcuuguucgugugugugucguugcaggccuuauucaagcuuaccauguuuguuuuucuuguuuuauugccacuagucucuagucaguguguuaaucuuacaaccagaacucaauuacccccugcauacacuaauucuuucacacgugguguuuauuacccugacaaaguuuucagauccucaguuuuacauucaacucaggacuuguucuuaccuuucuuuuccaauguuacuugguuccaugcuauacaugucucugggaccaaugguacuaagagguuugauaacccuguccuaccauuuaaugaugguguuuauuuugcuuccacugagaagucuaacauaauaagaggcuggauuuuugguacuacuuuagauucgaagacccagucccuacuuauuguuaauaacgcuacuaauguuguuauuaaagucugugaauuucaauuuuguaaugauccauuuuuggguguuuauuaccacaaaaacaacaaaaguuggauggaaagugaguucagaguuuauucuagugcgaauaauugcacuuuugaauaugucucucagccuuuucuuauggaccuugaaggaaaacaggguaauuucaaaaaucuuagggaauuuguguuuaagaauauugaugguuauuuuaaaauauauucuaagcacacgccuauuaauuuagugcgugaucucccucaggguuuuucggcuuuagaaccauugguagauuugccaauagguauuaacaucacuagguuucaaacuuuacuugcuuuacauagaaguuauuugacuccuggugauucuucuucagguuggacagcuggugcugcagcuuauuauguggguuaucuucaaccuaggacuuuucuauuaaaauauaaugaaaauggaaccauuacagaugcuguagacugugcacuugacccucucucagaaacaaaguguacguugaaauccuucacuguagaaaaaggaaucuaucaaacuucuaacuuuagaguccaaccaacagaaucuauuguuagauuuccuaauauuacaaacuugugcccuuuuggugaaguuuuuaacgccaccagauuugcaucuguuuaugcuuggaacaggaagagaaucagcaacuguguugcugauuauucuguccuauauaauuccgcaucauuuuccacuuuuaaguguuauggagugucuccuacuaaauuaaaugaucucugcuuuacuaaugucuaugcagauucauuuguaauuagaggugaugaagucagacaaaucgcuccagggcaaacuggaaagauugcugauuauaauuauaaauuaccagaugauuuuacaggcugcguuauagcuuggaauucuaacaaucuugauucuaagguuggugguaauuauaauuaccuguauagauuguuuaggaagucuaaucucaaaccuuuugagagagauauuucaacugaaaucuaucaggccgguagcacaccuuguaaugguguugaagguuuuaauuguuacuuuccuuuacaaucauaugguuuccaacccacuaaugguguugguuaccaaccauacagaguaguaguacuuucuuuugaacuucuacaugcaccagcaacuguuuguggaccuaaaaagucuacuaauuugguuaaaaacaaaugugucaauuucaacuucaaugguuuaacaggcacagguguucuuacugagucuaacaaaaaguuucugccuuuccaacaauuuggcagagacauugcugacacuacugaugcuguccgugauccacagacacuugagauucuugacauuacaccauguucuuuugguggugucaguguuauaacaccaggaacaaauacuucuaaccagguugcuguucuuuaucaggauguuaacugcacagaagucccuguugcuauucaugcagaucaacuuacuccuacuuggcguguuuauucuacagguucuaauguuuuucaaacacgugcaggcuguuuaauaggggcugaacaugucaacaacucauaugagugugacauacccauuggugcagguauaugcgcuaguuaucagacucagacuaauucuccucggcgggcacguaguguagcuagucaauccaucauugccuacacuaugucacuuggugcagaaaauucaguugcuuacucuaauaacucuauugccauacccacaaauuuuacuauuaguguuaccacagaaauucuaccagugucuaugaccaagacaucaguagauuguacaauguacauuuguggugauucaacugaaugcagcaaucuuuuguugcaauauggcaguuuuuguacacaauuaaaccgugcuuuaacuggaauagcuguugaacaagacaaaaacacccaagaaguuuuugcacaagucaaacaaauuuacaaaacaccaccaauuaaagauuuuggugguuuuaauuuuucacaaauauuaccagauccaucaaaaccaagcaagaggucauuuauugaagaucuacuuuucaacaaagugacacuugcagaugcuggcuucaucaaacaauauggugauugccuuggugauauuucugcuagagaccucauuugugcacaaaaguuuaacggccuuacuguuuugccaccuuugcucacagaugaaaugauugcucaauacacuucugcacuguuagcggguacaaucacuucugguuggaccuuuggugcaggugcugcauuacaaauaccauuugcuaugcaaauggcuuauagguuuaaugguauuggaguuacacagaauguucucuaugagaaccaaaaauugauugccaaccaauuuaauagugcuauuggcaaaauucaagacucacuuucuuccacagcaagugcacuuggaaaacuucaagauguggucaaccaaaaugcacaagcuuuaaacacgcuuguuaaacaacuuagcuccaauuuuggugcaauuucaaguguuuuaaaugauauccuuucacgucuugacaaaguugaggcugaagugcaaauugauagguugaucacaggcagacuucaaaguuugcagacauaugugacucaacaauuaauuagagcugcagaaaucagagcuucugcuaaucuugcugcuacuaaaaugucagaguguguacuuggacaaucaaaaagaguugauuuuuguggaaagggcuaucaucuuauguccuucccucagucagcaccucaugguguagucuucuugcaugugacuuaugucccugcacaagaaaagaacuucacaacugcuccugccauuugucaugauggaaaagcacacuuuccucgugaaggugucuuuguuucaaauggcacacacugguuuguaacacaaaggaauuuuuaugaaccacaaaucauuacuacagacaacacauuugugucugguaacugugauguuguaauaggaauugucaacaacacaguuuaugauccuuugcaaccugaauuagacucauucaaggaggaguuagauaaauauuuuaagaaucauacaucaccagauguugauuuaggugacaucucuggcauuaaugcuucaguuguaaacauucaaaaagaaauugaccgccucaaugagguugccaagaauuuaaaugaaucucucaucgaucuccaagaacuuggaaaguaugagcaguauauaaaauggccaugguacauuuggcuagguuuuauagcuggcuugauugccauaguaauggugacaauuaugcuuugcuguaugaccaguugcuguaguugucucaagggcuguuguucuuguggauccugcugcaaauuugaugaagacgacucugagccagugcucaaaggagucaaauuacauuacacauaaggacuagucccuguucccagagcccacuuuuuuuucuuuuuuugaaauaaaauagccugucuuucagaucucaaaggcucuuuucagagccaccaaaaaaaaaaaaaaaaaaaaaaaaaaaaaaaaaaaaaaaaaaaaaaaaaaaaaaaaaaaaaaaaaaaaaaaaaaaaaaaaaaaaaaaaaaaaaaaaaaaaa

SEQ ID NO: 12253 - RNA, 4094 nt, Artificial Sequence
  SARS-CoV-2/USA/NY-NYUMC7/2020__EPI_ISL_418192 spike protein mRNA wt (1-1273)
aggagagucccgcagucggcguccagcggcucugcuuguucgugugugugucguugcaggccuuauucaagcuuaccauguuuguuuuucuuguuuuauugccacuagucucuagucaguguguuaaucuuacaaccagaacucaauuacccccugcauacacuaauucuuucacacgugguguuuauuacccugacaaaguuuucagauccucaguuuuacauucaacucaggacuuguucuuaccuuucuuuuccaauguuacuugguuccaugcuauacaugucucugggaccaaugguacuaagagguuugauaacccuguccuaccauuuaaugaugguguuuauuuugcuuccacugagaagucuaacauaauaagaggcuggauuuuugguacuacuuuagauucgaagacccagucccuacuuauuguuaauaacgcuacuaauguuguuauuaaagucugugaauuucaauuuuguaaugauccauuuuuggguguuuaucaccacaaaaacaacaaaaguuggauggaaagugaguucagaguuuauucuagugcgaauaauugcacuuuugaauaugucucucagccuuuucuuauggaccuugaaggaaaacaggguaauuucaaaaaucuuagggaauuuguguuuaagaauauugaugguuauuuuaaaauauauucuaagcacacgccuauuaauuuagugcgugaucucccucaggguuuuucggcuuuagaaccauugguagauuugccaauagguauuaacaucacuagguuucaaacuuuacuugcuuuacauagaaguuauuugacuccuggugauucuucuucagguuggacagcuggugcugcagcuuauuauguggguuaucuucaaccuaggacuuuucuauuaaaauauaaugaaaauggaaccauuacagaugcuguagacugugcacuugacccucucucagaaacaaaguguacguugaaauccuucacuguagaaaaaggaaucuaucaaacuucuaacuuuagaguccaaccaacagaaucuauuguuagauuuccuaauauuacaaacuugugcccuuuuggugaaguuuuuaacgccaccagauuugcaucuguuuaugcuuggaacaggaagagaaucagcaacuguguugcugauuauucuguccuauauaauuccgcaucauuuuccacuuuuaaguguuauggagugucuccuacuaaauuaaaugaucucugcuuuacuaaugucuaugcagauucauuuguaauuagaggugaugaagucagacaaaucgcuccagggcaaacuggaaagauugcugauuauaauuauaaauuaccagaugauuuuacaggcugcguuauagcuuggaauucuaacaaucuugauucuaagguuggugguaauuauaauuaccuguauagauuguuuaggaagucuaaucucaaaccuuuugagagagauauuucaacugaaaucuaucaggccgguagcacaccuuguaaugguguugaagguuuuaauuguuacuuuccuuuacaaucauaugguuuccaacccacuaaugguguugguuaccaaccauacagaguaguaguacuuucuuuugaacuucuacaugcaccagcaacuguuuguggaccuaaaaagucuacuaauuugguuaaaaacaaaugugucaauuucaacuucaaugguuuaacaggcacagguguucuuacugagucuaacaaaaaguuucugccuuuccaacaauuuggcagagacauugcugacacuacugaugcuguccgugauccacagacacuugagauucuugacauuacaccauguucuuuugguggugucaguguuauaacaccaggaacaaauacuucuaaccagguugcuguucuuuaucaggguguuaacugcacagaagucccuguugcuauucaugcagaucaacuuacuccuacuuggcguguuuauucuacagguucuaauguuuuucaaacacgugcaggcuguuuaauaggggcugaacaugucaacaacucauaugagugugacauacccauuggugcagguauaugcgcuaguuaucagacucagacuaauucuccucggcgggcacguaguguagcuagucaauccaucauugccuacacuaugucacuuggugcagaaaauucaguugcuuacucuaauaacucuauugccauacccacaaauuuuacuauuaguguuaccacagaaauucuaccagugucuaugaccaagacaucaguagauuguacaauguacauuuguggugauucaacugaaugcagcaaucuuuuguugcaauauggcaguuuuuguacacaauuaaaccgugcuuuaacuggaauagcuguugaacaagacaaaaacacccaagaaguuuuugcacaagucaaacaaauuuacaaaacaccaccaauuaaagauuuuggugguuuuaauuuuucacaaauauuaccagauccaucaaaaccaagcaagaggucauuuauugaagaucuacuuuucaacaaagugacacuugcagaugcuggcuucaucaaacaauauggugauugccuuggugauauugcugcuagagaccucauuugugcacaaaaguuuaacggccuuacuguuuugccaccuuugcucacagaugaaaugauugcucaauacacuucugcacuguuagcggguacaaucacuucugguuggaccuuuggugcaggugcugcauuacaaauaccauuugcuaugcaaauggcuuauagguuuaaugguauuggaguuacacagaauguucucuaugagaaccaaaaauugauugccaaccaauuuaauagugcuauuggcaaaauucaagacucacuuucuuccacagcaagugcacuuggaaaacuucaagauguggucaaccaaaaugcacaagcuuuaaacacgcuuguuaaacaacuuagcuccaauuuuggugcaauuucaaguguuuuaaaugauauccuuucacgucuugacaaaguugaggcugaagugcaaauugauagguugaucacaggcagacuucaaaguuugcagacauaugugacucaacaauuaauuagagcugcagaaaucagagcuucugcuaaucuugcugcuacuaaaaugucagaguguguacuuggacaaucaaaaagaguugauuuuuguggaaagggcuaucaucuuauguccuucccucagucagcaccucaugguguagucuucuugcaugugacuuaugucccugcacaagaaaagaacuucacaacugcuccugccauuugucaugauggaaaagcacacuuuccucgugaaggugucuuuguuucaaauggcacacacugguuuguaacacaaaggaauuuuuaugaaccacaaaucauuacuacagacaacacauuugugucugguaacugugauguuguaauaggaauugucaacaacacaguuuaugauccuuugcaaccugaauuagacucauucaaggaggaguuagauaaauauuuuaagaaucauacaucaccagauguugauuuaggugacaucucuggcauuaaugcuucaguuguaaacauucaaaaagaaauugaccgccucaaugagguugccaagaauuuaaaugaaucucucaucgaucuccaagaacuuggaaaguaugagcaguauauaaaauggccaugguacauuuggcuagguuuuauagcuggcuugauugccauaguaauggugacaauuaugcuuugcuguaugaccaguugcuguaguugucucaagggcuguuguucuuguggauccugcugcaaauuugaugaagacgacucugagccagugcucaaaggagucaaauuacauuacacauaaggacuagucccuguucccagagcccacuuuuuuuucuuuuuuugaaauaaaauagccugucuuucagaucucaaaggcucuuuucagagccaccaaaaaaaaaaaaaaaaaaaaaaaaaaaaaaaaaaaaaaaaaaaaaaaaaaaaaaaaaaaaaaaaaaaaaaaaaaaaaaaaaaaaaaaaaaaaaaaaaaaaa

SEQ ID NO: 12254 - RNA, 4094 nt, Artificial Sequence
  SARS-CoV-2/Iceland/189/2020__EPI_ISL_417709 spike protein mRNA wt (1-1273)
aggagagucccgcagucggcguccagcggcucugcuuguucgugugugugucguugcaggccuuauucaagcuuaccauguuuguuuuucuuguuuuauugccacuagucucuagucaguguguuaaucuuacaaccagaacucaauuacccccugcauacacuaauucuuucacacgugguguuuauuacccugacaaaguuuucagauccucaguuuuacauucaacucaggacuuguucuuaccuuucuuuuccaauguuacuugguuccaugcuauacaugucucugggaccaaugguacuaagagguuugauaacccuguccuaccauuuaaugaugguguuuauuuugcuuccacugagaagucuaacauaauaagaggcuggauuuuugguacuacuuuagauucgaagacccagucccuacuuauuguuaauaacgcuacuaauguuguuauuaaagucugugaauuucaauuuuguaaugauccauuuuuggguguuuauuaccacaaaaacaacaaaaguuggauggaaagugaguucagaguuuauucuagugcgaauaauugcacuuuugaauaugucucucagccuuuucuuauggaccuugaaggaaaacaggguaauuucaaaaaucuuagggaauuuguguuuaagaauauugaugguuauuuuaaaauauauucuaagcacacgccuauuaauuuagugcgugaucucccucaggguuuuucggcuuuagaaccauugguagauuugccaauagguauuaacaucacuagguuucaaacuuuacuugcuuuacauagaaguuauuugacuccuggugauucuucuucagguuggacagcuggugcugcagcuuauuauguggguuaucuucaaccuaggacuuuucuauuaaaauauaaugaaaauggaaccauuacagaugcuguagacugugcacuugacccucucucagaaacaaaguguacguugaaauccuucacuguagaaaaaggaaucuaucaaacuucuaacuuuagaguccaaccaacagaaucuauuguuagauuuccuaauauuacaaacuugugcccuuuuggugaaguuuuuaacgccaccagauuugcaucuguuuaugcuuggaacaggaagagaaucagcaacuguguugcugauuauucuguccuauauaauuccgcaucauuuuccacuuuuaaguguuauggagugucuccuacuaaauuaaaugaucucugcuuuacuaaugucuaugcagauucauuuguaauuagaggugaugaagucagacaaaucgcuccagggcaaacuggaaagauugcugauuauaauuauaaauuaccagaugauuuuacaggcugcguuauagcuuggaauucuaacaaucuugauucuaagguuggugguaauuauaauuaccuguauagauuguuuaggaagucuaaucucaaaccuuuugagagagauauuucaacugaaaucuaucaggccgguagcacaccuuguaaugguguugaagguuuuaauuguuacuuuccuuuacaaucauaugguuuccaacccacuaaugguguugguuaccaaccauacagaguaguaguacuuucuuuugaacuucuacaugcaccagcaacuguuuguggaccuaaaaagucuacuaauuugguuaaaaacaaaugugucaauuucaacuucaaugguuuaacaggcacagguguucuuacugagucuaacaaaaaguuucugccuuuccaacaauuuggcagagacauugcugacacuacugaugcuguccgugauccacagacacuugagauucuugacauuacaccauguucuuuugguggugucaguguuauaacaccaggaacaaauacuucuaaccagguugcuguucuuuaucaggguguuaacugcacagaagucccuguugcuauucaugcagaucaacuuacuccuacuuggcguguuuauucuacagguucuaauguuuuucaaacacgugcaggcuguuuaauaggggcugaacaugucaacaacucauaugagugugacauacccauuggugcagguauaugcgcuaguuaucagacucagacuaauucuccucggcgggcacguaguguagcuagucaauccaucauugccuacacuaugucacuuggugcagaaaauucaguugcuuacucuaauaacucuauugccauacccacaaauuuuacuauuaguguuaccacagaaauucuaccagugucuaugaccaagacaucaguagauuguacaauguacauuuguggugauucaacugaaugcagcaaucuuuuguugcaauauggcaguuuuuguacacaauuaaaccgugcuuuaacuggaauagcuguugaacaagacaaaaacacccaagaaguuuuugcacaagucaaacaaauuuacaaaacaccaccaauuaaagauuuuggugguuuuaauuuuucacaaauauuaccagauccaucaaaaccaagcaagaggucauuuauugaagaucuacuuuucaacaaagugacacuugcagaugcuggcuucaccaaacaauauggugauugccuuggugauauugcugcuagagaccucauuugugcacaaaaguuuaacggccuuacuguuuugccaccuuugcucacagaugaaaugauugcucaauacacuucugcacuguuagcggguacaaucacuucugguuggaccuuuggugcaggugcugcauuacaaauaccauuugcuaugcaaauggcuuauagguuuaaugguauuggaguuacacagaauguucucuaugagaaccaaaaauugauugccaaccaauuuaauagugcuauuggcaaaauucaagacucacuuucuuccacagcaagugcacuuggaaaacuucaagauguggucaaccaaaaugcacaagcuuuaaacacgcuuguuaaacaacuuagcuccaauuuuggugcaauuucaaguguuuuaaaugauauccuuucacgucuugacaaaguugaggcugaagugcaaauugauagguugaucacaggcagacuucaaaguuugcagacauaugugacucaacaauuaauuagagcugcagaaaucagagcuucugcuaaucuugcugcuacuaaaaugucagaguguguacuuggacaaucaaaaagaguugauuuuuguggaaagggcuaucaucuuauguccuucccucagucagcaccucaugguguagucuucuugcaugugacuuaugucccugcacaagaaaagaacuucacaacugcuccugccauuugucaugauggaaaagcacacuuuccucgugaaggugucuuuguuucaaauggcacacacugguuuguaacacaaaggaauuuuuaugaaccacaaaucauuacuacagacaacacauuugugucugguaacugugauguuguaauaggaauugucaacaacacaguuuaugauccuuugcaaccugaauuagacucauucaaggaggaguuagauaaauauuuuaagaaucauacaucaccagauguugauuuaggugacaucucuggcauuaaugcuucaguuguaaacauucaaaaagaaauugaccgccucaaugagguugccaagaauuuaaaugaaucucucaucgaucuccaagaacuuggaaaguaugagcaguauauaaaauggccaugguacauuuggcuagguuuuauagcuggcuugauugccauaguaauggugacaauuaugcuuugcuguaugaccaguugcuguaguugucucaagggcuguuguucuuguggauccugcugcaaauuugaugaagacgacucugagccagugcucaaaggagucaaauuacauuacacauaaggacuagucccuguucccagagcccacuuuuuuuucuuuuuuugaaauaaaauagccugucuuucagaucucaaaggcucuuuucagagccaccaaaaaaaaaaaaaaaaaaaaaaaaaaaaaaaaaaaaaaaaaaaaaaaaaaaaaaaaaaaaaaaaaaaaaaaaaaaaaaaaaaaaaaaaaaaaaaaaaaaaa

SEQ ID NO: 12255 - RNA, 4094 nt, Artificial Sequence
  SARS-CoV-2/Australia/NSW56/2020__EPI_ISL_417408 spike protein mRNA wt (1-1273)
aggagagucccgcagucggcguccagcggcucugcuuguucgugugugugucguugcaggccuuauucaagcuuaccauguuuguuuuucuuguuuuauugccacuagucucuagucaguguguuaaucuuacaaccagaacucaauuacccccugcauacacuaauucuuucacacgugguguuuauuacccugacaaaguuuucagauccucaguuuuacauucaacucaggacuuguucuuaccuuucuuuuccaauguuacuugguuccaugcuauacaugucucugggaccaaugguacuaagagguuugauaacccuguccuaccauuuaaugaugguguuuauuuugcuuccacugagaagucuaacauaauaagaggcuggauuuuugguacuacuuuagauucgaagacccagucccuacuuauuguuaauaacgcuacuaauguuguuauuaaagucugugaauuucaauuuuguaaugauccauuuuuggguguuuauuaccacaaaaacaacaaaaguuggauggaaagugaguucagaguuuauucuagugcgaauaauugcacuuuugaauaugucucucagccuuuucuuauggaccuugaaggaaaacaggguaauuucaaaaaucuuagggaauuuguguuuaagaauauugaugguuauuuuaaaauauauucuaagcacacgccuauuaauuuagugcgugaucucccucaggguuuuucggcuuuagaaccauugguagauuugccaauagguauuaacaucacuagguuucaaacuuuacuugcuuuacauagaaguuauuugacuccuggugauucuucuucagguuggacagcuggugcugcagcuuauuauguggguuaucuucaaccuaggacuuuucuauuaaaauauaaugaaaauggaaccauuacagaugcuguagacugugcacuugacccucucucagaaacaaaguguacguugaaauccuucacuguagaaaaaggaaucuaucaaacuucuaacuuuagaguccaaccaacagaaucuauuguuagauuuccuaauauuacaaacuugugcccuuuuggugaaguuuuuaacgccaccagauuugcaucuguuuaugcuuggaacaggaagagaaucagcaacuguguugcugauuauucuguccuauauaauuccgcaucauuuuccacuuuuaaguguuauggagugucuccuacuaaauuaaaugaucucugcuuuacuaaugucuaugcagauucauuuguaauuagaggugaugaagucagacaaaucgcuccagggcaaacuggaaagauugcugauuauaauuauaaauuaccagaugauuuuacaggcugcguuauagcuuggaauucuaacaaucuugauucuaagguuggugguaauuauaauuaccuguauagauuguuuaggaagucuaaucucaaaccuuuugagagagauauuucaacugaaaucuaucaggccgguagcacaccuuguaaugguguugaagguuuuaauuguuacuuuccuuuacaaucauaugguuuccaacccacuaaugguguugguuaccaaccauacagaguaguaguacuuucuuuugaacuucuacaugcaccagcaacuguuuguggaccuaaaaagucuacuaauuugguuaaaaacaaaugugucaauuucaacuucaaugguuuaacaggcacagguguucuuacugagucuaacaaaaaguuucugccuuuccaacaauuuggcagagacauugcugacacuacugaugcuguccgugauccacagacacuugagauucuugacauuacaccauguucuuuugguggugucaguguuauaacaccaggaacaaauacuucuaaccagguugcuguucuuuaucaggauguuaacugcacagaagucccuguugcuauucaugcagaucaacuuacuccuacuuggcguguuuauucuacagguucuaauguuuuucaaacacgugcaggcuguuuaauaggggcugaacaugucaacaacucauaugagugugacauacccauuggugcagguauaugcgcuaguuaucagacucagacuaauucuccucggcgggcacguaguguagcuagucaauccaucauugccuacacuaugucacuuggugcagaaaauucaguugcuuacucuaauaacucuauugccauacccacaaauuuuacuauuaguguuaccacagaaauucuaccagugucuaugaccaagacaucaguagauuguacaauguacauuuguggugauucaacugaaugcagcaaucuuuuguugcaauauggcaguuuuuguacacaauuaaaccgugcuuuaacuggaauagcuguugaacaagacaaaaacacccaagaaguuuuugcacaagucaaacaaauuuacaaaacaccaccaauuaaagauuuuggugguuuuaauuuuucacaaauauuaccagauucaucaaaaccaagcaagaggucauuuauugaagaucuacuuuucaacaaagugacacuugcagaugcuggcuucaucaaacaauauggugauugccuuggugauauugcugcuagagaccucauuugugcacaaaaguuuaacggccuuacuguuuugccaccuuugcucacagaugaaaugauugcucaauacacuucugcacuguuagcggguacaaucacuucugguuggaccuuuggugcaggugcugcauuacaaauaccauuugcuaugcaaauggcuuauagguuuaaugguauuggaguuacacagaauguucucuaugagaaccaaaaauugauugccaaccaauuuaauagugcuauuggcaaaauucaagacucacuuucuuccacagcaagugcacuuggaaaacuucaagauguggucaaccaaaaugcacaagcuuuaaacacgcuuguuaaacaacuuagcuccaauuuuggugcaauuucaaguguuuuaaaugauauccuuucacgucuugacaaaguugaggcugaagugcaaauugauagguugaucacaggcagacuucaaaguuugcagacauaugugacucaacaauuaauuagagcugcagaaaucagagcuucugcuaaucuugcugcuacuaaaaugucagaguguguacuuggacaaucaaaaagaguugauuuuuguggaaagggcuaucaucuuauguccuucccucagucagcaccucaugguguagucuucuugcaugugacuuaugucccugcacaagaaaagaacuucacaacugcuccugccauuugucaugauggaaaagcacacuuuccucgugaaggugucuuuguuucaaauggcacacacugguuuguaacacaaaggaauuuuuaugaaccacaaaucauuacuacagacaacacauuugugucugguaacugugauguuguaauaggaauugucaacaacacaguuuaugauccuuugcaaccugaauuagacucauucaaggaggaguuagauaaauauuuuaagaaucauacaucaccagauguugauuuaggugacaucucuggcauuaaugcuucaguuguaaacauucaaaaagaaauugaccgccucaaugagguugccaagaauuuaaaugaaucucucaucgaucuccaagaacuuggaaaguaugagcaguauauaaaauggccaugguacauuuggcuagguuuuauagcuggcuugauugccauaguaauggugacaauuaugcuuugcuguaugaccaguugcuguaguugucucaagggcuguuguucuuguggauccugcugcaaauuugaugaagacgacucugagccagugcucaaaggagucaaauuacauuacacauaaggacuagucccuguucccagagcccacuuuuuuuucuuuuuuugaaauaaaauagccugucuuucagaucucaaaggcucuuuucagagccaccaaaaaaaaaaaaaaaaaaaaaaaaaaaaaaaaaaaaaaaaaaaaaaaaaaaaaaaaaaaaaaaaaaaaaaaaaaaaaaaaaaaaaaaaaaaaaaaaaaaaa

SEQ ID NO: 12256 - RNA, 4094 nt, Artificial Sequence
  SARS-CoV-2/Iceland/280/2020__EPI_ISL_417608 spike protein mRNA wt (1-1273)
aggagagucccgcagucggcguccagcggcucugcuuguucgugugugugucguugcaggccuuauucaagcuuaccauguuuguuuuucuuguuuuauugccacuagucucuagucaguguguuaaucuuacaaccagaacucaauuacccccugcauacacuaauucuuucacacgugguguuuauuacccugacaaaguuuucagauccucaguuuuacauucaacucaggacuuguucuuaccuuucuuuuccaauguuacuugguuccaugcuauacaugucucugggaccaaugguacuaagagguuugauaacccuguccuaccauuuaaugaugguguuuauuuugcuuccacugagaagucuaacauaauaagaggcuggauuuuugguacuacuuuagauucgaagacccagucccuacuuauuguuaauaacgcuacuaauguuguuauuaaagucugugaauuucaauuuuguaaugauccauuuuuggguguuuauuaccacaaaaacaacaaaaguuggauggaaagugaguucagaguuuauucuagugcgaauaauugcacuuuugaauaugucucucagccuuuucuuauggaccuugaaggaaaacaggguaauuucaaaaaucuuagggaauuuguguuuaagaauauugaugguuauuuuaaaauauauucuaagcacacgccuauuaauuuagugcgugaucucccucaggguuuuucggcuuuagaaccauugguagauuugccaauagguauuaacaucacuagguuucaaacuuuacuugcuuuacauagaaguuauuugacuccuggugauucuucuucagguuggacagcuggugcugcagcuuauuauguggguuaucuucaaccuaggacuuuucuauuaaaauauaaugaaaauggaaccauuacagaugcuguagacugugcacuugacccucucucagaaacaaaguguacguugaaauccuucacuguagaaaaaggaaucuaucaaacuucuaacuuuagaguccaaccaacagaaucuauuguuagauuuccuaauauuacaaacuugugcccuuuuggugaaguuuuuaacgccaccagauuugcaucuguuuaugcuuggaacaggaagagaaucagcaacuguguugcugauuauucuguccuauauaauuccgcaucauuuuccacuuuuaaguguuauggagugucuccuacuaaauuaaaugaucucugcuuuacuaaugucuaugcagauucauuuguaauuagaggugaugaagucagacaaaucgcuccagggcaaacuggaaagauugcugauuauaauuauaaauuaccagaugauuuuacaggcugcguuauagcuuggaauucuaacaaucuugauucuaagguuggugguaauuauaauuaccuguauagauuguuuaggaagucuaaucucaaaccuuuugagagagauauuucaacugaaaucuaucaggccgguagcacaccuuguaaugguguugaagguuuuaauuguuacuuuccuuuacaaucauaugguuuccaacccacuaaugguguugguuaccaaccauacagaguaguaguacuuucuuuugaacuucuacaugcaccagcaacuguuuguggaccuaaaaagucuacuaauuugguuaaaaacaaaugugucaauuucaacuucaaugguuuaacaggcacagguguucuuacugagucuaacaaaaaguuucugccuuuccaacaauuuggcagagacauugcugacacuacugaugcuguccgugauccacagacacuugagauucuugacauuacaccauguucuuuugguggugucaguguuauaacaccaggaacaaauacuucuaaccagguugcuguucuuuaucaggguguuaacugcacagaagucccuguugcuauucaugcagaucaacuuacuccuacuuggcguguuuauucuacagguucuaauguuuuucaaacacgugcaggcuguuuaauaggggcugaacaugucaacaacucauaugagugugacauacccauuggugcagguauaugcgcuaguuaucauacucagacuaauucuccucggcgggcacguaguguagcuagucaauccaucauugccuacacuaugucacuuggugcagaaaauucaguugcuuacucuaauaacucuauugccauacccacaaauuuuacuauuaguguuaccacagaaauucuaccagugucuaugaccaagacaucaguagauuguacaauguacauuuguggugauucaacugaaugcagcaaucuuuuguugcaauauggcaguuuuuguacacaauuaaaccgugcuuuaacuggaauagcuguugaacaagacaaaaacacccaagaaguuuuugcacaagucaaacaaauuuacaaaacaccaccaauuaaagauuuuggugguuuuaauuuuucacaaauauuaccagauccaucaaaaccaagcaagaggucauuuauugaagaucuacuuuucaacaaagugacacuugcagaugcuggcuucaucaaacaauauggugauugccuuggugauauugcugcuagagaccucauuugugcacaaaaguuuaacggccuuacuguuuugccaccuuugcucacagaugaaaugauugcucaauacacuucugcacuguuagcggguacaaucacuucugguuggaccuuuggugcaggugcugcauuacaaauaccauuugcuaugcaaauggcuuauagguuuaaugguauuggaguuacacagaauguucucuaugagaaccaaaaauugauugccaaccaauuuaauagugcuauuggcaaaauucaagacucacuuucuuccacagcaagugcacuuggaaaacuucaagauguggucaaccaaaaugcacaagcuuuaaacacgcuuguuaaacaacuuagcuccaauuuuggugcaauuucaaguguuuuaaaugauauccuuucacgucuugacaaaguugaggcugaagugcaaauugauagguugaucacaggcagacuucaaaguuugcagacauaugugacucaacaauuaauuagagcugcagaaaucagagcuucugcuaaucuugcugcuacuaaaaugucagaguguguacuuggacaaucaaaaagaguugauuuuuguggaaagggcuaucaucuuauguccuucccucagucagcaccucaugguguagucuucuugcaugugacuuaugucccugcacaagaaaagaacuucacaacugcuccugccauuugucaugauggaaaagcacacuuuccucgugaaggugucuuuguuucaaauggcacacacugguuuguaacacaaaggaauuuuuaugaaccacaaaucauuacuacagacaacacauuugugucugguaacugugauguuguaauaggaauugucaacaacacaguuuaugauccuuugcaaccugaauuagacucauucaaggaggaguuagauaaauauuuuaagaaucauacaucaccagauguugauuuaggugacaucucuggcauuaaugcuucaguuguaaacauucaaaaagaaauugaccgccucaaugagguugccaagaauuuaaaugaaucucucaucgaucuccaagaacuuggaaaguaugagcaguauauaaaauggccaugguacauuuggcuagguuuuauagcuggcuugauugccauaguaauggugacaauuaugcuuugcuguaugaccaguugcuguaguugucucaagggcuguuguucuuguggauccugcugcaaauuugaugaagacgacucugagccagugcucaaaggagucaaauuacauuacacauaaggacuagucccuguucccagagcccacuuuuuuuucuuuuuuugaaauaaaauagccugucuuucagaucucaaaggcucuuuucagagccaccaaaaaaaaaaaaaaaaaaaaaaaaaaaaaaaaaaaaaaaaaaaaaaaaaaaaaaaaaaaaaaaaaaaaaaaaaaaaaaaaaaaaaaaaaaaaaaaaaaaaa

SEQ ID NO: 12257 - RNA, 4094 nt, Artificial Sequence
  SARS-CoV-2/Iceland/247/2020__EPI_ISL_417575 spike protein mRNA wt (1-1273)
aggagagucccgcagucggcguccagcggcucugcuuguucgugugugugucguugcaggccuuauucaagcuuaccauguuuguuuuucuuguuuuauugccacuagucucuagucaguguguuaaucuuacaaccagaacucaauuacccccugcauacacuaauucuuucacacgugguguuuauuacccugacaaaguuuucagauccucaguuuuacauucaacucaggacuuguucuuaccuuucuuuuccaauguuacuugguuccaugcuauacaugucucugggaccaaugguacuaagagguuugauaacccuguccuaccauuuaaugaugguguuuauuuugcuuccacugagaagucuaacauaauaagaggcuggauuuuugguacuacuuuagauucgaagacccagucccuacuuauuguuaauaacgcuacuaauguuguuauuaaagucugugaauuucaauuuuguaaugauccauuuuuggguguuuauuaccacaaaaacaacaaaaguuggauggaaagugaguucagaguuuauucuagugcgaauaauugcacuuuugaauaugucucucagccuuuucuuauggaccuugaaggaaaacaggguaauuucaaaaaucuuagggaauuuguguuuaagaauauugaugguuauuuuaaaauauauucuaagcacacgccuauuaauuuagugcgugaucucccucaggguuuuucggcuuuagaaccauugguagauuugccaauagguauuaacaucacuagguuucaaacuuuacuugcuuuacauagaaguuauuugacuccuggugauucuucuucagguuggacagcuggugcugcagcuuauuauguggguuaucuucaaccuaggacuuuucuauuaaaauauaaugaaaauggaaccauuacagaugcuguagacugugcacuugacccucucucagaaacaaaguguacguugaaauccuucacuguagaaaaaggaaucuaucaaacuucuaacuuuagaguccaaccaacagaaucuauuguuagauuuccuaauauuacaaacuugugcccuuuuggugaaguuuuuaacgccaccagauuugcaucuguuuaugcuuggaacaggaagagaaucagcaacuguguugcugauuauucuguccuauauaauuccgcaucauuuuccacuuuuaaguguuauggagugucuccuacuaaauuaaaugaucucugcuuuacuaaugucuaugcagauucauuuguaauuagaggugaugaagucagacaaaucgcuccagggcaaacuggaaagauugcugauuauaauuauaaauuaccagaugauuuuacaggcugcguuauagcuuggaauucuaacaaucuugauucuaagguuggugguaauuauaauuaccuguauagauuguuuaggaagucuaaucucaaaccuuuugagagagauauuucaacugaaaucuaucaggccgguagcacaccuuguaaugguguugaagguuuuaauuguuacuuuccuuuacaaucauaugguuuccaacccacuaaugguguugguuaccaaccauacagaguaguaguacuuucuuuugaacuucuacaugcaccagcaacuguuuguggaccuaaaaagucuacuaauuugguuaaaaacaaaugugucaauuucaacuucaaugguuuaacaggcacagguguucuuacugagucuaacaaaaaguuucugccuuuccaacaauuuggcagagacauugcugacacuacugaugcuguccgugauccacagacacuugagauucuugacauuacaccauguucuuuugguggugucaguguuauaacaccaggaacaaauacuucuaaccagguugcuguucuuuaucaggguguuaacugcacagaagucccuguugcuauucaugcagaucaacuuacuccuacuuggcguguuuauucuacagguucuaauguuuuucaaacacgugcaggcuguuuaauaggggcugaacaugucaacaacucauaugagugugacauacccauuggugcagguauaugcgcuaguuaucagacucagacuaauucuccucggcgggcacguaguguagcuagucaauccaucauugccuacacuaugucacuuggugcagaaaauucaguugcuuacucuaauaacucuauugccauacccacaaauuuuacuauuaguguuaccacagaaauucuaccagugucuaugaccaagacaucaguagauuguacaauguacauuuguggugauucaacugaaugcagcaaucuuuuguugcaauauggcaguuuuuguacacaauuaaaccgugcuuuaacuggaauagcuguugaacaagacaaaaacacccaagaaguuuuugcacaagucaaacaaauuuacaaaacaccaccaauuaaagauuuuggugguuuuaauuuuucacaaauauuaccagauccaucaaaaccaagcaagaggucauuuauugaagaucuacuuuucaacaaagugacacuugcagaugcuggcuucaucaaacaauauggugauugccuuggugauauugcugcuagagaccucauuugugcacaaaaguuuaacggccuuacuguuuugccaccuuugcucacagaugaaaugauugcucaauacacuucugcacuguuagcggguacaaucacuucugguuggaccuuuggugcaggugcugcauuacaaauaccauuugcuaugcaaauggcuuauagguuuaaugguauuggaguuacacagaauguucucuaugagaaccaaaaauugauugccaaccaauuuaauagugcuauuggcaaaauucaagacucacuuucuuccacagcaagugcacuuggaaaacuucaagauguggucaaccaaaaugcacaagcuuuaaacacgcuuguuaaacaacuuagcuccaauuuuggugcaauuucaaguguuuuaaaugauauccuuucacgucuugacaaaguugaggcugaagugcaaauugauagguugaucacaggcagacuucaaaguuugcagacauaugugacucaacaauuaauuagagcugcagaaaucagagcuucugcuaaucuugcugcuacuaaaaugucagaguguguacuuggacaaucaaaaagaguugauuuuuguggaaagggcuaucaucuuauguccuucccucagucagcaccucaugguguagucuucuugcaugugacuuaugucccugcacaagaaaagaacuucacaacugcuccugccauuugucaugauggaaaagcacacuuuccucgugaaggugucuuuguuucaaauggcacacacugguuuguaacacaaaggaauuuuuaugaaccacaaaucauuacuacagacaacacauuugugucugguaacugugauguuguaauaggaauugucaacaacacaguuuaugauccuuugcaaccugaauuagacucauucaaggaggaguuagauaaauauuuuaagaaucauacaucaccagauguugauuuaggugacaucucuggcauuaaugcuucaguuguaaacauucaaaaagaaauugaccgccucaaugagguugccaagaauuuaaaugaaucucucaucgaucuccaagaacuuggaaaguaugagcaguauauaaaauggccaugguacauuuggcuagguuuuauagcuggcuugauugccauaguaauugugacaauuaugcuuugcuguaugaccaguugcuguaguugucucaagggcuguuguucuuguggauccugcugcaaauuugaugaagacgacucugagccagugcucaaaggagucaaauuacauuacacauaaggacuagucccuguucccagagcccacuuuuuuuucuuuuuuugaaauaaaauagccugucuuucagaucucaaaggcucuuuucagagccaccaaaaaaaaaaaaaaaaaaaaaaaaaaaaaaaaaaaaaaaaaaaaaaaaaaaaaaaaaaaaaaaaaaaaaaaaaaaaaaaaaaaaaaaaaaaaaaaaaaaaa

SEQ ID NO: 12258 - RNA, 4094 nt, Artificial Sequence
  SARS-CoV-2/Iceland/238/2020__EPI_ISL_417566 spike protein mRNA wt (1-1273)
aggagagucccgcagucggcguccagcggcucugcuuguucgugugugugucguugcaggccuuauucaagcuuaccauguuuguuuuucuuguuuuauugccacuagucucuagucaguguguuaaucuuacaaccagaacucaauuacccccugcauacacuaauucuuucacacgugguguuuauuacccugacaaaguuuucagauccucaguuuuacauucaacucaggacuuguucuuaccuuucuuuuccaauguuacuugguuccaugcuauacaugucucugggaccaaugguacuaagagguuugauaacccuguccuaccauuuaaugaugguguuuauuuugcuuccacugagaagucuaacauaauaagaggcuggauuuuugguacuacuuuagauucgaagacccagucccuacuuauuguuaauaacgcuacuaauguuguuauuaaagucugugaauuucaauuuuguaaugauccauuuuuggguguuuauuaccacaaaaacaacaaaaguuggauggaaagugaguucagaguuuauucuagugcgaauaauugcacuuuugaauaugucucucagccuuuucuuauggaccuugaaggaaaacaggguaauuucaaaaaucuuagggaauuuguguuuaagaauauugaugguuauuuuaaaauauauucuaagcacacgccuauuaauuuagugcgugaucucccucaggguuuuucggcuuuagaaccauugguagauuugccaauagguauuaacaucacuagguuucaaacuuuacuugcuuuacauagaaguuauuugacuccuggugauucuucuucagguuggacagcuggugcugcagcuuauuauguggguuaucuucaaccuaggacuuuucuauuaaaauauaaugaaaauggaaccauuacagaugcuguagacugugcacuugacccucucucagaaacaaaguguacguugaaauccuucacuguagaaaaaggaaucuaucaaacuucuaacuuuagaguccaaccaacagaaucuauuguuagauuuccuaauauuacaaacuugugcccuuuuggugaaguuuuuaacgccaccagauuugcaucuguuuaugcuuggaacaggaagagaaucagcaacuguguugcugauuauucuguccuauauaauuccgcaucauuuuccacuuuuaaguguuauggagugucuccuacuaaauuaaaugaucucugcuuuacuaaugucuaugcagauucauuuguaauuagaggugaugaagucagacaaaucgcuccagggcaaacuggaaagauugcugauuauaauuauaaauuaccagaugauuuuacaggcugcguuauagcuuggaauucuaacaaucuugauucuaagguuggugguaauuauaauuaccuguauagauuguuuaggaagucuaaucucaaaccuuuugagagagauauuucaacugaaaucuaucaggccgguagcacaccuuguaaugguguugaagguuuuaauuguuacuuuccuuuacaaucauaugguuuccaacccacuaaugguguugguuaccaaccauacagaguaguaguacuuucuuuugaacuucuacaugcaccagcaacuguuuguggaccuaaaaagucuacuaauuugguuaaaaacaaaugugucaauuucaacuucaaugguuuaacaggcacagguguucuuacugagucuaacaaaaaguuucugccuuuccaacaauuuggcagagacauugcugacacuacugaugcuguccgugauccacagacacuugagauucuugacauuacaccauguucuuuugguggugucaguguuauaacaccaggaacaaauacuucuaaccagguugcuguucuuuaucaggguguuaacugcacagaagucccuguugcuauucaugcagaucaacuuacuccuacuuggcguguuuauucuacagguucuaauguuuuucaaacacgugcaggcuguuuaauaggggcugaacaugucaacaacucauaugagugugacauacccauuggugcagguauaugcgcuaguuaucagacucagacuaauucuccucggcgggcacguaguguagcuagucaauccaucauugccuacacuaugucacuuggugcagaaaauucaguugcuuacucuaauaacucuauugccauacccacaaauuuuacuauuaguguuaccacagaaauucuaccagugucuaugaccaagacaucaguagauuguacaauguacauuuguggugauucaacugaaugcagcaaucuuuuguugcaauauggcaguuuuuguacacaauuaaaccgugcuuuaacuggaauagcuguugaacaagacaaaaacacccaagaaguuuuugcacaagucaaacaaauuuacaaaacaccaccaauuaaagauuuuggugguuuuaauuuuucacaaauauuaccagauccaucaaaaccaagcaagaggucauuuauugaagaucuacuuuucaacaaagugacacuugcagauguuggcuucaucaaacaauauggugauugccuuggugauauugcugcuagagaccucauuugugcacaaaaguuuaacggccuuacuguuuugccaccuuugcucacagaugaaaugauugcucaauacacuucugcacuguuagcggguacaaucacuucugguuggaccuuuggugcaggugcugcauuacaaauaccauuugcuaugcaaauggcuuauagguuuaaugguauuggaguuacacagaauguucucuaugagaaccaaaaauugauugccaaccaauuuaauagugcuauuggcaaaauucaagacucacuuucuuccacagcaagugcacuuggaaaacuucaagauguggucaaccaaaaugcacaagcuuuaaacacgcuuguuaaacaacuuagcuccaauuuuggugcaauuucaaguguuuuaaaugauauccuuucacgucuugacaaaguugaggcugaagugcaaauugauagguugaucacaggcagacuucaaaguuugcagacauaugugacucaacaauuaauuagagcugcagaaaucagagcuucugcuaaucuugcugcuacuaaaaugucagaguguguacuuggacaaucaaaaagaguugauuuuuguggaaagggcuaucaucuuauguccuucccucagucagcaccucaugguguagucuucuugcaugugacuuaugucccugcacaagaaaagaacuucacaacugcuccugccauuugucaugauggaaaagcacacuuuccucgugaaggugucuuuguuucaaauggcacacacugguuuguaacacaaaggaauuuuuaugaaccacaaaucauuacuacagacaacacauuugugucugguaacugugauguuguaauaggaauugucaacaacacaguuuaugauccuuugcaaccugaauuagacucauucaaggaggaguuagauaaauauuuuaagaaucauacaucaccagauguugauuuaggugacaucucuggcauuaaugcuucaguuguaaacauucaaaaagaaauugaccgccucaaugagguugccaagaauuuaaaugaaucucucaucgaucuccaagaacuuggaaaguaugagcaguauauaaaauggccaugguacauuuggcuagguuuuauagcuggcuugauugccauaguaauggugacaauuaugcuuugcuguaugaccaguugcuguaguugucucaagggcuguuguucuuguggauccugcugcaaauuugaugaagacgacucugagccagugcucaaaggagucaaauuacauuacacauaaggacuagucccuguucccagagcccacuuuuuuuucuuuuuuugaaauaaaauagccugucuuucagaucucaaaggcucuuuucagagccaccaaaaaaaaaaaaaaaaaaaaaaaaaaaaaaaaaaaaaaaaaaaaaaaaaaaaaaaaaaaaaaaaaaaaaaaaaaaaaaaaaaaaaaaaaaaaaaaaaaaaa

SEQ ID NO: 12259 - RNA, 4094 nt, Artificial Sequence
  SARS-CoV-2/Greece/16/2020__EPI_ISL_418265 spike protein mRNA wt (1-1273)
aggagagucccgcagucggcguccagcggcucugcuuguucgugugugugucguugcaggccuuauucaagcuuaccauguuuguuuuucuuguuuuauugccacuagucucuagucaguguguuaaucuuacaaccagaacucaauuacccccugcauacacuaauucuuucacacgugguguuuauuacccugacaaaguuuucagauccucaguuuuacauucaacucaggacuuguucuuaccuuucuuuuccaauguuacuugguuccaugcuauacaugucucugggaccaaugguacuaagagguuugauaacccuguccuaccauuuaaugaugguguuuauuuugcuuccacugagaagucuaacauaauaagaggcuggauuuuugguacuacuuuagauucgaagacccagucccuacuuauuguuaauaacgcuacuaauguuguuauuaaagucugugaauuucaauuuuguaaugauccauuuuuggguguuuauuaccacaaaaacaacaaaaguuggauggaaagugaguucagaguuuauucuagugcgaauaauugcacuuuugaauaugucucucagccuuuucuuauggaccuugaaggaaaacaggguaauuucaaaaaucuuagggaauuuguguuuaagaauguugaugguuauuuuaaaauauauucuaagcacacgccuauuaauuuagugcgugaucucccucaggguuuuucggcuuuagaaccauugguagauuugccaauagguauuaacaucacuagguuucaaacuuuacuugcuuuacauagaaguuauuugacuccuggugauucuucuucagguuggacagcuggugcugcagcuuauuauguggguuaucuucaaccuaggacuuuucuauuaaaauauaaugaaaauggaaccauuacagaugcuguagacugugcacuugacccucucucagaaacaaaguguacguugaaauccuucacuguagaaaaaggaaucuaucaaacuucuaacuuuagaguccaaccaacagaaucuauuguuagauuuccuaauauuacaaacuugugcccuuuuggugaaguuuuuaacgccaccagauuugcaucuguuuaugcuuggaacaggaagagaaucagcaacuguguugcugauuauucuguccuauauaauuccgcaucauuuuccacuuuuaaguguuauggagugucuccuacuaaauuaaaugaucucugcuuuacuaaugucuaugcagauucauuuguaauuagaggugaugaagucagacaaaucgcuccagggcaaacuggaaagauugcugauuauaauuauaaauuaccagaugauuuuacaggcugcguuauagcuuggaauucuaacaaucuugauucuaagguuggugguaauuauaauuaccuguauagauuguuuaggaagucuaaucucaaaccuuuugagagagauauuucaacugaaaucuaucaggccgguagcacaccuuguaaugguguugaagguuuuaauuguuacuuuccuuuacaaucauaugguuuccaacccacuaaugguguugguuaccaaccauacagaguaguaguacuuucuuuugaacuucuacaugcaccagcaacuguuuguggaccuaaaaagucuacuaauuugguuaaaaacaaaugugucaauuucaacuucaaugguuuaacaggcacagguguucuuacugagucuaacaaaaaguuucugccuuuccaacaauuuggcagagacauugcugacacuacugaugcuguccgugauccacagacacuugagauucuugacauuacaccauguucuuuugguggugucaguguuauaacaccaggaacaaauacuucuaaccagguugcuguucuuuaucaggauguuaacugcacagaagucccuguugcuauucaugcagaucaacuuacuccuacuuggcguguuuauucuacagguucuaauguuuuucaaacacgugcaggcuguuuaauaggggcugaacaugucaacaacucauaugagugugacauacccauuggugcagguauaugcgcuaguuaucagacucagacuaauucuccucggcgggcacguaguguagcuagucaauccaucauugccuacacuaugucacuuggugcagaaaauucaguugcuuacucuaauaacucuauugccauacccacaaauuuuacuauuaguguuaccacagaaauucuaccagugucuaugaccaagacaucaguagauuguacaauguacauuuguggugauucaacugaaugcagcaaucuuuuguugcaauauggcaguuuuuguacacaauuaaaccgugcuuuaacuggaauagcuguugaacaagacaaaaacacccaagaaguuuuugcacaagucaaacaaauuuacaaaacaccaccaauuaaagauuuuggugguuuuaauuuuucacaaauauuaccagauccaucaaaaccaagcaagaggucauuuauugaagaucuacuuuucaacaaagugacacuugcagaugcuggcuucaucaaacaauauggugauugccuuggugauauugcugcuagagaccucauuugugcacaaaaguuuaacggccuuacuguuuugccaccuuugcucacagaugaaaugauugcucaauacacuucugcacuguuagcggguacaaucacuucugguuggaccuuuggugcaggugcugcauuacaaauaccauuugcuaugcaaauggcuuauagguuuaaugguauuggaguuacacagaauguucucuaugagaaccaaaaauugauugccaaccaauuuaauagugcuauuggcaaaauucaagacucacuuucuuccacagcaagugcacuuggaaaacuucaagauguggucaaccaaaaugcacaagcuuuaaacacgcuuguuaaacaacuuagcuccaauuuuggugcaauuucaaguguuuuaaaugauauccuuucacgucuugacaaaguugaggcugaagugcaaauugauagguugaucacaggcagacuucaaaguuugcagacauaugugacucaacaauuaauuagagcugcagaaaucagagcuucugcuaaucuugcugcuacuaaaaugucagaguguguacuuggacaaucaaaaagaguugauuuuuguggaaagggcuaucaucuuauguccuucccucagucagcaccucaugguguagucuucuugcaugugacuuaugucccugcacaagaaaagaacuucacaacugcuccugccauuugucaugauggaaaagcacacuuuccucgugaaggugucuuuguuucaaauggcacacacugguuuguaacacaaaggaauuuuuaugaaccacaaaucauuacuacagacaacacauuugugucugguaacugugauguuguaauaggaauugucaacaacacaguuuaugauccuuugcaaccugaauuagacucauucaaggaggaguuagauaaauauuuuaagaaucauacaucaccagauguugauuuaggugacaucucuggcauuaaugcuucaguuguaaacauucaaaaagaaauugaccgccucaaugagguugccaagaauuuaaaugaaucucucaucgaucuccaagaacuuggaaaguaugagcaguauauaaaauggccaugguacauuuggcuagguuuuauagcuggcuugauugccauaguaauggugacaauuaugcuuugcuguaugaccaguugcuguaguugucucaagggcuguuguucuuguggauccugcugcaaauuugaugaagacgacucugagccagugcucaaaggagucaaauuacauuacacauaaggacuagucccuguucccagagcccacuuuuuuuucuuuuuuugaaauaaaauagccugucuuucagaucucaaaggcucuuuucagagccaccaaaaaaaaaaaaaaaaaaaaaaaaaaaaaaaaaaaaaaaaaaaaaaaaaaaaaaaaaaaaaaaaaaaaaaaaaaaaaaaaaaaaaaaaaaaaaaaaaaaaa

SEQ ID NO: 12260 - RNA, 4094 nt, Artificial Sequence
  SARS-CoV-2/Iceland/319/2020__EPI_ISL_417648 spike protein mRNA wt (1-1273)
aggagagucccgcagucggcguccagcggcucugcuuguucgugugugugucguugcaggccuuauucaagcuuaccauguuuguuuuucuuguuuuauugccacuagucucuagucaguguguuaaucuuacaaccagaacucaauuacccccugcauacacuaauucuuucacacgugguguuuauuacccugacaaaguuuucagauccucaguuuuacauucaacucaggacuuguucuuaccuuucuuuuccaauguuacuugguuccaugcuauacaugucucugggaccaaugguacuaagagguuugauaacccuguccuaccauuuaaugaugguguuuauuuugcuuccacugagaagucuaacauaauaagaggcuggauuuuugguacuacuuuagauucgaagacccagucccuacuuauuguuaauaacgcuacuaauguuguuauuaaagucugugaauuucaauuuuguaaugauccauuuuuggguguuuauuaccacaaaaacaacaaaaguuggauggaaagugaguucagaguuuauucuagugcgaauaauugcacuuuugaauaugucucucagccuuuucuuauagaccuugaaggaaaacaggguaauuucaaaaaucuuagggaauuuguguuuaagaauauugaugguuauuuuaaaauauauucuaagcacacgccuauuaauuuagugcgugaucucccucaggguuuuucggcuuuagaaccauugguagauuugccaauagguauuaacaucacuagguuucaaacuuuacuugcuuuacauagaaguuauuugacuccuggugauucuucuucagguuggacagcuggugcugcagcuuauuauguggguuaucuucaaccuaggacuuuucuauuaaaauauaaugaaaauggaaccauuacagaugcuguagacugugcacuugacccucucucagaaacaaaguguacguugaaauccuucacuguagaaaaaggaaucuaucaaacuucuaacuuuagaguccaaccaacagaaucuauuguuagauuuccuaauauuacaaacuugugcccuuuuggugaaguuuuuaacgccaccagauuugcaucuguuuaugcuuggaacaggaagagaaucagcaacuguguugcugauuauucuguccuauauaauuccgcaucauuuuccacuuuuaaguguuauggagugucuccuacuaaauuaaaugaucucugcuuuacuaaugucuaugcagauucauuuguaauuagaggugaugaagucagacaaaucgcuccagggcaaacuggaaagauugcugauuauaauuauaaauuaccagaugauuuuacaggcugcguuauagcuuggaauucuaacaaucuugauucuaagguuggugguaauuauaauuaccuguauagauuguuuaggaagucuaaucucaaaccuuuugagagagauauuucaacugaaaucuaucaggccgguagcacaccuuguaaugguguugaagguuuuaauuguuacuuuccuuuacaaucauaugguuuccaacccacuaaugguguugguuaccaaccauacagaguaguaguacuuucuuuugaacuucuacaugcaccagcaacuguuuguggaccuaaaaagucuacuaauuugguuaaaaacaaaugugucaauuucaacuucaaugguuuaacaggcacagguguucuuacugagucuaacaaaaaguuucugccuuuccaacaauuuggcagagacauugcugacacuacugaugcuguccgugauccacagacacuugagauucuugacauuacaccauguucuuuugguggugucaguguuauaacaccaggaacaaauacuucuaaccagguugcuguucuuuaucaggguguuaacugcacagaagucccuguugcuauucaugcagaucaacuuacuccuacuuggcguguuuauucuacagguucuaauguuuuucaaacacgugcaggcuguuuaauaggggcugaacaugucaacaacucauaugagugugacauacccauuggugcagguauaugcgcuaguuaucagacucagacuaauucuccucggcgggcacguaguguagcuagucaauccaucauugccuacacuaugucacuuggugcagaaaauucaguugcuuacucuaauaacucuauugccauacccacaaauuuuacuauuaguguuaccacagaaauucuaccagugucuaugaccaagacaucaguagauuguacaauguacauuuguggugauucaacugaaugcagcaaucuuuuguugcaauauggcaguuuuuguacacaauuaaaccgugcuuuaacuggaauagcuguugaacaagacaaaaacacccaagaaguuuuugcacaagucaaacaaauuuacaaaacaccaccaauuaaagauuuuggugguuuuaauuuuucacaaauauuaccagauccaucaaaaccaagcaagaggucauuuauugaagaucuacuuuucaacaaagugacacuugcagaugcuggcuucaucaaacaauauggugauugccuuggugauauugcugcuagagaccucauuugugcacaaaaguuuaacggccuuacuguuuugccaccuuugcucacagaugaaaugauugcucaauacacuucugcacuguuagcggguacaaucacuucugguuggaccuuuggugcaggugcugcauuacaaauaccauuugcuaugcaaauggcuuauagguuuaaugguauuggaguuacacagaauguucucuaugagaaccaaaaauugauugccaaccaauuuaauagugcuauuggcaaaauucaagacucacuuucuuccacagcaagugcacuuggaaaacuucaagauguggucaaccaaaaugcacaagcuuuaaacacgcuuguuaaacaacuuagcuccaauuuuggugcaauuucaaguguuuuaaaugauauccuuucacgucuugacaaaguugaggcugaagugcaaauugauagguugaucacaggcagacuucaaaguuugcagacauaugugacucaacaauuaauuagagcugcagaaaucagagcuucugcuaaucuugcugcuacuaaaaugucagaguguguacuuggacaaucaaaaagaguugauuuuuguggaaagggcuaucaucuuauguccuucccucagucagcaccucaugguguagucuucuugcaugugacuuaugucccugcacaagaaaagaacuucacaacugcuccugccauuugucaugauggaaaagcacacuuuccucgugaaggugucuuuguuucaaauggcacacacugguuuguaacacaaaggaauuuuuaugaaccacaaaucauuacuacagacaacacauuugugucugguaacugugauguuguaauaggaauugucaacaacacaguuuaugauccuuugcaaccugaauuagacucauucaaggaggaguuagauaaauauuuuaagaaucauacaucaccagauguugauuuaggugacaucucuggcauuaaugcuucaguuguaaacauucaaaaagaaauugaccgccucaaugagguugccaagaauuuaaaugaaucucucaucgaucuccaagaacuuggaaaguaugagcaguauauaaaauggccaugguacauuuggcuagguuuuauagcuggcuugauugccauaguaauggugacaauuaugcuuugcuguaugaccaguugcuguaguugucucaagggcuguuguucuuguggauccugcugcaaauuugaugaagacgacucugagccagugcucaaaggagucaaauuacauuacacauaaggacuagucccuguucccagagcccacuuuuuuuucuuuuuuugaaauaaaauagccugucuuucagaucucaaaggcucuuuucagagccaccaaaaaaaaaaaaaaaaaaaaaaaaaaaaaaaaaaaaaaaaaaaaaaaaaaaaaaaaaaaaaaaaaaaaaaaaaaaaaaaaaaaaaaaaaaaaaaaaaaaaa

SEQ ID NO: 12261 - RNA, 4094 nt, Artificial Sequence
  SARS-CoV-2/Congo/94/2020__EPI_ISL_417947 spike protein mRNA wt (1-1273)
aggagagucccgcagucggcguccagcggcucugcuuguucgugugugugucguugcaggccuuauucaagcuuaccauguuuguuuuucuuguuuuauugccacuagucucuagucaguguguuaaucuuacaaccagaacucaauuacccccugcauacacuaauucuuucacacgugguguuuauuacccugacaaaguuuucagauccucaguuuuacauucaacucaggacuuguucuuaccuuucuuuuccaauguuacuugguuccaugcuauacaugucucugggaccaaugguacuaagagguuugauaacccuguccuaccauuuaaugaugguguuuauuuugcuuccacugagaagucuaacauaauaagaggcuggauuuuugguacuacuuuagauucgaagacccagucccuacuuauuguuaauaacgcuacuaauguuguuauuaaagucugugaauuucaauuuuguaaugauccauuuuuggguguuuauuaccacaaaaacaacaaaaguuggauggaaagugaguucagaguuuauucuagugcgaauaauugcacuuuugaauaugucucucagccuuuucuuauggaccuugaaggaaaacaggguaauuucaaaaaucuuagggaauuuguguuuaagaauauugaugguuauuuuaaaauauauucuaagcacacgccuauuaauuuagugcgugaucucccucaggguuuuucggcuuuagaaccauugguagauuugccaauagguauuaacaucacuagguuucaaacuuuacuugcuuuacauagaaguuauuugacuccuggugauucuucuucagguuggacagcuggugcugcagcuuauuauguggguuaucuucaaccuaggacuuuucuauuaaaauauaaugaaaauggaaccauuacagaugcuguagacugugcacuugacccucucucagaaacaaaguguacguugaaauccuucacuguagaaaaaggaaucuaucaaacuucuaacuuuagaguccaaccaacagaaucuauuguuagauuuccuaauauuacaaacuugugcccuuuuggugaaguuuuuaacgccaccagauuugcaucuguuuaugcuuggaacaggaagagaaucagcaacuguguugcugauuauucuguccuauauaauuccgcaucauuuuccacuuuuaaguguuauggagugucuccuacuaaauuaaaugaucucugcuuuacuaaugucuaugcagauucauuuguaauuagaggugaugaagucagacaaaucgcuccagggcaaacuggaaagauugcugauuauaauuauaaauuaccagaugauuuuacaggcugcguuauagcuuggaauucuaacaaucuugauucuaagguuggugguaauuauaauuaccuguauagauuguuuaggaagucuaaucucaaaccuuuugagagagauauuucaacugaaaucuaucaggccgguagcacaccuuguaaugguguugaagguuuuaauuguuacuuuccuuuacaaucauaugguuuccaacccacuaaugguguugguuaccaaccauacagaguaguaguacuuucuuuugaacuucuacaugcaccagcaacuguuuguggaccuaaaaagucuacuaauuugguuaaaaacaaaugugucaauuucaacuucaaugguuuaacaggcacagguguucuuacugagucuaacaaaaaguuucugccuuuccaacaauuuggcagagacauugcugacacuacugaugcuguccgugauccacagacacuugagauucuugacauuacaccauguucuuuugguggugucaguguuauaacaccaggaacaaauacuucuaaccagguugcuguucuuuaucaggguguuaacugcacagaagucccuguugcuauucaugcagaucaacuuacuccuacuuggcguguuuauucuacagguucuaauguuuuucaaacacgugcaggcuguuuaauaggggcugaacaugucaacaacucauaugagugugacauacccauuggugcagguauaugcgcuaguuaucagacucagacuaauucuccucggcgggcacguaguguagcuagucaauccaucauugccuacacuaugucacuuggugcagaaaauucaguugcuuacucuaauaacucuauugccauacccacaaauuuuacuauuaguguuaccacagaaauucuaccagugucuaugaccaagacaucaguagauuguacaauguacauuuguggugauucaacugaaugcagcaaucuuuuguugcaauauggcaguuuuuguacacaauuaaaccgugcuuuaacuggaauagcuguugaacaagacaaaaacacccaagaaguuuuugcacaagucaaacaaauuuacaaaacaccaccaauuaaagauuuuggugguuuuaauuuuucacaaauauuaccagauccaucaaaaccaagcaagaggucauuuauugaagauauacuuuucaacaaagugacacuugcagaugcuggcuucaucaaacaauauggugauugccuuggugauauugcugcuagagaccucauuugugcacaaaaguuuaacggccuuacuguuuugccaccuuugcucacagaugaaaugauugcucaauacacuucugcacuguuagcggguacaaucacuucugguuggaccuuuggugcaggugcugcauuacaaauaccauuugcuaugcaaauggcuuauagguuuaaugguauuggaguuacacagaauguucucuaugagaaccaaaaauugauugccaaccaauuuaauagugcuauuggcaaaauucaagacucacuuucuuccacagcaagugcacuuggaaaacuucaagauguggucaaccaaaaugcacaagcuuuaaacacgcuuguuaaacaacuuagcuccaauuuuggugcaauuucaaguguuuuaaaugauauccuuucacgucuugacaaaguugaggcugaagugcaaauugauagguugaucacaggcagacuucaaaguuugcagacauaugugacucaacaauuaauuagagcugcagaaaucagagcuucugcuaaucuugcugcuacuaaaaugucagaguguguacuuggacaaucaaaaagaguugauuuuuguggaaagggcuaucaucuuauguccuucccucagucagcaccucaugguguagucuucuugcaugugacuuaugucccugcacaagaaaagaacuucacaacugcuccugccauuugucaugauggaaaagcacacuuuccucgugaaggugucuuuguuucaaauggcacacacugguuuguaacacaaaggaauuuuuaugaaccacaaaucauuacuacagacaacacauuugugucugguaacugugauguuguaauaggaauugucaacaacacaguuuaugauccuuugcaaccugaauuagacucauucaaggaggaguuagauaaauauuuuaagaaucauacaucaccagauguugauuuaggugacaucucuggcauuaaugcuucaguuguaaacauucaaaaagaaauugaccgccucaaugagguugccaagaauuuaaaugaaucucucaucgaucuccaagaacuuggaaaguaugagcaguauauaaaauggccaugguacauuuggcuagguuuuauagcuggcuugauugccauaguaauggugacaauuaugcuuugcuguaugaccaguugcuguaguugucucaagggcuguuguucuuguggauccugcugcaaauuugaugaagacgacucugagccagugcucaaaggagucaaauuacauuacacauaaggacuagucccuguucccagagcccacuuuuuuuucuuuuuuugaaauaaaauagccugucuuucagaucucaaaggcucuuuucagagccaccaaaaaaaaaaaaaaaaaaaaaaaaaaaaaaaaaaaaaaaaaaaaaaaaaaaaaaaaaaaaaaaaaaaaaaaaaaaaaaaaaaaaaaaaaaaaaaaaaaaaa

SEQ ID NO: 12262 - RNA, 4094 nt, Artificial Sequence
  SARS-CoV-2/Congo/158/2020__EPI_ISL_417950 spike protein mRNA wt (1-1273)
aggagagucccgcagucggcguccagcggcucugcuuguucgugugugugucguugcaggccuuauucaagcuuaccauguuuguuuuucuuguuuuauugccacuagucucuagucaguguguuaaucuuacaaccagaacucaauuacccccugcauacacuaauucuuucacacgugguguuuauuacccugacaaaguuuucagauccucaguuuuacauucaacucaggacuuguucuuaccuuucuuuuccaauguuacuugguuccaugcuauacaugucucugggaccaaugguacuaagagguuugauaacccuguccuaccauuuaaugaugguguuuauuuugcuuccacugagaagucuaacauaauaagaggcuggauuuuugguacuacuuuagauucgaagacccagucccuacuuauuguuaauaacgcuacuaauguuguuauuaaagucugugaauuucaauuuuguaaugauccauuuuuggguguuuauuaccacaaaaacaacaaaaguuggauggaaagugaguucagaguuuauucuagugcgaauaauugcacuuuugaauaugucucucagccuuuucuuauggaccuugaaggaaaacaggguaauuucaaaaaucuuagggaauuuguguuuaagaauauugaugguuauuuuaaaauauauucuaagcacacgccuauuaauuuagugcgugaucucccucaggguuuuucggcuuuagaaccauugguagauuugccaauagguauuaacaucacuagguuucaaacuuuacuugcuuuacauagaaguuauuugacuccuggugauucuucuucagguuggacagcuggugcugcagcuuauuauguggguuaucuucaaccuaggacuuuucuauuaaaauauaaugaaaauggaaccauuacagaugcuguagacugugcacuugacccucucucagaaacaaaguguacguugaaauccuucacuguagaaaaaggaaucuaucaaacuucuaacuuuagaguccaaccaacagaaucuauuguuagauuuccuaauauuacaaacuugugcccuuuuggugaaguuuuuaacgccaccagauuugcaucuguuuaugcuuggaacaggaagagaaucagcaacuguguugcugauuauucuguccuauauaauuccgcaucauuuuccacuuuuaaguguuauggagugucuccuacuaaauuaaaugaucucugcuuuacuaaugucuaugcagauucauuuguaauuagaggugaugaagucagacaaaucgcuccagggcaaacuggaaagauugcugauuauaauuauaaauuaccagaugauuuuacaggcugcguuauagcuuggaauucuaacaaucuugauucuaagguuggugguaauuauaauuaccuguauagauuguuuaggaagucuaaucucaaaccuuuugagagagauauuucaacugaaaucuaucaggccgguagcacaccuuguaaugguguugaagguuuuaauuguuacuuuccuuuacaaucauaugguuuccaacccacuaaugguguugguuaccaaccauacagaguaguaguacuuucuuuugaacuucuacaugcaccagcaacuguuuguggaccuaaaaagucuacuaauuugguuaaaaacaaaugugucaauuucaacuucaaugguuuaacaggcacagguguucuuacugagucuaacaaaaaguuucugccuuuccaacaauuuggcagagacauugcugacacuacugaugcuguccgugauccacagacacuugagauucuugacauuacaccauguucuuuugguggugucaguguuauaacaccaggaacaaauacuucuaaccagguugcuguucuuuaucaggauguuaacugcacagaagucccuguugcuauucaugcagaucaacuuacuccuacuuggcguguuuauucuacagguucuaauguuuuucaaacacgugcaggcuguuuaauaggggcugaacaugucaacaacucauaugagugugacauacccauuggugcagguauaugcgcuaguuaucagacucagacuaauucuccucggcgggcacguaguguagcuagucaauccaucauugccuacacuaugucacuuggugcagaaaauucaguugcuuacucuaauaacucuauugccauacccacaaauuuuacuauuaguguuaccacagaaauucuaccagugucuaugaccaagacaucaguagauuguacaauguacauuuguggugauucaacugaaugcagcaaucuuuuguugcaauauggcaguuuuuguacacaauuaaaccgugcuuuaacuggaauagcuguugaacaagacaaaaacacccaagaaguuuuugcacaagucaaacaaauuuacaaaacaccaccaauuaaagauuuuggugguuuuaauuuuucacaaauauuaccagauccaucaaaaccaagcaagaggucauuuauugaagaucuacuuuucaacaaagugacacuugcagaugcuggcuucaucaaacaauauggugauugccuuggugauauugcugcuagagaccucauuugugcacaaaaguuuaacggccuuacuguuuugccaccuuugcucacagaugaaaugauugcucaauacacuucugcacuguuagcggguacaaucacuucugguuggaccuuuggugcaggugcugcauuacaaauaccauuugcuaugcaaauggcuuauagguuuaaugguauuggaguuacacagaauguucucuaugagaaccaaaaauugauugccaaccaauuuaauagugcuauuggcaaaauucaagacucacuuucuuccacagcaagugcacuuggaaaacuucaagauguggucaaccaaaaugcacaagcuuuaaacacgcuuguuaaacaacuuagcuccaauuuuggugcaauuucaaguguuuuaaaugauauccuuucacgucuugacaaaguugaggcugaagugcaaauugauagguugaucacaggcagacuucaaaguuugcagacauaugugacucaacaauuaauuagagcugcagaaaucagagcuucugcuaaucuugcugcuacuaaaaugucagaguguguacuuggacaaucaaaaagaguugauuuuuguggaaagggcuaucaucuuauguccuucccucagucagcaccucaugguguagucuucuugcaugugacuuaugucccugcacaagaaaagaacuucacaacugcuccugccauuugucaugauggaaaagcacacuuuccucgugaaggugucuuuguuucaaauggcacacacugguuuguaacacaaaggaauuuuuaugaaccacaaaucauuacuacagacaacacauuuuugucugguaacugugauguuguaauaggaauugucaacaacacaguuuaugauccuuugcaaccugaauuagacucauucaaggaggaguuagauaaauauuuuaagaaucauacaucaccagauguugauuuaggugacaucucuggcauuaaugcuucaguuguaaacauucaaaaagaaauugaccgccucaaugagguugccaagaauuuaaaugaaucucucaucgaucuccaagaacuuggaaaguaugagcaguauauaaaauggccaugguacauuuggcuagguuuuauagcuggcuugauugccauaguaauggugacaauuaugcuuugcuguaugaccaguugcuguaguugucucaagggcuguuguucuuguggauccugcugcaaauuugaugaagacgacucugagccagugcucaaaggagucaaauuacauuacacauaaggacuagucccuguucccagagcccacuuuuuuuucuuuuuuugaaauaaaauagccugucuuucagaucucaaaggcucuuuucagagccaccaaaaaaaaaaaaaaaaaaaaaaaaaaaaaaaaaaaaaaaaaaaaaaaaaaaaaaaaaaaaaaaaaaaaaaaaaaaaaaaaaaaaaaaaaaaaaaaaaaaaa

SEQ ID NO: 12263 - RNA, 4094 nt, Artificial Sequence
  SARS-CoV-2/USA/UT-00034/2020__EPI_ISL_417977 spike protein mRNA wt (1-1273)
aggagagucccgcagucggcguccagcggcucugcuuguucgugugugugucguugcaggccuuauucaagcuuaccauguuuguuuuucuuguuuuauugccacuagucucuagucaguguguuaaucuuacaaccagaacucaauuacccccugcauacacuaauucuuucacacgugguguuuauuacccugacaaaguuuucagauccucaguuuuacauucaacucaggacuuguucuuaccuuucuuuuccaauguuacuugguuccaugcuauacaugucucugggaccaaugguacuaagagguuugauaacccuguccuaccauuuaaugaugguguuuauuuugcuuccacugagaagucuaacauaauaagaggcuggauuuuugguacuacuuuagauucgaagacccagucccuacuuauuguuaauaacgcuacuaauguuguuauuaaagucugugaauuucaauuuuguaaugauccauuuuuggguguuuauuacuacaaaaacaacaaaaguuggauggaaagugaguucagaguuuauucuagugcgaauaauugcacuuuugaauaugucucucagccuuuucuuauggaccuugaaggaaaacaggguaauuucaaaaaucuuagggaauuuguguuuaagaauauugaugguuauuuuaaaauauauucuaagcacacgccuauuaauuuagugcgugaucucccucaggguuuuucggcuuuagaaccauugguagauuugccaauagguauuaacaucacuagguuucaaacuuuacuugcuuuacauagaaguuauuugacuccuggugauucuucuucagguuggacagcuggugcugcagcuuauuauguggguuaucuucaaccuaggacuuuucuauuaaaauauaaugaaaauggaaccauuacagaugcuguagacugugcacuugacccucucucagaaacaaaguguacguugaaauccuucacuguagaaaaaggaaucuaucaaacuucuaacuuuagaguccaaccaacagaaucuauuguuagauuuccuaauauuacaaacuugugcccuuuuggugaaguuuuuaacgccaccagauuugcaucuguuuaugcuuggaacaggaagagaaucagcaacuguguugcugauuauucuguccuauauaauuccgcaucauuuuccacuuuuaaguguuauggagugucuccuacuaaauuaaaugaucucugcuuuacuaaugucuaugcagauucauuuguaauuagaggugaugaagucagacaaaucgcuccagggcaaacuggaaagauugcugauuauaauuauaaauuaccagaugauuuuacaggcugcguuauagcuuggaauucuaacaaucuugauucuaagguuggugguaauuauaauuaccuguauagauuguuuaggaagucuaaucucaaaccuuuugagagagauauuucaacugaaaucuaucaggccgguagcacaccuuguaaugguguugaagguuuuaauuguuacuuuccuuuacaaucauaugguuuccaacccacuaaugguguugguuaccaaccauacagaguaguaguacuuucuuuugaacuucuacaugcaccagcaacuguuuguggaccuaaaaagucuacuaauuugguuaaaaacaaaugugucaauuucaacuucaaugguuuaacaggcacagguguucuuacugagucuaacaaaaaguuucugccuuuccaacaauuuggcagagacauugcugacacuacugaugcuguccgugauccacagacacuugagauucuugacauuacaccauguucuuuugguggugucaguguuauaacaccaggaacaaauacuucuaaccagguugcuguucuuuaucaggguguuaacugcacagaagucccuguugcuauucaugcagaucaacuuacuccuacuuggcguguuuauucuacagguucuaauguuuuucaaacacgugcaggcuguuuaauaggggcugaacaugucaacaacucauaugagugugacauacccauuggugcagguauaugcgcuaguuaucagacucagacuaauucuccucggcgggcacguaguguagcuagucaauccaucauugccuacacuaugucacuuggugcagaaaauucaguugcuuacucuaauaacucuauugccauacccacaaauuuuacuauuaguguuaccacagaaauucuaccagugucuaugaccaagacaucaguagauuguacaauguacauuuguggugauucaacugaaugcagcaaucuuuuguugcaauauggcaguuuuuguacacaauuaaaccgugcuuuaacuggaauagcuguugaacaagacaaaaacacccaagaaguuuuugcacaagucaaacaaauuuacaaaacaccaccaauuaaagauuuuggugguuuuaauuuuucacaaauauuaccagauccaucaaaaccaagcaagaggucauuuauugaagaucuacuuuucaacaaagugacacuugcagaugcuggcuucaucaaacaauauggugauugccuuggugauauugcugcuagagaccucauuugugcacaaaaguuuaacggccuuacuguuuugccaccuuugcucacagaugaaaugauugcucaauacacuucugcacuguuagcggguacaaucacuucugguuggaccuuuggugcaggugcugcauuacaaauaccauuugcuaugcaaauggcuuauagguuuaaugguauuggaguuacacagaauguucucuaugagaaccaaaaauugauugccaaccaauuuaauagugcuauuggcaaaauucaagacucacuuucuuccacagcaagugcacuuggaaaacuucaagauguggucaaccaaaaugcacaagcuuuaaacacgcuuguuaaacaacuuagcuccaauuuuggugcaauuucaaguguuuuaaaugauauccuuucacgucuugacaaaguugaggcugaagugcaaauugauagguugaucacaggcagacuucaaaguuugcagacauaugugacucaacaauuaauuagagcugcagaaaucagagcuucugcuaaucuugcugcuacuaaaaugucagaguguguacuuggacaaucaaaaagaguugauuuuuguggaaagggcuaucaucuuauguccuucccucagucagcaccucaugguguagucuucuugcaugugacuuaugucccugcacaagaaaagaacuucacaacugcuccugccauuugucaugauggaaaagcacacuuuccucgugaaggugucuuuguuucaaauggcacacacugguuuguaacacaaaggaauuuuuaugaaccacaaaucauuacuacagacaacacauuugugucugguaacugugauguuguaauaggaauugucaacaacacaguuuaugauccuuugcaaccugaauuagacucauucaaggaggaguuagauaaauauuuuaagaaucauacaucaccagauguugauuuaggugacaucucuggcauuaaugcuucaguuguaaacauucaaaaagaaauugaccgccucaaugagguugccaagaauuuaaaugaaucucucaucgaucuccaagaacuuggaaaguaugagcaguauauaaaauggccaugguacauuuggcuagguuuuauagcuggcuugauugccauaguaauggugacaauuaugcuuugcuguaugaccaguugcuguaguugucucaagggcuguuguucuuguggauccugcugcaaauuugaugaagacgacucugagccagugcucaaaggagucaaauuacauuacacauaaggacuagucccuguucccagagcccacuuuuuuuucuuuuuuugaaauaaaauagccugucuuucagaucucaaaggcucuuuucagagccaccaaaaaaaaaaaaaaaaaaaaaaaaaaaaaaaaaaaaaaaaaaaaaaaaaaaaaaaaaaaaaaaaaaaaaaaaaaaaaaaaaaaaaaaaaaaaaaaaaaaaa

SEQ ID NO: 12264 - RNA, 4094 nt, Artificial Sequence
  SARS-CoV-2/USA/UT-00033/2020__EPI_ISL_417976 spike protein mRNA wt (1-1273)
aggagagucccgcagucggcguccagcggcucugcuuguucgugugugugucguugcaggccuuauucaagcuuaccauguuuguuuuucuuguuuuauugccacuagucucuagucaguguguuaaucuuacaaccagaacucaauuacccccugcauacacuaauucuuucacacgugguguuuauuacccugacaaaguuuucagauccucaguuuuacauucaacucaggacuuguucuuaccuuucuuuuccaauguuacuugguuccaugcuauacaugucucugggaccaaugguacuaagagguuugauaacccuguccuaccauuuaaugaugguguuuauuuugcuuccacugagaagucuaacauaauaagaggcuggauuuuugguacuacuuuagauucgaagacccagucccuacuuauuguuaauaacgcuacuaauguuguuauuaaagucugugaauuucaauuuuguaaugauccauuuuuggguguuuauuaccacaaaaacaacaaaaguuggauggaaagugaguucagaguuuauucuagugcgaauaauugcacuuuugaauaugucucucagccuuuucuuauggaccuugaaggaaaacaggguaauuucaaaaaucuuagggaauuuguguuuaagaauauugaugguuauuuuaaaauauauucuaagcacacgccuauuaauuuagugcgugaucucccucaggguuuuucggcuuuagaaccauugguagauuugccaauagguauuaacaucacuagguuucaaacuuuacuugcuuuacauagaaguuauuugacuccuggugauucuucuucagguuugacagcuggugcugcagcuuauuauguggguuaucuucaaccuaggacuuuucuauuaaaauauaaugaaaauggaaccauuacagaugcuguagacugugcacuugacccucucucagaaacaaaguguacguugaaauccuucacuguagaaaaaggaaucuaucaaacuucuaacuuuagaguccaaccaacagaaucuauuguuagauuuccuaauauuacaaacuugugcccuuuuggugaaguuuuuaacgccaccagauuugcaucuguuuaugcuuggaacaggaagagaaucagcaacuguguugcugauuauucuguccuauauaauuccgcaucauuuuccacuuuuaaguguuauggagugucuccuacuaaauuaaaugaucucugcuuuacuaaugucuaugcagauucauuuguaauuagaggugaugaagucagacaaaucgcuccagggcaaacuggaaagauugcugauuauaauuauaaauuaccagaugauuuuacaggcugcguuauagcuuggaauucuaacaaucuugauucuaagguuggugguaauuauaauuaccuguauagauuguuuaggaagucuaaucucaaaccuuuugagagagauauuucaacugaaaucuaucaggccgguagcacaccuuguaaugguguugaagguuuuaauuguuacuuuccuuuacaaucauaugguuuccaacccacuaaugguguugguuaccaaccauacagaguaguaguacuuucuuuugaacuucuacaugcaccagcaacuguuuguggaccuaaaaagucuacuaauuugguuaaaaacaaaugugucaauuucaacuucaaugguuuaacaggcacagguguucuuacugagucuaacaaaaaguuucugccuuuccaacaauuuggcagagacauugcugacacuacugaugcuguccgugauccacagacacuugagauucuugacauuacaccauguucuuuugguggugucaguguuauaacaccaggaacaaauacuucuaaccagguugcuguucuuuaucaggguguuaacugcacagaagucccuguugcuauucaugcagaucaacuuacuccuacuuggcguguuuauucuacagguucuaauguuuuucaaacacgugcaggcuguuuaauaggggcugaacaugucaacaacucauaugagugugacauacccauuggugcagguauaugcgcuaguuaucagacucagacuaauucuccucggcgggcacguaguguagcuagucaauccaucauugccuacacuaugucacuuggugcagaaaauucaguugcuuacucuaauaacucuauugccauacccacaaauuuuacuauuaguguuaccacagaaauucuaccagugucuaugaccaagacaucaguagauuguacaauguacauuuguggugauucaacugaaugcagcaaucuuuuguugcaauauggcaguuuuuguacacaauuaaaccgugcuuuaacuggaauagcuguugaacaagacaaaaacacccaagaaguuuuugcacaagucaaacaaauuuacaaaacaccaccaauuaaagauuuuggugguuuuaauuuuucacaaauauuaccagauccaucaaaaccaagcaagaggucauuuauugaagaucuacuuuucaacaaagugacacuugcagaugcuggcuucaucaaacaauauggugauugccuuggugauauugcugcuagagaccucauuugugcacaaaaguuuaacggccuuacuguuuugccaccuuugcucacagaugaaaugauugcucaauacacuucugcacuguuagcggguacaaucacuucugguuggaccuuuggugcaggugcugcauuacaaauaccauuugcuaugcaaauggcuuauagguuuaaugguauuggaguuacacagaauguucucuaugagaaccaaaaauugauugccaaccaauuuaauagugcuauuggcaaaauucaagacucacuuucuuccacagcaagugcacuuggaaaacuucaagauguggucaaccaaaaugcacaagcuuuaaacacgcuuguuaaacaacuuagcuccaauuuuggugcaauuucaaguguuuuaaaugauauccuuucacgucuugacaaaguugaggcugaagugcaaauugauagguugaucacaggcagacuucaaaguuugcagacauaugugacucaacaauuaauuagagcugcagaaaucagagcuucugcuaaucuugcugcuacuaaaaugucagaguguguacuuggacaaucaaaaagaguugauuuuuguggaaagggcuaucaucuuauguccuucccucagucagcaccucaugguguagucuucuugcaugugacuuaugucccugcacaagaaaagaacuucacaacugcuccugccauuugucaugauggaaaagcacacuuuccucgugaaggugucuuuguuucaaauggcacacacugguuuguaacacaaaggaauuuuuaugaaccacaaaucauuacuacagacaacacauuugugucugguaacugugauguuguaauaggaauugucaacaacacaguuuaugauccuuugcaaccugaauuagacucauucaaggaggaguuagauaaauauuuuaagaaucauacaucaccagauguugauuuaggugacaucucuggcauuaaugcuucaguuguaaacauucaaaaagaaauugaccgccucaaugagguugccaagaauuuaaaugaaucucucaucgaucuccaagaacuuggaaaguaugagcaguauauaaaauggccaugguacauuuggcuagguuuuauagcuggcuugauugccauaguaauggugacaauuaugcuuugcuguaugaccaguugcuguaguugucucaagggcuguuguucuuguggauccugcugcaaauuugaugaagacgacucugagccagugcucaaaggagucaaauuacauuacacauaaggacuagucccuguucccagagcccacuuuuuuuucuuuuuuugaaauaaaauagccugucuuucagaucucaaaggcucuuuucagagccaccaaaaaaaaaaaaaaaaaaaaaaaaaaaaaaaaaaaaaaaaaaaaaaaaaaaaaaaaaaaaaaaaaaaaaaaaaaaaaaaaaaaaaaaaaaaaaaaaaaaaa

SEQ ID NO: 12265 - RNA, 4094 nt, Artificial Sequence
  SARS-CoV-2/USA/WI-13/2020__EPI_ISL_417516 spike protein mRNA wt (1-1273)
aggagagucccgcagucggcguccagcggcucugcuuguucgugugugugucguugcaggccuuauucaagcuuaccauguuuguuuuucuuguuuuauugccacuagucucuagucaguguguuaaucuuacaaccagaacucaauuacccccugcauacacuaauucuuucacacgugguguuuauuacccugacaaaguuuucagauccucaguuuuacauucaacucaggacuuguucuuaccuuucuuuuccaauguuacuugguuccaugcuauacaugucucugggaccaaugguacuaagagguuugauaacccuguccuaccauuuaaugaugguguuuauuuugcuuccacugagaagucuaacauaauaagaggcuggauuuuugguacuacuuuagauucgaagacccagucccuacuuauuguuaauaacgcuacuaauguuguuauuaaagucugugaauuucaauuuuguaaugauccauuuuuggguguuuauuaccacaaaaacaacaaaaguuggauggaaagugaguucagaguuuauucuagugcgaauaauugcacuuuugaauaugucucucagccuuuucuuauggaccuugaaggaaaacaggguaauuucaaaaaucuuagggaauuuguguuuaagaauauugaugguuauuuuaaaauauauucuaagcacacgccuauuaauuuagugcgugaucucccucaggguuuuucggcuuuagaaccauugguagauuugccaauagguauuaacaucacuagguuucaaacuuuacuugcuuuacauagaaguuauuugacuccuggugauucuucuucagguuggacagcuggugcugcagcuuauuauguggguuaucuucaaccuaggacuuuucuauuaaaauauaaugaaaauggaaccauuacagaugcuguagacugugcacuugacccucucucagaaacaaaguguacguugaaauccuucacuguagaaaaaggaaucuaucaaacuucuaacuuuagaguccuaccaacagaaucuauuguuagauuuccuaauauuacaaacuugugcccuuuuggugaaguuuuuaacgccaccagauuugcaucuguuuaugcuuggaacaggaagagaaucagcaacuguguugcugauuauucuguccuauauaauuccgcaucauuuuccacuuuuaaguguuauggagugucuccuacuaaauuaaaugaucucugcuuuacuaaugucuaugcagauucauuuguaauuagaggugaugaagucagacaaaucgcuccagggcaaacuggaaagauugcugauuauaauuauaaauuaccagaugauuuuacaggcugcguuauagcuuggaauucuaacaaucuugauucuaagguuggugguaauuauaauuaccuguauagauuguuuaggaagucuaaucucaaaccuuuugagagagauauuucaacugaaaucuaucaggccgguagcacaccuuguaaugguguugaagguuuuaauuguuacuuuccuuuacaaucauaugguuuccaacccacuaaugguguugguuaccaaccauacagaguaguaguacuuucuuuugaacuucuacaugcaccagcaacuguuuguggaccuaaaaagucuacuaauuugguuaaaaacaaaugugucaauuucaacuucaaugguuuaacaggcacagguguucuuacugagucuaacaaaaaguuucugccuuuccaacaauuuggcagagacauugcugacacuacugaugcuguccgugauccacagacacuugagauucuugacauuacaccauguucuuuugguggugucaguguuauaacaccaggaacaaauacuucuaaccagguugcuguucuuuaucaggguguuaacugcacagaagucccuguugcuauucaugcagaucaacuuacuccuacuuggcguguuuauucuacagguucuaauguuuuucaaacacgugcaggcuguuuaauaggggcugaacaugucaacaacucauaugagugugacauacccauuggugcagguauaugcgcuaguuaucagacucagacuaauucuccucggcgggcacguaguguagcuagucaauccaucauugccuacacuaugucacuuggugcagaaaauucaguugcuuacucuaauaacucuauugccauacccacaaauuuuacuauuaguguuaccacagaaauucuaccagugucuaugaccaagacaucaguagauuguacaauguacauuuguggugauucaacugaaugcagcaaucuuuuguugcaauauggcaguuuuuguacacaauuaaaccgugcuuuaacuggaauagcuguugaacaagacaaaaacacccaagaaguuuuugcacaagucaaacaaauuuacaaaacaccaccaauuaaagauuuuggugguuuuaauuuuucacaaauauuaccagauccaucaaaaccaagcaagaggucauuuauugaagaucuacuuuucaacaaagugacacuugcagaugcuggcuucaucaaacaauauggugauugccuuggugauauugcugcuagagaccucauuugugcacaaaaguuuaacggccuuacuguuuugccaccuuugcucacagaugaaaugauugcucaauacacuucugcacuguuagcggguacaaucacuucugguuggaccuuuggugcaggugcugcauuacaaauaccauuugcuaugcaaauggcuuauagguuuaaugguauuggaguuacacagaauguucucuaugagaaccaaaaauugauugccaaccaauuuaauagugcuauuggcaaaauucaagacucacuuucuuccacagcaagugcacuuggaaaacuucaagauguggucaaccaaaaugcacaagcuuuaaacacgcuuguuaaacaacuuagcuccaauuuuggugcaauuucaaguguuuuaaaugauauccuuucacgucuugacaaaguugaggcugaagugcaaauugauagguugaucacaggcagacuucaaaguuugcagacauaugugacucaacaauuaauuagagcugcagaaaucagagcuucugcuaaucuugcugcuacuaaaaugucagaguguguacuuggacaaucaaaaagaguugauuuuuguggaaagggcuaucaucuuauguccuucccucagucagcaccucaugguguagucuucuugcaugugacuuaugucccugcacaagaaaagaacuucacaacugcuccugccauuugucaugauggaaaagcacacuuuccucgugaaggugucuuuguuucaaauggcacacacugguuuguaacacaaaggaauuuuuaugaaccacaaaucauuacuacagacaacacauuugugucugguaacugugauguuguaauaggaauugucaacaacacaguuuaugauccuuugcaaccugaauuagacucauucaaggaggaguuagauaaauauuuuaagaaucauacaucaccagauguugauuuaggugacaucucuggcauuaaugcuucaguuguaaacauucaaaaagaaauugaccgccucaaugagguugccaagaauuuaaaugaaucucucaucgaucuccaagaacuuggaaaguaugagcaguauauaaaauggccaugguacauuuggcuagguuuuauagcuggcuugauugccauaguaauggugacaauuaugcuuugcuguaugaccaguugcuguaguugucucaagggcuguuguucuuguggauccugcugcaaauuugaugaagacgacucugagccagugcucaaaggagucaaauuacauuacacauaaggacuagucccuguucccagagcccacuuuuuuuucuuuuuuugaaauaaaauagccugucuuucagaucucaaaggcucuuuucagagccaccaaaaaaaaaaaaaaaaaaaaaaaaaaaaaaaaaaaaaaaaaaaaaaaaaaaaaaaaaaaaaaaaaaaaaaaaaaaaaaaaaaaaaaaaaaaaaaaaaaaaa

SEQ ID NO: 12266 - RNA, 4091 nt, Artificial Sequence
  SARS-CoV-2/India/1-27/2020__EPI_ISL_413522 spike protein mRNA wt (1-1272)
aggagagucccgcagucggcguccagcggcucugcuuguucgugugugugucguugcaggccuuauucaagcuuaccauguuuguuuuucuuguuuuauugccacuagucucuagucaguguguuaaucuuacaaccagaacucaauuacccccugcauacacuaauucuuucacacgugguguuuauuacccugacaaaguuuucagauccucaguuuuacauucaacucaggacuuguucuuaccuuucuuuuccaauguuacuugguuccaugcuauacaugucucugggaccaaugguacuaagagguuugauaacccuguccuaccauuuaaugaugguguuuauuuugcuuccacugagaagucuaacauaauaagaggcuggauuuuugguacuacuuuagauucgaagacccagucccuacuuauuguuaauaacgcuacuaauguuguuauuaaagucugugaauuucaauuuuguaaugauccauuuuuggguguuuaccacaaaaacaacaaaaguuggauggaaagugaguucagaguuuauucuagugcgaauaauugcacuuuugaauaugucucucagccuuuucuuauggaccuugaaggaaaacaggguaauuucaaaaaucuuagggaauuuguguuuaagaauauugaugguuauuuuaaaauauauucuaagcacacgccuauuaauuuagugcgugaucucccucaggguuuuucggcuuuagaaccauugguagauuugccaauagguauuaacaucacuagguuucaaacuuuacuugcuuuacauagaaguuauuugacuccuggugauucuucuucagguuggacagcuggugcugcagcuuauuauguggguuaucuucaaccuaggacuuuucuauuaaaauauaaugaaaauggaaccauuacagaugcuguagacugugcacuugacccucucucagaaacaaaguguacguugaaauccuucacuguagaaaaaggaaucuaucaaacuucuaacuuuagaguccaaccaacagaaucuauuguuagauuuccuaauauuacaaacuugugcccuuuuggugaaguuuuuaacgccaccagauuugcaucuguuuaugcuuggaacaggaagagaaucagcaacuguguugcugauuauucuguccuauauaauuccgcaucauuuuccacuuuuaaguguuauggagugucuccuacuaaauuaaaugaucucugcuuuacuaaugucuaugcagauucauuuguaauuagaggugaugaagucauacaaaucgcuccagggcaaacuggaaagauugcugauuauaauuauaaauuaccagaugauuuuacaggcugcguuauagcuuggaauucuaacaaucuugauucuaagguuggugguaauuauaauuaccuguauagauuguuuaggaagucuaaucucaaaccuuuugagagagauauuucaacugaaaucuaucaggccgguagcacaccuuguaaugguguugaagguuuuaauuguuacuuuccuuuacaaucauaugguuuccaacccacuaaugguguugguuaccaaccauacagaguaguaguacuuucuuuugaacuucuacaugcaccagcaacuguuuguggaccuaaaaagucuacuaauuugguuaaaaacaaaugugucaauuucaacuucaaugguuuaacaggcacagguguucuuacugagucuaacaaaaaguuucugccuuuccaacaauuuggcagagacauugcugacacuacugaugcuguccgugauccacagacacuugagauucuugacauuacaccauguucuuuugguggugucaguguuauaacaccaggaacaaauacuucuaaccagguugcuguucuuuaucaggauguuaacugcacagaagucccuguugcuauucaugcagaucaacuuacuccuacuuggcguguuuauucuacagguucuaauguuuuucaaacacgugcaggcuguuuaauaggggcugaacaugucaacaacucauaugagugugacauacccauuggugcagguauaugcgcuaguuaucagacucagacuaauucuccucggcgggcacguaguguagcuagucaauccaucauugccuacacuaugucacuuggugcagaaaauucaguugcuuacucuaauaacucuauugccauacccacaaauuuuacuauuaguguuaccacagaaauucuaccagugucuaugaccaagacaucaguagauuguacaauguacauuuguggugauucaacugaaugcagcaaucuuuuguugcaauauggcaguuuuuguacacaauuaaaccgugcuuuaacuggaauagcuguugaacaagacaaaaacacccaagaaguuuuugcacaagucaaacaaauuuacaaaacaccaccaauuaaagauuuuggugguuuuaauuuuucacaaauauuaccagauccaucaaaaccaagcaagaggucauuuauugaagaucuacuuuucaacaaagugacacuugcagaugcuggcuucaucaaacaauauggugauugccuuggugauauugcugcuagagaccucauuugugcacaaaaguuuaacggccuuacuguuuugccaccuuugcucacagaugaaaugauugcucaauacacuucugcacuguuagcggguacaaucacuucugguuggaccuuuggugcaggugcugcauuacaaauaccauuugcuaugcaaauggcuuauagguuuaaugguauuggaguuacacagaauguucucuaugagaaccaaaaauugauugccaaccaauuuaauagugcuauuggcaaaauucaagacucacuuucuuccacagcaagugcacuuggaaaacuucaagauguggucaaccaaaaugcacaagcuuuaaacacgcuuguuaaacaacuuagcuccaauuuuggugcaauuucaaguguuuuaaaugauauccuuucacgucuugacaaaguugaggcugaagugcaaauugauagguugaucacaggcagacuucaaaguuugcagacauaugugacucaacaauuaauuagagcugcagaaaucagagcuucugcuaaucuugcugcuacuaaaaugucagaguguguacuuggacaaucaaaaagaguugauuuuuguggaaagggcuaucaucuuauguccuucccucagucagcaccucaugguguagucuucuugcaugugacuuaugucccugcacaagaaaagaacuucacaacugcuccugccauuugucaugauggaaaagcacacuuuccucgugaaggugucuuuguuucaaauggcacacacugguuuguaacacaaaggaauuuuuaugaaccacaaaucauuacuacagacaacacauuugugucugguaacugugauguuguaauaggaauugucaacaacacaguuuaugauccuuugcaaccugaauuagacucauucaaggaggaguuagauaaauauuuuaagaaucauacaucaccagauguugauuuaggugacaucucuggcauuaaugcuucaguuguaaacauucaaaaagaaauugaccgccucaaugagguugccaagaauuuaaaugaaucucucaucgaucuccaagaacuuggaaaguaugagcaguauauaaaauggccaugguacauuuggcuagguuuuauagcuggcuugauugccauaguaauggugacaauuaugcuuugcuguaugaccaguugcuguaguugucucaagggcuguuguucuuguggauccugcugcaaauuugaugaagacgacucugagccagugcucaaaggagucaaauuacauuacacauaaggacuagucccuguucccagagcccacuuuuuuuucuuuuuuugaaauaaaauagccugucuuucagaucucaaaggcucuuuucagagccaccaaaaaaaaaaaaaaaaaaaaaaaaaaaaaaaaaaaaaaaaaaaaaaaaaaaaaaaaaaaaaaaaaaaaaaaaaaaaaaaaaaaaaaaaaaaaaaaaaaaaa

SEQ ID NO: 12267 - RNA, 4076 nt, Artificial Sequence
  SARS-CoV-2/pangolin/Guangxi/P4L/2017__EPI_ISL_410538 spike protein mRNA wt (1-1267)
aggagagucccgcagucggcguccagcggcucugcuuguucgugugugugucguugcaggccuuauucaagcuuaccauguuuguuuuucuuuuugucuugccuuugguuuccagucaaugugucaauuugaccacaagaacuggaauaccgccagguuauaccaauucaucuacuagaggugucuauuauccagacaaaguuuuuaggucuucaauuuuacaucuuacacaagaccuuuucuuaccuuucuuuucuaauguuacuugguuuaacaccauaaauuaucaaggaggcuuuaagaaguuugacaauccuguuuuaccauuuaaugaugguguuuacuuugccuccacggaaaaguccaauauuauacgcgguuggauuuuuggaacaacacuugaugccagaacucaaucucuucuaauaguuaacaacgcaaccaauguuguuaucaaaguaugugaguuucaguuuugcacugauccauuuuuagguguuuacuaucauaacaacaauaaaacauggguugaaaaugaguuuagaguuuauucaagugccaacaauugcacuuucgaauacauuucucaaccuuuucuuauggaccuugaaggaaagcaagguaauuuuaagaaccuuagagaguuuguguuuaaaaauguugaugguuauuucaagauuuacucuaaacacacaccuauugauuuagugcgcgaccuccccagagguuuugcugcauuggaaccacugguggaccucccuauagguauuaauauuaccagauuccaaacauugcuugcuuuacauagaaguuaucuuacaccugguaaucuagaaaguggcuggacaacuggagcugcugcuuacuauguagguuaccuacaacagaggacuuuucucuuaaguuacaaucaaaauggaaccauuacagaugcuguugauuguucacuagacccucuuucagagacaaagugcacauuaaaaucccuaacaguugaaaaaggaauuuaccagacuucuaacuucagaguucaaccaacaaucaguauaguuagauuuccuaauauuacaaacuuauguccauuuggagaaguguuuaacgcauccaaauuugcaucaguuuaugcuuggaacaggaagagaauuagcaauuguguugcugauuacucuguacuuuauaacucuacaucauuuuccacuuuuaaauguuauggaguuucaccuacaaaacucaaugaccuuugcuucaccaauguguaugcagacucauuuguuguuaaaggugacgagguuagacaaauagcacccggacaaacugguguuauugcugauuauaacuauaagcugccagaugauuuuacugguuguguuauugcuuggaacucaguuaagcaagaugcuuugacuggugguaauuaugguuauuuguauagauuauuuagaaagucuaagcuuaaaccauuugagagagauauuuccacugaaauauaccaagccggcagcacacccuguaacggucaaguuggucuaaauuguuauuauccucuugaaagguaugguuuucacccaacuacagguguuaacuaccaaccuuuuagagugguuguuuuaucauuugaguuacuuaauggaccagcuacuguuuguggacccaaauugucuacaacacuaguuaaagacaaaugugucaauuucaacuuuaacgguuuaacuggcacagguguucuuacaacaucuaagaaacaguuucugccuuuucaacaauuugguagagacaucucugacacuacugaugcuguccgugacccacagacacuugaaauacuugacauuaccccuugcucuuuuggaggaguuagugugauaacaccagguacaaacacuucuaaucaaguggcuguacuuuaccaagauguuaacuguacugaagugccuauggccauucaugcagaacaacuuacaccugccuggcguguuuacucugcaggagcaaauguguuucaaacaagagcaggcuguuuaguaggugcugagcaugucaacaauucuuaugaaugugacauuccagucggugcuggcauaugugcaaguuaccauuccaugucaucauugcguagugucaaccagcguucaaucauugcuuacacuaugucuuuaggugcagaaaauucaguugcuuauucuaauaauucaauugccauaccuacuaauuuuacaauaaguguuaccacagaaauucuaccagugucaaugacuaagacuucuguagauuguacuauguacaucuguggagauucaauugaguguaguaauuuauugcuacaauauggcaguuuuugcacacaauuaaaccgugcuuugacugggauugcuguugaacaagacaaaaacacacaagaaguuuuugcccagguuaaacaaaucuacaaaacaccaccuauuaaagauuuugguggcuuuaacuuuucacaaauauugccagauccaucaaaaccaagcaagaggucauuuauugaggauuuacucuucaacaaagugacacuugcugaugcuggcuucaucaaacaauauggugauugccuuggugauauugcugcuagagaucucaucugugcacaaaaguucaauggacucacgguucuaccgccuuugcucacagaugaaaugauugcucaauacacuucugcacuacuugcuggaacaaucaccucagguuggaccuuuggugcaggagcugcuuuacaaauacccuuugcaaugcaaauggcuuacagguuuaauggcauuggagucacucagaauguucuauaugagaaucagaaauuaauugccaaucaguucaacagugcuauuggcaaaauacaggauucacuuucaucuacggcuagugcacuugguaaacuucaagacgucguaaaucaaaaugcacaggcuuuaaacacacuugucaaacaacuuaguuccaauuuuggagcuauuucgagugugcuuaaugauauucuuucacgucuugacaaaguugaggcugaagugcaaauugauagguuaaucacaggaagacuacagagucuucaaacuuaugugacacaacaauuaaucagagcagcagaaaucagagcuucugcuaaucuugcugcaacaaaaaugucugagugcguacucggacaaucuaaaagaguugauuuuuguggaaaaggcuaccauuuaaugucuuucccucaaucagcaccgcaugguguuguuuucuugcauguuacuuauguaccugcacaagaaaagaacuuuacuacugcuccugcuauuugucaugaaggaaaagcacacuucccucgugaaggugucuucguuucaaauggcacucauugguuuauuacacaaaggaauuuuuaugaaccucaaauuauuaccacugacaacacauucgucucugguagcugugauguuguaauuggaauagucaacaacacaguuuaugauccuuugcaacccgagcuugacucauuuaaggaggaguuagacaaauacuucaaaaaucacacaucaccagauguugaucuuggcgacauaucuggcauaaaugcuucggucgucaacauacaaaaagaaauugaccgccucaaugagguugccaaaaauuugaaugaaucacccauugaccuacaagagcuuggaaaauaugagcaauacaucaaauggccuugguacauuuggcuugguuuuauagcugggcuaauugcuaucauuauggucacaaucaugcuauguuguaugacuaguugcuguaguugccucaaggguuguugcucuugcgguuccugcugcaaauuugaugaagacgauucagaaccuguucugaaaggagucaaauuacauuacacauaaggacuagucccuguucccagagcccacuuuuuuuucuuuuuuugaaauaaaauagccugucuuucagaucucaaaggcucuuuucagagccaccaaaaaaaaaaaaaaaaaaaaaaaaaaaaaaaaaaaaaaaaaaaaaaaaaaaaaaaaaaaaaaaaaaaaaaaaaaaaaaaaaaaaaaaaaaaaaaaaaaaaa

SEQ ID NO: 12268 - RNA, 4076 nt, Artificial Sequence
  SARS-CoV-2/pangolin/Guangxi/P5L/2017__EPI_ISL_410540 spike protein mRNA wt (1-1267)
aggagagucccgcagucggcguccagcggcucugcuuguucgugugugugucguugcaggccuuauucaagcuuaccauguuuguuuuucuuuuugucuugccuuugguuuccagucaaugugucaauuugaccacaagaacuggaauaccgccagguuauaccaauucaucuacuagaggugucuauuauccagacaaaguuuuuaggucuucaauuuuacaucuuacacaagaccuuuucuuaccuuucuuuucuaauguuacuugguuuaacaccauaaauuaucaaggaggcuuuaagaaguuugacaauccuguuuuaccauuuaaugaugguguuuacuuugccuccacggaaaaguccaauauuauacgcgguuggauuuuuggaacaacacuugaugccagaacucaaucucuucuaauaguuaacaacgcaaccaauguuguuaucaaaguaugugaguuucaguuuugcacugauccauuuuuagguguuuacuaucauaacaacaauaaaacauggguugaaaaugaguuuagaguuuauucaagugccaacaauugcacuuucgaauacauuucucaaccuuuucuuauggaccuugaaggaaagcaagguaauuuuaagaaccuuagagaguuuguguuuaaaaauguugaugguuauuucaagauuuacucuaaacacacaccuauugauuuagugcgcgaccuccccagagguuuugcugcauuggaaccacugguggaccucccuauagguauuaauauuaccagauuccaaacauugcuugcuuuacauagaaguuaucuuacaccugguaagcuagaaaguggcuggacaacuggagcugcugcuuacuauguagguuaccuacaacagaggacuuuucucuuaaguuacaaucaaaauggaaccauuacagaugcuguugauuguucacuagacccucuuucagagacaaagugcacauuaaaaucccuaacaguugaaaaaggaauuuaccagacuucuaacuucagaguucaaccaacaaucaguauaguuagauuuccuaauauuacaaacuuauguccauuuggagaaguguuuaacgcauccaaauuugcaucaguuuaugcuuggaacaggaagagaauuagcaauuguguugcugauuacucuguacuuuauaacucuacaucauuuuccacuuuuaaauguuauggaguuucaccuacaaaacucaaugaccuuugcuucaccaauguguaugcagacucauuuguuguuaaaggugacgagguuagacaaauagcacccggacaaacugguguuauugcugauuauaacuauaagcugccagaugauuuuacugguuguguuauugcuuggaacucaguuaagcaagaugcuuugacuggugguaauuaugguuauuuguauagauuauuuagaaagucuaagcuuaaaccauuugagagagauauuuccacugaaauauaccaagccggcagcacacccuguaacggucaaguuggucuaaauuguuauuauccucuugaaagguaugguuuucacccaacuacagguguuaacuaccaaccuuuuagagugguuguuuuaucauuugaguuacuuaauggaccagcuacuguuuguggacccaaauugucuacaacacuaguuaaagacaaaugugucaauuucaacuuuaacgguuuaacuggcacagguguucuuacaacaucuaagaaacaguuucugccuuuucaacaauuugguagagacaucucugacacuacugaugcuguccgugacccacagacacuugaaauacuugacauuaccccuugcucuuuuggaggaguuagugugauaacaccagguacaaacacuucuaaucaaguggcuguacuuuaccaagauguuaacuguacugaagugccuauggccauucaugcagaacaacuuacaccugccuggcguguuuacucugcaggagcaaauguguuucaaacaagagcaggcuguuuaguaggugcugagcaugucaacaauucuuaugaaugugacauuccagucggugcuggcauaugugcaaguuaccauuccaugucaucauuucguagugucaaccagcguucaaucauugcuuacacuaugucuuuaggugcagaaaauucaguugcuuauucuaauaauucaauugccauaccuacuaauuuuacaauaaguguuaccacagaaauucuaccagugucaaugacuaagacuucuguagauuguacuauguacaucuguggagauucaauugaguguaguaauuuauugcuacaauauggcaguuuuugcacacaauuaaaccgugcuuugacugggauugcuguugaacaagacaaaaacacacaagaaguuuuugcccagguuaaacaaaucuacaaaacaccaccuauuaaagauuuugguggcuuuaacuuuucacaaauauugccagauccaucaaaaccaagcaagaggucauuuauugaggauuuacucuucaacaaagugacacuugcugaugcuggcuucaucaaacaauauggugauugccuuggugauauugcugcuagagaucucaucugugcacaaaaguucaauggacucacgguucuaccgccuuugcucacagaugaaaugauugcucaauacacuucugcacuacuugcuggaacaaucaccucagguuggaccuuuggugcaggagcugcuuuacaaauacccuuugcaaugcaaauggcuuacagguuuaauggcauuggagucacucagaauguucuauaugagaaucagaaauuaauugccaaucaguucaacagugcuauuggcaaaauacaggauucacuuucaucuacggcuagugcacuugguaaacuucaagacgucguaaaucaaaaugcacaggcuuuaaacacacuugucaaacaacuuaguuccaauuuuggagcuauuucgagugugcuuaaugauauucuuucacgucuugacaaaguugaggcugaagugcaaauugauagguuaaucacaggaagacuacagagucuucaaacuuaugugacacaacaauuaaucagagcagcagaaaucagagcuucugcuaaucuugcugcaacaaaaaugucugagugcguacucggacaaucuaaaagaguugauuuuuguggaaaaggcuaccauuuaaugucuuucccucaaucagcaccgcaugguguuguuuucuugcauguuacuuauguaccugcacaagaaaagaacuuuacuacugcuccugcuauuugucaugaaggaaaagcacacuucccucgugaaggugucuucguuucaaauggcacucauugguuuauuacacaaaggaauuuuuaugaaccucaaauuauuaccacugacaacacauucgucucugguagcugugauguuguaauuggaauagucaacaacacaguuuaugauccuuugcaacccgagcuugacucauuuaaggaggaguuagacaaauacuucaaaaaucacacaucaccagauguugaucuuggcgacauaucuggcauaaaugcuucggucgucaacauacaaaaagaaauugaccgccucaaugagguugccaaaaauuugaaugaaucacucauugaccuacaagagcuuggaaaauaugagcaauacaucaaauggccuugguacauuuggcuugguuuuauagcugggcuaauugcuaucauuauggucacaaucaugcuauguuguaugacuaguugcuguaguugccucaaggguuguugcucuugcgguuccugcugcaaauuugaugaagacgauucagaaccuguucugaaaggagucaaauuacauuacacauaaggacuagucccuguucccagagcccacuuuuuuuucuuuuuuugaaauaaaauagccugucuuucagaucucaaaggcucuuuucagagccaccaaaaaaaaaaaaaaaaaaaaaaaaaaaaaaaaaaaaaaaaaaaaaaaaaaaaaaaaaaaaaaaaaaaaaaaaaaaaaaaaaaaaaaaaaaaaaaaaaaaaa

SEQ ID NO: 12269 - RNA, 4076 nt, Artificial Sequence
  SARS-CoV-2/pangolin/Guangxi/P5E/2017__EPI_ISL_410541 spike protein mRNA wt (1-1267)
aggagagucccgcagucggcguccagcggcucugcuuguucgugugugugucguugcaggccuuauucaagcuuaccauguuuguuuuucuuuuugucuugccuuugguuuccagucaaugugucaauuugaccacaagaacuggaauaccgccagguuauaccaauucaucuacuagaggugucuauuauccagacaaaguuuuuaggucuucaauuuuacaucuuacacaagaccuuuucuuaccuuucuuuucuaauguuacuugguuuaacaccauaacuuaucaaggaggcucuaagaaguuugacaauccuguuuuaccauuuaaugaugguguuuacuuugccuccacggaaaaguccaauauuauacgcgguuggauuuuuggaacaacacuugaugccagaacucaaucucuucuaauaguuaacaacgcaaccaauguuguuaucaaaguaugugaguuucaguuuugcacugauccauuuuuagguguuuacuaucauaacaacaauaaaacauggguugaaaaugaguuuagaguuuauucaagugccaacaauugcacuuucgaauacauuucucaaccuuuucuuauggaccuugaaggaaagcaagguaauuuuaagaaccuuagagaguuuguguuuaaaaauguugaugguuauuucaagauuuacucuaaacacacaccuauugauuuagugcgcgaccuccccagagguuuugcugcauuggaaccacugguggaccucccuauagguauuaauauuaccagauuccaaacauugcuugcuuuacauagaaguuaucuuacaccugguaagcuagaaaguggcuggacaacuggagcugcugcuuacuauguagguuaccuacaacagaggacuuuucucuuaaguuacaaucaaaauggaaccauuacagaugcuguugauuguucacuagacccucuuucagagacaaagugcacauuaaaaucccuaacaguugaaaaaggaauuuaccagacuucuaacuucagaguucaaccaacaaucaguauaguuagauuuccuaauauuacaaacuuauguccauuuggagaaguguuuaacgcauccaaauuugcaucaguuuaugcuuggaacaggaagagaauuagcaauuguguugcugauuacucuguacuuuauaacucuacaucauuuuccacuuuuaaauguuauggaguuucaccuacaaaacucaaugaccuuugcuucaccaauguguaugcagacucauuuguuguuaaaggugacgagguuagacaaauagcacccggacaaacugguguuauugcugauuauaacuauaagcugccagaugauuuuacugguuguguuauugcuuggaacucaguuaagcaagaugcuuugacuggugauaauuaugguuauuuguauagauuauuuagaaagucuaagcuuaaaccauuugagagagauauuuccacugaaauauaccaagccggcagcacacccuguaacggucaaguuggucuaaauuguuauuauccucuugaaagguaugguuuucacccaacuacagguguuaacuaccaaccuuuuagagugguuguuuuaucauuugaguuacuuaauggaccagcuacuguuuguggacccaaauugucuacaacacuaguuaaagacaaaugugucaauuucaacuuuaacgguuuaacuggcacagguguucuuacaacaucuaagaaacaguuucugccuuuucaacaauuugguagagacaucucugacacuacugaugcuguccgugacccacagacacuugaaauacuugacauuaccccuugcucuuuuggaggaguuagugugauaacaccagguacaaacacuucuaaucaaguggcuguacuuuaccaagauguuaacuguacugaagugccuauggccauucaugcagaacaacuuacaccugccuggcguguuuacucugcaggagcaaauguguuucaaacaagagcaggcuguuuaguaggugcugagcaugucaacaauucuuaugaaugugacauuccagucggugcuggcauaugugcaaguuaccauuccaugucaucauuucguagugucaaccagcguucaaucauugcuuacacuaugucuuuaggugcagaaaauucaguugcuuauucuaauaauucaauugccauaccuacuaauuuuacaauaaguguuaccacagaaauucuaccagugucaaugacuaagacuucuguagauuguacuauguacaucuguggagauucaauugaguguaguaauuuauugcuacaauauggcaguuuuugcacacaauuaaaccgugcuuugacugggauugcuguugaacaagacaaaaacacacaagaaguuuuugcccagguuaaacaaaucuacaaaacaccaccuauuaaagauuuugguggcuuuaacuuuucacaaauauugccagauccaucaaaaccaagcaagaggucauuuauugaggauuuacucuucaacaaagugacacuugcugaugcuggcuucaucaaacaauauggugauugccuuggugauauugcugcuagagaucucaucugugcacaaaaguucaauggacucacgguucuaccgccuuugcucacagaugaaaugauugcucaauacacuucugcacuacuugcuggaacaaucaccucagguuggaccuuuggugcaggagcugcuuuacaaauacccuuugcaaugcaaauggcuuacagguuuaauggcauuggagucacucagaauguucuauaugagaaucagaaauuaauugccaaucaguucaacagugcuauuggcaaaauacaggauucacuuucaucuacggcuagugcacuugguaaacuucaagacgucguaaaucaaaaugcacaggcuuuaaacacacuugucaaacaacuuaguuccaauuuuggagcuauuucgagugugcuuaaugauauucuuucacgucuugacaaaguugaggcugaagugcaaauugauagguuaaucacaggaagacuacagagucuucaaacuuaugugacacaacaauuaaucagagcagcagaaaucagagcuucugcuaaucuugcugcaacaaaaaugucugagugcguacucggacaaucuaaaagaguugauuuuuguggaaaaggcuaccauuuaaugucuuucccucaaucagcaccgcaugguguuguuuucuugcauguuacuuauguaccugcacaagaaaagaacuuuacuacugcuccugcuauuugucaugaaggaaaagcacacuucccucgugaaggugucuucguuucaaauggcacucauugguuuauuacacaaaggaauuuuuaugaaccucaaauuauuaccacugacaacacauucgucucugguagcugugauguuguaauuggaauagucaacaacacaguuuaugauccuuugcaacccgagcuugacucauuuaaggaggaguuagacaaauacuucaaaaaucacacaucaccagauguugaucuuggcgacauaucuggcauaaaugcuucggucgucaacauacaaaaagaaauugaccgccucaaugagguugccaaaaauuugaaugaaucacucauugaccuacaagagcuuggaaaauaugagcaauacaucaaauggccuugguacauuuggcuugguuuuauagcugggcuaauugcuaucauuauggucacaaucaugcuauguuguaugacuaguugcuguaguugccucaaggguuguugcucuugcgguuccugcugcaaauuugaugaagacgauucagaaccuguucugaaaggagucaaauuacauuacacauaaggacuagucccuguucccagagcccacuuuuuuuucuuuuuuugaaauaaaauagccugucuuucagaucucaaaggcucuuuucagagccaccaaaaaaaaaaaaaaaaaaaaaaaaaaaaaaaaaaaaaaaaaaaaaaaaaaaaaaaaaaaaaaaaaaaaaaaaaaaaaaaaaaaaaaaaaaaaaaaaaaaaa

SEQ ID NO: 12270 - RNA, 4070 nt, Artificial Sequence
  SARS-CoV-2/pangolin/Guangxi/P1E/2017__EPI_ISL_410539 spike protein mRNA wt (1-1265)
aggagagucccgcagucggcguccagcggcucugcuuguucgugugugugucguugcaggccuuauucaagcuuaccauguuuguuuuucuuuuugucuugccuuugguuuccagucaaugugucaauuugaccacaagaacuggaauacagccagguuauaccaauucaucuacuagaggugucuauuauccagacaaaguuuuuaggucuucaauuuuacaucuuacacaagaccuuuucuuaccuuucuuuucuaauguuacuugguuuaacaccauaaauuaucaaggaggcuuuaagaaguuugacaauccuguuuuaccauuuaaugaugguguuuacuuugccuccacggaaaaguccaauauuauacgcgguuggauuuuuggaacaacacuugaugccagaacucaaucucuucuaauaguuaacaacgcaaccaauguuguuaucaaaguaugugaguuucaguuuugcacugauccauuuuuagguguuuacuaucauaacaacaauaaaacauggguugaaaaugaguuuagaguuuauucaagugccaacaauugcacuuucgaauacauuucucaaccuuuucuuauggaccuugaaggaaagcaagguaauuuuaagaaccuuagagaguuuguguuuaaaaauguugaugguuauuucaagauuuacucuaaacacacaccuauugauuuagugcgcgaccuccccagagguuuugcugcauuggaaccacugguggaccucccuauagguauuaauauuaccagauuccaaacauugcuugcuuuacauagaaguuaucuuacaccugguaagcuagaaaguggcuggacaacuggagcugcugcuuacuauguagguuaccuacaacagaggacuuuucucuuaaguuacaaucaaaauggaaccauuacagaugcuguugauuguucacuagacccucuuucagagacaaagugcacauuaaaaucccuaacaguugaaaaaggaauuuaccagacuucuaacuucagaguucaaccaacaaucaguauaguuagauuuccuaauauuacaaacuuauguccauuuggagaaguguuuaacgcauccaaauuugcaucaguuuaugcuuggaacaggaagagaauuagcaauuguguugcugauuacucuguacuuuauaacucuacaucauuuuccacuuuuaaauguuauggaguuucaccuacaaaacucaaugaccuuugcuucaccaauguguaugcagacucauuuguuguuaaaggugacgagguuagacaaauagcacccggacaaacugguguuauugcugauuauaacuauaagcugccagaugauuuuacugguuguguuauugcuuggaacucaguuaagcaagaugcuuugacuggugguaauuauuuguauagauuauuuagaaagucuaagcuuaaaccauuugagagagauauuuccacugaaauauaccaagccggcagcacacccuguaacggucaaguuggucuaaauuguuauuauccucuugaaagguaugguuuucacccaacuacagguguuaacuaccaaccuuuuagagugguuguuuuaucauuugaguuacuuaauggaccagcuacuguuuguggacccaaauugucuacaacacuaguuaaagacaaaugugucaauuucaacuuuaacgguuuaacuggcacagguguucuuacaacaucuaagaaacaguuucugccuuuucaacaauuugguagagacaucucugacacuacugaugcuguccgugacccacagacacuugaaauacuugacauuaccccuugcucuuuuggaggaguuagugugauaacaccagguacaaacacuucuaaucaaguggcuguacuuuaccaagauguuaacuguacugaagugccuauggccauucaugcagaacaacuuacaccugccuggcguguuuacucugcaggagcaaauguguuucaaacaagagcaggcuguuuaguaggugcugagcaugucaacaauucuuaugaaugugacauuccagucggugcuggcauaugugcaaguuaccauuccaugucaucauugcguagugucaaccagcguucaaucauugcuuacacuaugucuuuaggugcagaaaauucaguugcuuauucuaauaauucaauugccauaccuacuaauuuuacaauaaguguuaccacagaaauucuaccagugucaaugacuaagacuucuguagauuguacuauguacaucuguggagauucaauugaguguaguaauuuauugcuacaauauggcaguuuuugcacacaauuaaaccgugcuuugacugggauugcuguugaacaagacaaaaacacacaagaaguuuuugcccagguuaaacaaaucuacaaaacaccaccuauuaaagauuuugguggcuuuaacuuuucacaaauauugccagauccaucaaaaccaagcaagaggucauuuauugaggauuuacucuucaacaaagugacacuugcugaugcuggcuucaucaaacaauauggugauugccuuggugauauugcugcuagagaucucaucugugcacaaaaguucaauggacucacgguucuaccgccuuugcucacagaugaaaugauugcucaauacacuucugcacuacuugcuggaacaaucaccucagguuggaccuuuggugcaggagcugcuuuacaaauacccuuugcaaugcaaauggcuuacagguuuaauggcauuggagucacucagaauguucuauaugagaaucagaaauuaauugccaaucaguucaacagugcuauuggcaaaauacaggauucacuuucaucuacggcuagugcacuugguaaacuucaagacgucguaaaucaaaaugcacaggcuuuaaacacacuugucaaacaacuuaguuccaauuuuggagcuauuucgagugugcuuaaugauauucuuucacgucuugacaaaguugaggcugaagugcaaauugauagguuaaucacaggaagacuacagagucuucaaacuuaugugacacaacaauuaaucagagcagcagaaaucagagcuucugcuaaucuugcugcaacaaaaaugucugagugcguacucggacaaucuaaaagaguugauuuuuguggaaaaggcuaccauuuaaugucuuucccucaaucagcaccgcaugguguuguuuucuugcauguuacuuauguaccugcacaagaaaagaacuuuacuacugcuccugcuauuugucaugaaggaaaagcacacuucccucgugaaggugucuucguuucaaauggcacucauugguuuauuacacaaaggaauuuuuaugaaccucaaauuauuaccacugacaacacauucgucucugguagcugugauguuguaauuggaauagucaacaacacaguuuaugauccuuugcaacccgagcuugacucauuuaaggaggaguuagacaaauacuucaaaaaucacacaucaccagauguugaucuuggcgacauaucuggcauaaaugcuucggucgucaacauacaaaaagaaauugaccgccucaaugagguugccaaaaauuugaaugaaucacucauugaccuacaagagcuuggaaaauaugagcaauacaucaaauggccuugguacauuuggcuugguuuuauagcugggcuaauugcuaucauuauggucacaaucaugcuauguuguaugacuaguugcuguaguugccucaaggguuguugcucuugcgguuccugcugcaaauuugaugaagacgauucagaaccuguucugaaaggagucaaauuacauuacacauaaggacuagucccuguucccagagcccacuuuuuuuucuuuuuuugaaauaaaauagccugucuuucagaucucaaaggcucuuuucagagccaccaaaaaaaaaaaaaaaaaaaaaaaaaaaaaaaaaaaaaaaaaaaaaaaaaaaaaaaaaaaaaaaaaaaaaaaaaaaaaaaaaaaaaaaaaaaaaaaaaaaaa

SEQ ID NO: 12271 - RNA, 4094 nt, Artificial Sequence; identical to SEQ ID NO: 148
  SARS-CoV-2/Wuhan/WIV05/2019__EPI_ISL_402128 spike protein mRNA gc (1-1273) R9488, R9492, R10161

SEQ ID NO: 12272 - RNA, 4082 nt, Artificial Sequence
  SARS-CoV-2/bat/Yunnan/RaTG13/2013__EPI_ISL_402131 spike protein mRNA gc (1-1269)
aggagagucccgcagucggcguccagcggcucugcuuguucgugugugugucguugcaggccuuauucaagcuuaccauguucguguuccugguccuccugccccuggugagcucccagugcgugaaccucaccacccgcacgcagcugccgcccgccuacaccaacagcuccacccggggcgucuacuaccccgacaagguguuccgcagcuccgugcugcaccucacccaggaccuguuccugcccuucuucagcaacgucacgugguuccacgccauccacguguccgggaccaacggcaucaagcgguucgacaacccggugcuccccuucaacgacggggucuacuucgcgagcaccgagaaguccaacaucauccgcggcuggaucuucgggaccacgcuggacagcaagacccagucccugcucaucgugaacaacgccaccaacguggucaucaaggugugcgaguuccaguucugcaacgaccccuuccugggcguguacuaccacaagaacaacaagagcuggauggaguccgaguuccgggucuacagcuccgccaacaacugcaccuucgaguacgugagccagcccuuccugauggaccucgagggcaagcaggggaacuucaagaaccugcgcgaguucguguucaagaacaucgacggcuacuucaagaucuacuccaagcacacgccgaucaaccugguccgggaccucccgcccggguucagcgcccuggagccccugguggaccuccccaucggcaucaacaucacccgcuuccagacccugcuggcccuccaccgguccuaccugacccccggggacagcagcuccggcuggacggcgggcgccgccgccuacuacgugggguaccugcagccccgcaccuuccuccugaaguacaacgagaacggcaccaucaccgacgcggucgacugcgcccuggacccccucagcgagacgaagugcacccugaaguccuucaccguggagaaggggaucuaccagaccagcaacuuccgggugcagccgacggacuccaucguccgcuuccccaacaucaccaaccugugccccuucggcgagguguucaacgccaccaccuucgccagcgucuacgccuggaaccggaagcgcaucuccaacugcguggcggacuacagcgugcucuacaacuccacgagcuucuccaccuucaagugcuacggcgucagccccaccaagcugaacgaccugugcuucaccaacguguacgccgacuccuucgugaucacgggggacgagguccggcagaucgccccgggccagaccgggaagaucgccgacuacaacuacaagcuccccgacgacuucaccggcugcgugaucgccuggaacagcaagcacaucgacgcgaaggagggcgggaacuucaacuaccuguaccgccuguuccggaaggccaaccucaagcccuucgagcgcgacaucuccaccgagaucuaccaggccggcagcaagcccugcaacgggcagacgggccugaacugcuacuacccgcuguaccgguacggguucuaccccaccgacggcguggggcaccagcccuaccgcgucguggugcucuccuucgagcugcugaacgcccccgccaccgucugcggcccgaagaaguccaccaaccucgugaagaacaagugcgugaacuucaacuucaacggccugaccgggacgggcguccugaccgagagcaacaagaaguuccugcccuuccagcaguucgggcgggacaucgcggacaccaccgacgccgugcgcgacccccagacgcucgagauccuggacaucaccccgugcagcuucggcggggugagcgucaucacccccggcaccaacgccuccaaccagguggccgugcuguaccaggacgucaacugcacggaggugcccguggccauccacgcggaccagcucacccccaccuggcgcgucuacagcaccggcuccaacguguuccagacgcgggccgggugccugaucggcgccgagcacgugaacaacagcuacgagugcgacaucccgaucggggccggcaucugcgcguccuaccagacccagaccaacagccgcuccgucgccagccaguccaucaucgccuacaccaugagccugggcgccgagaacuccguggccuacagcaacaacuccaucgcgauccccacgaacuucaccaucagcgugaccaccgagauccuccccgucuccaugacgaagaccagcguggacugcaccauguacaucugcggggacuccaccgagugcagcaaccugcugcuccaguacggcagcuucugcacgcagcugaaccgggcccugaccgggaucgccguggagcaggacaagaacacccaggaggucuucgcccaggugaagcagaucuacaagacgcccccgaucaaggacuucggcggguucaacuucucccagauccuccccgaccccagcaagcccuccaagcgcagcuucaucgaggaccugcuguucaacaaggugacccucgccgacgcgggcuucaucaagcaguacggcgacugccugggggacaucgccgcccgggaccugaucugcgcccagaaguucaacggccucaccguccugccgccccugcucaccgacgagaugaucgcccaguacaccuccgcgcugcuggccgggacgaucaccagcggcuggaccuucggggccggcgccgcgcuccagauccccuucgccaugcagauggccuaccgcuucaacggcaucggggugacccagaacgugcuguacgagaaccagaagcugaucgccaaccaguucaacuccgccaucggcaagauccaggacagccucuccagcacggcguccgcccuggggaagcugcaggacgucgugaaccagaacgcccaggcccucaacacccuggugaagcagcugagcuccaacuucggcgccaucagcuccguccucaacgacauccugagccggcuggacaagguggaggcggaggugcagaucgaccgccucaucaccgggcggcugcagucccugcagaccuacgucacccagcagcucauccgcgccgccgagauccgggccagcgccaaccuggcggccacgaagauguccgagugcgugcugggccagagcaagcgcguggacuucugcggcaagggguaccaccucaugagcuucccccaguccgccccgcacggcgucguguuccugcacgugaccuacguccccgcccaggagaagaacuucaccaccgcgcccgccaucugccacgacgggaaggcccacuucccccgggagggcguguucgucagcaacgggacgcacugguucgugacccagcgcaacuucuacgagccgcagaucaucaccaccgacaacacguucguguccggcagcugcgacgucgugaucggcaucgugaacaacaccgucuacgacccccugcagcccgagcucgacuccuucaaggaggagcuggacaaguacuucaagaaccacaccagccccgacguggaccugggggacaucuccggcaucaacgccagcguggucaacauccagaaggagaucgaccggcucaacgagguggccaagaaccugaacgagucccugaucgaccuccaggagcuggggaaguacgagcaguacaucaaguggccgugguacaucuggcugggcuucaucgcgggccucaucgccaucaucauggugaccaucaugcugugcugcaugacgagcugcugcuccugccugaaggggugcugcagcugcggcuccugcugcaaguucgacgaggacgacagcgagcccguccucaagggggugaagcugcacuacaccugaggacuagucccuguucccagagcccacuuuuuuuucuuuuuuugaaauaaaauagccugucuuucagaucucaaaggcucuuuucagagccaccaaaaaaaaaaaaaaaaaaaaaaaaaaaaaaaaaaaaaaaaaaaaaaaaaaaaaaaaaaaaaaaaaaaaaaaaaaaaaaaaaaaaaaaaaaaaaaaaaaaaa

SEQ ID NO: 12273 - RNA, 4094 nt, Artificial Sequence
  SARS-CoV-2/Wuhan/HBCDC-HB-01/2019__EPI_ISL_402132 spike protein mRNA gc (1-1273)
aggagagucccgcagucggcguccagcggcucugcuuguucgugugugugucguugcaggccuuauucaagcuuaccauguucguguuccugguccuccugccccuggugagcucccagugcgugaaccucaccacccgcacgcagcugccgcccgccuacaccaacagcaucacccggggcgucuacuaccccgacaagguguuccgcuccagcgugcugcacuccacccaggaccucuuccugcccuucuucagcaacgucacgugguuccacgccauccacguguccgggaccaacggcaccaagcgguucgacaacccggugcugcccuucaacgacggggucuacuucgcgagcaccgagaaguccaacaucauccgcggcuggaucuucgggacgacccucgacagcaagacccagucccugcugaucgugaacaacgccaccaacguggucaucaaggugugcgaguuccaguucugcaacgaccccuuccucggcguguacuaccacaagaacaacaagagcuggauggaguccgaguuccgggucuacagcuccgccaacaacugcacguucgaguacgugagccagcccuuccugauggaccuggagggcaagcaggggaacuucaagaaccuccgcgaguucguguucaagaacaucgacggcuacuucaagaucuacuccaagcacaccccgaucaaccugguccgggaccugccccagggguucagcgcccucgagccccugguggaccugcccaucggcaucaacaucacccgcuuccagacccuccuggcccugcaccgguccuaccucacgccgggggacagcagcuccggcuggaccgcgggcgccgccgccuacuacgugggguaccugcagccccgcaccuuccugcucaaguacaacgagaacggcaccaucacggacgcggucgacugcgcccuggacccccugagcgagaccaagugcacccucaaguccuucaccguggagaaggggaucuaccagacgagcaacuuccgggugcagcccaccgaguccaucguccgcuucccgaacaucaccaaccugugccccuucggcgagguguucaacgccacccgguucgccagcgucuacgccuggaaccgcaagcggaucuccaacugcguggcggacuacagcgugcuguacaacuccgccagcuucuccacguucaagugcuacggcgucagccccaccaagcucaacgaccugugcuucaccaacguguacgccgacuccuucgugauccgcggggacgagguccggcagaucgcccccggccagaccgggaagaucgccgacuacaacuacaagcugccggacgacuucacgggcugcgugaucgcguggaacagcaacaaccucgacuccaaggucgggggcaacuacaacuaccuguaccgccuguuccgcaagagcaaccucaagcccuucgagcgggacaucuccaccgagaucuaccaggccggcagcacccccugcaacgggguggagggcuucaacugcuacuucccccugcaguccuacggguuccagccgaccaacggcgugggguaccagcccuaccggguggucgugcugagcuucgagcuccugcacgcccccgccacggugugcggccccaagaaguccaccaaccuggucaagaacaagugcgugaacuucaacuucaacggccucaccgggaccggcgugcugaccgagagcaacaagaaguuccugccguuccagcaguucgggcgcgacaucgccgacacgaccgacgcgguccgcgacccccagacccuggagauccucgacaucacccccugcagcuucggcgggguguccgugaucacgccgggcaccaacaccagcaaccaggucgccgugcuguaccaggacgugaacugcaccgagguccccguggccauccacgccgaccagcugacgcccaccuggcggguguacuccaccggcagcaacgucuuccagacccgcgccgggugccucaucggcgcggagcacgugaacaacuccuacgagugcgacauccccaucggggccggcaucugcgccagcuaccagacgcagaccaacuccccgcggcgcgcccggagcguggcgucccagagcaucaucgccuacaccaugucccugggcgccgagaacagcgucgccuacuccaacaacagcaucgccauccccaccaacuucacgaucuccgugaccaccgagauccugcccgugagcaugaccaagacgagcgucgacugcaccauguacaucugcggggacuccaccgagugcagcaaccuccugcugcaguacggcuccuucugcacccagcucaaccgcgcgcugacggggaucgccguggagcaggacaagaacacccaggagguguucgcccaggucaagcagaucuacaagacgcccccgaucaaggacuucggcggguucaacuucagccagauccugcccgaccccuccaagcccagcaagcgguccuucaucgaggaccuccuguucaacaaggugacccuggccgacgccggcuucaucaagcaguacggcgacugccucggggacaucgcggcccgcgaccugaucugcgcccagaaguucaacggccugaccgugcucccgccccugcugaccgacgagaugaucgcccaguacaccagcgcccuccuggcggggaccaucacguccggcuggaccuucggggccggcgccgcccugcagauccccuucgcgaugcagauggccuaccgguucaacggcaucggggucacccagaacgugcucuacgagaaccagaagcugaucgccaaccaguucaacagcgccaucggcaagauccaggacucccugagcuccaccgccagcgcgcucgggaagcugcaggacguggucaaccagaacgcccaggcccugaacacgcucgugaagcagcuguccagcaacuucggcgccaucuccagcgugcugaacgacauccucucccgccuggacaaggucgaggccgaggugcagaucgaccggcugaucaccgggcgccuccagagccugcagaccuacgugacccagcagcugauccgggcggccgagauccgcgccagcgccaaccucgccgcgaccaagauguccgagugcguccugggccagagcaagcggguggacuucugcggcaagggguaccaccugauguccuucccccagagcgccccgcacggcguggucuuccuccacgugacguacguccccgcccaggagaagaacuucaccaccgcccccgcgaucugccacgacgggaaggcccacuucccccgcgagggcguguucguguccaacgggacccacugguucgucacgcagcggaacuucuacgagccgcagaucaucaccaccgacaacaccuucgugagcggcaacugcgacguggucaucggcaucgugaacaacacgguguacgacccccugcagcccgagcuggacuccuucaaggaggagcucgacaaguacuucaagaaccacaccagccccgacgucgaccugggggacaucuccggcaucaacgccagcguggugaacauccagaaggagaucgaccgccugaacgaggucgccaagaaccucaacgagucccugaucgaccugcaggagcucgggaaguacgagcaguacaucaaguggccgugguacaucuggcugggcuucaucgccggccugaucgcgaucgugauggugaccaucaugcucugcugcaugaccagcugcugcuccugccugaaggggugcugcagcugcggcuccugcugcaaguucgacgaggacgacagcgagcccguccugaagggggugaagcuccacuacacgugaggacuagucccuguucccagagcccacuuuuuuuucuuuuuuugaaauaaaauagccugucuuucagaucucaaaggcucuuuucagagccaccaaaaaaaaaaaaaaaaaaaaaaaaaaaaaaaaaaaaaaaaaaaaaaaaaaaaaaaaaaaaaaaaaaaaaaaaaaaaaaaaaaaaaaaaaaaaaaaaaaaaa

SEQ ID NO: 12274 - RNA, 4094 nt, Artificial Sequence
  SARS-CoV-2/Guangdong/20SF028/2020__EPI_ISL_403936 spike protein mRNA gc (1-1273)
aggagagucccgcagucggcguccagcggcucugcuuguucgugugugugucguugcaggccuuauucaagcuuaccauguucguguuccugguccuccugccccuggugagcucccagugcgugaaccucaccacccgcacgcagcugccgcccgccuacaccaacagcuucacccggggcgucuacuaccccgacaagguguuccgcuccagcgugcuguacuccacccaggaccucuuccugcccuucuucagcaacgucacgugguuccacgccauccacguguccgggaccaacggcaccaagcgguucgacaacccggugcugcccuucaacgacggggucuacuucgcgagcaccgagaaguccaacaucauccgcggcuggaucuucgggacgacccucgacagcaagacccagucccugcugaucgugaacaacgccaccaacguggucaucaaggugugcgaguuccaguucugcaacgaccccuuccucggcguguacuaccacaagaacaacaagagcuggauggaguccgaguuccgggucuacagcuccgccaacaacugcacguucgaguacgugagccagcccuuccugauggaccuggagggcaagcaggggaacuucaagaaccuccgcgaguucguguucaagaacaucgacggcuacuucaagaucuacuccaagcacaccccgaucaaccugguccgggaccugccccagggguucagcgcccucgagccccugguggaccugcccaucggcaucaacaucacccgcuuccagacccuccuggcccugcaccgguccuaccucacgccgggggacagcagcuccggcuggaccgcgggcgccgccgccuacuacgugggguaccugcagccccgcaccuuccugcucaaguacaacgagaacggcaccaucacggacgcggucgacugcgcccuggacccccugagcgagaccaagugcacccucaaguccuucaccguggagaaggggaucuaccagacgagcaacuuccgggugcagcccaccgaguccaucguccgcuucccgaacaucaccaaccugugccccuucggcgagguguucaacgccacccgguucgccagcgucuacgccuggaaccgcaagcggaucuccaacugcguggcggacuacagcgugcuguacaacuccgccagcuucuccacguucaagugcuacggcgucagccccaccaagcucaacgaccugugcuucaccaacguguacgccgacuccuucgugauccgcggggacgagguccggcagaucgcccccggccagaccgggaagaucgccgacuacaacuacaagcugccggacgacuucacgggcugcgugaucgcguggaacagcaacaaccucgacuccaaggucgggggcaacuacaacuaccuguaccgccuguuccgcaagagcaaccucaagcccuucgagcgggacaucuccaccgagaucuaccaggccggcagcacccccugcaacgggguggagggcuucaacugcuacuucccccugcaguccuacggguuccagccgaccaacggcgugggguaccagcccuaccggguggucgugcugagcuucgagcuccugcacgcccccgccacggugugcggccccaagaaguccaccaaccuggucaagaacaagugcgugaacuucaacuucaacggccucaccgggaccggcgugcugaccgagagcaacaagaaguuccugccguuccagcaguucgggcgcgacaucgccgacacgaccgacgcgguccgcgacccccagacccuggagauccucgacaucacccccugcagcuucggcgggguguccgugaucacgccgggcaccaacaccagcaaccaggucgccgugcuguaccaggacgugaacugcaccgagguccccguggccauccacgccgaccagcugacgcccaccuggcggguguacuccaccggcagcaacgucuuccagacccgcgccgggugccucaucggcgcggagcacgugaacaacuccuacgagugcgacauccccaucggggccggcaucugcgccagcuaccagacgcagaccaacuccccgcggcgcgcccggagcguggcgucccagagcaucaucgccuacaccaugucccugggcgccgagaacagcgucgccuacuccaacaacagcaucgccauccccaccaacuucacgaucuccgugaccaccgagauccugcccgugagcaugaccaagacgagcgucgacugcaccauguacaucugcggggacuccaccgagugcagcaaccuccugcugcaguacggcuccuucugcacccagcucaaccgcgcgcugacggggaucgccguggagcaggacaagaacacccaggagguguucgcccaggucaagcagaucuacaagacgcccccgaucaaggacuucggcggguucaacuucagccagauccugcccgaccccuccaagcccagcaagcgguccuucaucgaggaccuccuguucaacaaggugacccuggccgacgccggcuucaucaagcaguacggcgacugccucggggacaucgcggcccgcgaccugaucugcgcccagaaguucaacggccugaccgugcucccgccccugcugaccgacgagaugaucgcccaguacaccagcgcccuccuggcggggaccaucacguccggcuggaccuucggggccggcgccgcccugcagauccccuucgcgaugcagauggccuaccgguucaacggcaucggggucacccagaacgugcucuacgagaaccagaagcugaucgccaaccaguucaacagcgccaucggcaagauccaggacucccugagcuccaccgccagcgcgcucgggaagcugcaggacguggucaaccagaacgcccaggcccugaacacgcucgugaagcagcuguccagcaacuucggcgccaucuccagcgugcugaacgacauccucucccgccuggacaaggucgaggccgaggugcagaucgaccggcugaucaccgggcgccuccagagccugcagaccuacgugacccagcagcugauccgggcggccgagauccgcgccagcgccaaccucgccgcgaccaagauguccgagugcguccugggccagagcaagcggguggacuucugcggcaagggguaccaccugauguccuucccccagagcgccccgcacggcguggucuuccuccacgugacguacguccccgcccaggagaagaacuucaccaccgcccccgcgaucugccacgacgggaaggcccacuucccccgcgagggcguguucguguccaacgggacccacugguucgucacgcagcggaacuucuacgagccgcagaucaucaccaccgacaacaccuucgugagcggcaacugcgacguggucaucggcaucgugaacaacacgguguacgacccccugcagcccgagcuggacuccuucaaggaggagcucgacaaguacuucaagaaccacaccagccccgacgucgaccugggggacaucuccggcaucaacgccagcguggugaacauccagaaggagaucgaccgccugaacgaggucgccaagaaccucaacgagucccugaucgaccugcaggagcucgggaaguacgagcaguacaucaaguggccgugguacaucuggcugggcuucaucgccggccugaucgcgaucgugauggugaccaucaugcucugcugcaugaccagcugcugcuccugccugaaggggugcugcagcugcggcuccugcugcaaguucgacgaggacgacagcgagcccguccugaagggggugaagcuccacuacacgugaggacuagucccuguucccagagcccacuuuuuuuucuuuuuuugaaauaaaauagccugucuuucagaucucaaaggcucuuuucagagccaccaaaaaaaaaaaaaaaaaaaaaaaaaaaaaaaaaaaaaaaaaaaaaaaaaaaaaaaaaaaaaaaaaaaaaaaaaaaaaaaaaaaaaaaaaaaaaaaaaaaaa

SEQ ID NO: 12275 - RNA, 4094 nt, Artificial Sequence
  SARS-CoV-2/Shenzhen/SZTH-001/2020__EPI_ISL_406592 spike protein mRNA gc (1-1273)
aggagagucccgcagucggcguccagcggcucugcuuguucgugugugugucguugcaggccuuauucaagcuuaccauguucguguuccugguccuccugccccuggugagcucccagugcgugaaccucaccacccgcacgcagcugccgcccgccuacaccaacagcuucacccggggcgucuacuaccccgacaagguguuccgcuccagcgugcugcacuccacccaggaccucuuccugcccuucuucagcaacgucacgugguuccacgccauccacguguccgggaccaacggcaccaagcgguucgacaacccggugcugcccuucaacgacggggucuacuucgcgagcaccgagaaguccaacaucauccgcggcuggaucuucgggacgacccucgacagcaagacccagucccugcugaucgugaacaacgccaccaacguggucaucaaggugugcgaguuccaguucugcaacgaccccuuccucggcguguacuaccacaagaacaacaagagcuggauggaguccgaguuccgggucuacagcuccgccaacaacugcacguucgaguacgugagccagcccuuccugauggaccuggagggcaagcaggggaacuucaagaaccuccgcgaguucguguucaagaacaucgacggcuacuucaagaucuacuccaagcacaccccgaucaaccugguccgggaccugccccagggguucagcgcccucgagccccugguggaccugcccaucggcaucaacaucacccgcuuccagacccuccuggcccugcaccgguccuaccucacgccgggggacagcagcuccggcuggaccgcgggcgccgccgccuacuacgugggguaccugcagccccgcaccuuccugcucaaguacaacgagaacggcaccaucacggacgcggucgacugcgcccuggacccccugagcgagaccaagugcacccucaaguccuucaccguggagaaggggaucuaccagacgagcaacuuccgggugcagcccaccgaguccaucguccgcuucccgaacaucaccaaccugugccccuucggcgagguguucaacgccacccgguucgccagcgucuacgccuggaaccgcaagcggaucuccaacugcguggcggacuacagcgugcuguacaacuccgccagcuucuccacguucaagugcuacggcgucagccccaccaagcucaacgaccugugcuucaccaacguguacgccgacuccuucgugauccgcggggacgagguccggcagaucgcccccggccagaccgggaagaucgccgacuacaacuacaagcugccggacgacuucacgggcugcgugaucgcguggaacagcaacaaccucgacuccaaggucgggggcaacuacaacuaccuguaccgccuguuccgcaagagcaaccucaagcccuucgagcgggacaucuccaccgagaucuaccaggccggcagcacccccugcaacgggguggagggcuucaacugcuacuucccccugcaguccuacggguuccagccgaccaacggcgugggguaccagcccuaccggguggucgugcugagcuucgagcuccugcacgcccccgccacggugugcggccccaagaaguccaccaaccuggucaagaacaagugcgugaacuucaacuucaacggccucaccgggaccggcgugcugaccgagagcaacaagaaguuccugccguuccagcaguucgggcgcgacaucgccgacacgaccgacgcgguccgcgacccccagacccuggagauccucgacaucacccccugcagcuucggcgggguguccgugaucacgccgggcaccaacaccagcaaccaggucgccgugcuguaccaggacgugaacugcaccgagguccccguggccauccacgccgaccagcugacgcccaccuggcggguguacuccaccggcagcaacgucuuccagacccgcgccgggugccucaucggcgcggagcacgugaacaacuccuacgagugcgacauccccaucggggccggcaucugcgccagcuaccagacgcagaccaacuccccgcggcgcgcccggagcguggcgucccagagcaucaucgccuacaccaugucccugggcgccgagaacagcgucgccuacuccaacaacagcaucgccauccccaccaacuucacgaucuccgugaccaccgagauccugcccgugagcaugaccaagacgagcgucgacugcaccauguacaucugcggggacuccaccgagugcagcaaccuccugcugcaguacggcuccuucugcacccagcucaaccgcgcgcugacggggaucgccguggagcaggacaagaacacccaggagguguucgcccaggucaagcagaucuacaagacgcccccgaucaaggacuucggcggguucaacuucagccagauccugcccgaccccuccaagcccagcaagcgguccuucaucgaggaccuccuguucaacaaggugacccuggccgacgccggcuucaucaagcaguacggcgacugccucggggacaucgcggcccgcgaccugaucugcgcccagaaguucaacggccugaccgugcucccgccccugcugaccgacgagaugaucgcccaguacaccagcgcccuccuggcggggaccaucacguccggcuggaccuucggggccggcgccgcccugcagauccccuucgcgaugcagauggccuaccgguucaacggcaucggggucacccagaacgugcucuacgagaaccagaagcugaucgccaaccaguucaacagcgccaucggcaagauccaggacucccugagcuccaccgccagcgcgcucgggaagcugcaggacguggucaaccagaacgcccaggcccugaacacgcucgugaagcagcuguccagcaacuucggcgccaucuccagcgugcugaacgacauccucucccgccuggacaaggucgaggccgaggugcagaucgaccggcugaucaccgggcgccuccagagccugcagaccuacgugacccagcagcugauccgggcggccgagauccgcgccagcgccaaccucgccgcgaccaagauguccgagugcguccugggccagagcaagcggguggacuucugcggcaagggguaccaccugauguccuucccccagagcgccccgcacggcguggucuuccuccacgugacguacguccccgcccaggagaagaacuucaccaccgcccccgcgaucugccacgacgggaaggcccacuucccccgcgagggcguguucguguccaacgggacccacugguucgucacgcagcggaacuucuacgagccgcagaucaucaccaccgacaacaccuucgugagcggcaacugcgacgugcugaucggcaucgucaacaacacgguguacgacccccugcagcccgagcucgacuccuucaaggaggagcuggacaaguacuucaagaaccacaccagccccgacguggaccugggggacaucuccggcaucaacgccagcgucgugaacauccagaaggagaucgaccgccucaacgagguggccaagaaccugaacgagucccugaucgaccuccaggagcuggggaaguacgagcaguacaucaaguggccgugguacaucuggcugggcuucaucgccggccucaucgcgaucgucauggugaccaucaugcugugcugcaugaccagcugcugcuccugccugaaggggugcugcagcugcggcuccugcugcaaguucgacgaggacgacagcgggcccgugcucaagggcgucaagcugcacuacacgugaggacuagucccuguucccagagcccacuuuuuuuucuuuuuuugaaauaaaauagccugucuuucagaucucaaaggcucuuuucagagccaccaaaaaaaaaaaaaaaaaaaaaaaaaaaaaaaaaaaaaaaaaaaaaaaaaaaaaaaaaaaaaaaaaaaaaaaaaaaaaaaaaaaaaaaaaaaaaaaaaaaaa

SEQ ID NO: 12276 - RNA, 4094 nt, Artificial Sequence
  SARS-CoV-2/Shenzhen/SZTH-004/2020__EPI_ISL_406595 spike protein mRNA gc (1-1273)
aggagagucccgcagucggcguccagcggcucugcuuguucgugugugugucguugcaggccuuauucaagcuuaccauguucguguuccugguccuccugccccuggugagcucccagugcgugaaccucaccacccgcacgcagcugccgcccgccuacaccaacagcuucacccggggcgucuacuaccccgacaagguguuccgcuccagcgugcugcacuccacccaggaccucuuccugcccuucuucagcaacgucacgugguuccacgccauccacguguccgggaccaacggcaccaagcgguucgacaacccggugcugcccuucaacgacggggucuacuucgcgagcaccgagaaguccaacaucauccgcggcuggaucuucgggacgacccucgacagcaagacccagucccugcugaucgugaacaacgccaccaacguggucaucaaggugugcgaguuccaguucugcaacgaccccuuccucggcguguacuaccacaagaacaacaagagcuggauggaguccgaguuccgggucuacagcuccgccaacaacugcacguucgaguacgugagccagcccuuccugauggaccuggagggcaagcaggggaacuucaagaaccuccgcgaguucguguucaagaacaucgacggcuacuucaagaucuacuccaagcacaccccgaucaaccugguccgggaccugccccagggguucagcgcccucgagccccugguggaccugcccaucggcaucaacaucacccgcuuccagacccuccuggcccugcaccgguccuaccucacgccgggggacagcagcuccggcuggaccgcgggcgccgccgccuacuacgugggguaccugcagccccgcaccuuccugcucaaguacaacgagaacggcaccaucacggacgcggucgacugcgcccuggacccccugagcgagaccaagugcacccucaaguccuucaccguggagaaggggaucuaccagacgagcaacuuccgggugcagcccaccgaguccaucguccgcuucccgaacaucaccaaccugugccccuucggcgagguguucaacgccacccgguucgccagcgucuacgccugggaccgcaagcggaucuccaacugcguggcguacuacagcgugcuguacaacuccgccagcuucuccacguucaagugcuacggcgucagccccaccaagcucaacgaccugugcuucaccaacguguacgccgacuccuucgugauccgcggggacgagguccggcagaucgcccccggccagaccgggaagaucgccgacuacaacuacaagcugccggacgacuucacgggcugcgugaucgcguggaacagcaacaaccucgacuccaaggucgggggcaacuacaacuaccuguaccgccuguuccgcaagagcaaccucaagcccuucgagcgggacaucuccaccgagaucuaccaggccggcagcacccccugcaacgggguggagggcuucaacugcuacuucccccugcaguccuacggguuccagccgaccaacggcgugggguaccagcccuaccggguggucgugcugagcuucgagcuccugcacgcccccgccacggugugcggccccaagaaguccaccaaccuggucaagaacaagugcgugaacuucaacuucaacggccucaccgggaccggcgugcugaccgagagcaacaagaaguuccugccguuccagcaguucgggcgcgacaucgccgacacgaccgacgcgguccgcgacccccagacccuggagauccucgacaucacccccugcagcuucggcgggguguccgugaucacgccgggcaccaacaccagcaaccaggucgccgugcuguaccaggacgugaacugcaccgagguccccguggccauccacgccgaccagcugacgcccaccuggcggguguacuccaccggcagcaacgucuuccagacccgcgccgggugccucaucggcgcggagcacgugaacaacuccuacgagugcgacauccccaucggggccggcaucugcgccagcuaccagacgcagaccaacuccccgcggcgcgcccggagcguggcgucccagagcaucaucgccuacaccaugucccugggcgccgagaacagcgucgccuacuccaacaacagcaucgccauccccaccaacuucacgaucuccgugaccaccgagauccugcccgugagcaugaccaagacgagcgucgacugcaccauguacaucugcggggacuccaccgagugcagcaaccuccugcugcaguacggcuccuucugcacccagcucaaccgcgcgcugacggggaucgccguggagcaggacaagaacacccaggagguguucgcccaggucaagcagaucuacaagacgcccccgaucaaggacuucggcggguucaacuucagccagauccugcccgaccccuccaagcccagcaagcgguccuucaucgaggaccuccuguucaacaaggugacccuggccgacgccggcuucaucaagcaguacggcgacugccucggggacaucgcggcccgcgaccugaucugcgcccagaaguucaacggccugaccgugcucccgccccugcugaccgacgagaugaucgcccaguacaccagcgcccuccuggcggggaccaucacguccggcuggaccuucggggccggcgccgcccugcagauccccuucgcgaugcagauggccuaccgguucaacggcaucggggucacccagaacgugcucuacgagaaccagaagcugaucgccaaccaguucaacagcgccaucggcaagauccaggacucccugagcuccaccgccagcgcgcucgggaagcugcaggacguggucaaccagaacgcccaggcccugaacacgcucgugaagcagcuguccagcaacuucggcgccaucuccagcgugcugaacgacauccucucccgccuggacaaggucgaggccgaggugcagaucgaccggcugaucaccgggcgccuccagagccugcagaccuacgugacccagcagcugauccgggcggccgagauccgcgccagcgccaaccucgccgcgaccaagauguccgagugcguccugggccagagcaagcggguggacuucugcggcaagggguaccaccugauguccuucccccagagcgccccgcacggcguggucuuccuccacgugacguacguccccgcccaggagaagaacuucaccaccgcccccgcgaucugccacgacgggaaggcccacuucccccgcgagggcguguucguguccaacgggacccacugguucgucacgcagcggaacuucuacgagccgcagaucaucaccaccgacaacaccuucgugagcggcaacugcgacguggucaucggcaucgugaacaacacgguguacgacccccugcagcccgagcuggacuccuucaaggaggagcucgacaaguacuucaagaaccacaccagccccgacgucgaccugggggacaucuccggcaucaacgccagcguggugaacauccagaaggagaucgaccgccugaacgaggucgccaagaaccucaacgagucccugaucgaccugcaggagcucgggaaguacgagcaguacaucaaguggccgugguacaucuggcugggcuucaucgccggccugaucgcgaucgugauggugaccaucaugcucugcugcaugaccagcugcugcuccugccugaaggggugcugcagcugcggcuccugcugcaaguucgacgaggacgacagcgagcccguccugaagggggugaagcuccacuacacgugaggacuagucccuguucccagagcccacuuuuuuuucuuuuuuugaaauaaaauagccugucuuucagaucucaaaggcucuuuucagagccaccaaaaaaaaaaaaaaaaaaaaaaaaaaaaaaaaaaaaaaaaaaaaaaaaaaaaaaaaaaaaaaaaaaaaaaaaaaaaaaaaaaaaaaaaaaaaaaaaaaaaa

SEQ ID NO: 12277 - RNA, 4094 nt, Artificial Sequence
  SARS-CoV-2/France/IDF0372/2020__EPI_ISL_406596 spike protein mRNA gc (1-1273)
aggagagucccgcagucggcguccagcggcucugcuuguucgugugugugucguugcaggccuuauucaagcuuaccauguucguguuccugguccuccugccccuggugagcucccagugcgugaaccucaccacccgcacgcagcugccgcccgccuacaccaacagcuucacccggggcgucuacuaccccgacaagguguuccgcuccagcgugcugcacuccacccaggaccucuuccugcccuucuucagcaacgucacgugguuccacgccauccacguguccgggaccaacggcaccaagcgguucgacaacccggugcugcccuucaacgacggggucuacuucgcgagcaccgagaaguccaacaucauccgcggcuggaucuucgggacgacccucgacagcaagacccagucccugcugaucgugaacaacgccaccaacguggucaucaaggugugcgaguuccaguucugcaacgaccccuuccucggcguguacuaccacaagaacaacaagagcuggauggaguccgaguuccgggucuacagcuccgccaacaacugcacguucgaguacgugagccagcccuuccugauggaccuggagggcaagcaggggaacuucaagaaccuccgcgaguucguguucaagaacaucgacggcuacuucaagaucuacuccaagcacaccccgaucaaccugguccgggaccugccccagggguucagcgcccucgagccccugguggaccugcccaucggcaucaacaucacccgcuuccagacccuccuggcccugcaccgguccuaccucacgccgggggacagcagcuccggcuggaccgcgggcgccgccgccuacuacgugggguaccugcagccccgcaccuuccugcucaaguacaacgagaacggcaccaucacggacgcggucgacugcgcccuggacccccugagcgagaccaagugcacccucaaguccuucaccguggagaaggggaucuaccagacgagcaacuuccgggugcagcccaccgaguccaucguccgcuucccgaacaucaccaaccugugccccuucggcgagguguucaacgccacccgguucgccagcgucuacgccuggaaccgcaagcggaucuccaacugcguggcggacuacagcuuccuguacaacuccgccagcuucuccacguucaagugcuacggcgugagccccaccaagcucaacgaccugugcuucaccaacgucuacgccgacuccuucgugauccgcggggacgaggugcggcagaucgcccccggccagaccgggaagaucgccgacuacaacuacaagcugccggacgacuucacgggcugcgucaucgcguggaacagcaacaaccucgacuccaaggucgggggcaacuacaacuaccuguaccgccuguuccgcaagagcaaccucaagcccuucgagcgggacaucuccaccgagaucuaccaggccggcagcacccccugcaacgggguggagggcuucaacugcuacuucccccugcaguccuacggguuccagccgaccaacggcgugggguaccagcccuaccggguggugguccugagcuucgagcuccugcacgcccccgccacggugugcggccccaagaaguccaccaaccuggugaagaacaagugcgucaacuucaacuucaacggccucaccgggaccggcgugcugaccgagagcaacaagaaguuccugccguuccagcaguucgggcgcgacaucgccgacacgaccgacgcggugcgcgacccccagacccuggagauccucgacaucacccccugcagcuucggcggggucuccgugaucacgccgggcaccaacaccagcaaccagguggccguccuguaccaggacgugaacugcaccgaggugcccgucgccauccacgccgaccagcugacgcccaccuggcggguguacuccaccggcagcaacguguuccagacccgcgccgggugccucaucggcgcggagcacgucaacaacuccuacgagugcgacauccccaucggggccggcaucugcgccagcuaccagacgcagaccaacuccccgcggcgcgcccggagcguggcgucccagagcaucaucgccuacaccaugucccugggcgccgagaacagcguggccuacuccaacaacagcaucgccauccccaccaacuucacgaucuccgucaccaccgagauccugcccgugagcaugaccaagacgagcguggacugcaccauguacaucugcggggacuccaccgagugcagcaaccuccugcugcaguacggcuccuucugcacccagcucaaccgcgcgcugacggggaucgccgucgagcaggacaagaacacccaggagguguucgcccaggugaagcagaucuacaagacgcccccgaucaaggacuucggcggguucaacuucagccagauccugcccgaccccuccaagcccagcaagcgguccuucaucgaggaccuccuguucaacaaggucacccuggccgacgccggcuucaucaagcaguacggcgacugccucggggacaucgcggcccgcgaccugaucugcgcccagaaguucaacggccugaccgugcucccgccccugcugaccgacgagaugaucgcccaguacaccagcgcccuccuggcggggaccaucacguccggcuggaccuucggggccggcgccgcccugcagauccccuucgcgaugcagauggccuaccgguucaacggcaucggggugacccagaacguccucuacgagaaccagaagcugaucgccaaccaguucaacagcgccaucggcaagauccaggacucccugagcuccaccgccagcgcgcucgggaagcugcaggacguggugaaccagaacgcccaggcccugaacacgcucgucaagcagcuguccagcaacuucggcgccaucuccagcgugcugaacgacauccucucccgccuggacaagguggaggccgagguccagaucgaccggcugaucaccgggcgccuccagagccugcagaccuacgugacccagcagcugauccgggcggccgagauccgcgccagcgccaaccucgccgcgaccaagauguccgagugcgugcugggccagagcaagcgggucgacuucugcggcaagggguaccaccugauguccuucccccagagcgccccgcacggcgugguguuccuccacgucacguacgugcccgcccaggagaagaacuucaccaccgcccccgcgaucugccacgacgggaaggcccacuucccccgcgagggcgucuucguguccaacgggacccacugguucgugacgcagcggaacuucuacgagccgcagaucaucaccaccgacaacaccuucgucagcggcaacugcgacguggugaucggcaucgucaacaacacgguguacgacccccugcagcccgagcuggacuccuucaaggaggagcucgacaaguacuucaagaaccacaccagccccgacguggaccugggggacaucuccggcaucaacgccagcgucgugaacauccagaaggagaucgaccgccugaacgagguggccaagaaccucaacgagucccugaucgaccugcaggagcucgggaaguacgagcaguacaucaaguggccgugguacaucuggcugggcuucaucgccggccugaucgcgaucgucauggugaccaucaugcucugcugcaugaccagcugcugcuccugccugaaggggugcugcagcugcggcuccugcugcaaguucgacgaggacgacagcgagcccgugcugaagggggucaagcuccacuacacgugaggacuagucccuguucccagagcccacuuuuuuuucuuuuuuugaaauaaaauagccugucuuucagaucucaaaggcucuuuucagagccaccaaaaaaaaaaaaaaaaaaaaaaaaaaaaaaaaaaaaaaaaaaaaaaaaaaaaaaaaaaaaaaaaaaaaaaaaaaaaaaaaaaaaaaaaaaaaaaaaaaaaa

SEQ ID NO: 12278 - RNA, 4094 nt, Artificial Sequence
  SARS-CoV-2/Australia/VIC01/2020__EPI_ISL_406844 spike protein mRNA gc (1-1273)
aggagagucccgcagucggcguccagcggcucugcuuguucgugugugugucguugcaggccuuauucaagcuuaccauguucguguuccugguccuccugccccuggugagcucccagugcgugaaccucaccacccgcacgcagcugccgcccgccuacaccaacagcuucacccggggcgucuacuaccccgacaagguguuccgcuccagcgugcugcacuccacccaggaccucuuccugcccuucuucagcaacgucacgugguuccacgccauccacguguccgggaccaacggcaccaagcgguucgacaacccggugcugcccuucaacgacggggucuacuucgcgagcaccgagaaguccaacaucauccgcggcuggaucuucgggacgacccucgacagcaagacccagucccugcugaucgugaacaacgccaccaacguggucaucaaggugugcgaguuccaguucugcaacgaccccuuccucggcguguacuaccacaagaacaacaagagcuggauggaguccgaguuccgggucuacagcuccgccaacaacugcacguucgaguacgugagccagcccuuccugauggaccuggagggcaagcaggggaacuucaagaaccuccgcgaguucguguucaagaacaucgacggcuacuucaagaucuacuccaagcacaccccgaucaaccugguccgggaccugccccagggguucagcgcccucgagccccugguggaccugcccaucggcaucaacaucacccgcuuccagacccuccuggcccugcaccggcgcuaccucacgccgggggacuccagcagcggcuggaccgcgggcgccgccgccuacuacgugggguaccugcagccccggaccuuccugcucaaguacaacgagaacggcaccaucacggacgcggucgacugcgcccuggacccccuguccgagaccaagugcacccucaagagcuucaccguggagaaggggaucuaccagacguccaacuuccgcgugcagcccaccgagagcaucguccgguucccgaacaucaccaaccugugccccuucggcgagguguucaacgccacccgcuucgccuccgucuacgccuggaaccggaagcgcaucagcaacugcguggcggacuacuccgugcuguacaacagcgccuccuucagcacguucaagugcuacggcgucucccccaccaagcucaacgaccugugcuucaccaacguguacgccgacagcuucgugauccgcggggacgagguccggcagaucgcccccggccagaccgggaagaucgccgacuacaacuacaagcugccggacgacuucacgggcugcgugaucgcguggaacuccaacaaccucgacagcaaggucgggggcaacuacaacuaccuguaccggcuguuccgcaaguccaaccucaagcccuucgagcgggacaucagcaccgagaucuaccaggccggcuccacccccugcaacgggguggagggcuucaacugcuacuucccccugcagagcuacggguuccagccgaccaacggcgugggguaccagcccuaccgcguggucgugcuguccuucgagcuccugcacgcccccgccacggugugcggccccaagaaguccaccaaccuggucaagaacaagugcgugaacuucaacuucaacggccucaccgggaccggcgugcugaccgagagcaacaagaaguuccugccguuccagcaguucgggcgcgacaucgccgacacgaccgacgcgguccgggacccccagacccuggagauccucgacaucacccccugcagcuucggcggggugagcgugaucacgccgggcaccaacaccuccaaccaggucgccgugcuguaccaggacgugaacugcaccgagguccccguggccauccacgccgaccagcugacgcccaccuggcgcguguacagcaccggcuccaacgucuuccagacccgggccgggugccucaucggcgcggagcacgugaacaacagcuacgagugcgacauccccaucggggccggcaucugcgccuccuaccagacgcagaccaacagcccgcgccgggcccgcuccguggcgagccaguccaucaucgccuacaccaugagccugggcgccgagaacuccgucgccuacagcaacaacuccaucgccauccccaccaacuucacgaucagcgugaccaccgagauccugcccguguccaugaccaagacgagcgucgacugcaccauguacaucugcggggacagcaccgagugcuccaaccuccugcugcaguacggcagcuucugcacccagcucaaccgggcgcugacggggaucgccguggagcaggacaagaacacccaggagguguucgcccaggucaagcagaucuacaagacgcccccgaucaaggacuucggcggguucaacuucucccagauccugcccgaccccagcaagcccuccaagcgcagcuucaucgaggaccuccuguucaacaaggugacccuggccgacgccggcuucaucaagcaguacggcgacugccucggggacaucgcggcccgggaccugaucugcgcccagaaguucaacggccugaccgugcucccgccccugcugaccgacgagaugaucgcccaguacaccuccgcccuccuggcggggaccaucacgagcggcuggaccuucggggccggcgccgcccugcagauccccuucgcgaugcagauggccuaccgcuucaacggcaucggggucacccagaacgugcucuacgagaaccagaagcugaucgccaaccaguucaacuccgccaucggcaagauccaggacagccuguccagcaccgccuccgcgcucgggaagcugcaggacguggucaaccagaacgcccaggcccugaacacgcucgugaagcagcugagcuccaacuucggcgccaucagcuccgugcugaacgacauccucagccggcuggacaaggucgaggccgaggugcagaucgaccgccugaucaccgggcggcuccagucccugcagaccuacgugacccagcagcugauccgcgcggccgagauccgggccagcgccaaccucgccgcgaccaagaugagcgagugcguccugggccaguccaagcgcguggacuucugcggcaagggguaccaccugaugagcuucccccaguccgccccgcacggcguggucuuccuccacgugacguacguccccgcccaggagaagaacuucaccaccgcccccgcgaucugccacgacgggaaggcccacuucccccgggagggcguguucgugagcaacgggacccacugguucgucacgcagcgcaacuucuacgagccgcagaucaucaccaccgacaacaccuucguguccggcaacugcgacguggucaucggcaucgugaacaacacgguguacgacccccugcagcccgagcuggacagcuucaaggaggagcucgacaaguacuucaagaaccacaccucccccgacgucgaccugggggacaucagcggcaucaacgccuccguggugaacauccagaaggagaucgaccggcugaacgaggucgccaagaaccucaacgagagccugaucgaccugcaggagcucgggaaguacgagcaguacaucaaguggccgugguacaucuggcugggcuucaucgccggccugaucgcgaucgugauggugaccaucaugcucugcugcaugaccuccugcugcagcugccugaaggggugcugcuccugcggcagcugcugcaaguucgacgaggacgacuccgagcccguccugaagggggugaagcuccacuacacgugaggacuagucccuguucccagagcccacuuuuuuuucuuuuuuugaaauaaaauagccugucuuucagaucucaaaggcucuuuucagagccaccaaaaaaaaaaaaaaaaaaaaaaaaaaaaaaaaaaaaaaaaaaaaaaaaaaaaaaaaaaaaaaaaaaaaaaaaaaaaaaaaaaaaaaaaaaaaaaaaaaaaa

SEQ ID NO: 12279 - RNA, 4094 nt, Artificial Sequence
  SARS-CoV-2/Germany/BavPat1/2020__EPI_ISL_406862 spike protein mRNA gc (1-1273)
aggagagucccgcagucggcguccagcggcucugcuuguucgugugugugucguugcaggccuuauucaagcuuaccauguucguguuccugguccuccugccccuggugagcucccagugcgugaaccucaccacccgcacgcagcugccgcccgccuacaccaacagcuucacccggggcgucuacuaccccgacaagguguuccgcuccagcgugcugcacuccacccaggaccucuuccugcccuucuucagcaacgucacgugguuccacgccauccacguguccgggaccaacggcaccaagcgguucgacaacccggugcugcccuucaacgacggggucuacuucgcgagcaccgagaaguccaacaucauccgcggcuggaucuucgggacgacccucgacagcaagacccagucccugcugaucgugaacaacgccaccaacguggucaucaaggugugcgaguuccaguucugcaacgaccccuuccucggcguguacuaccacaagaacaacaagagcuggauggaguccgaguuccgggucuacagcuccgccaacaacugcacguucgaguacgugagccagcccuuccugauggaccuggagggcaagcaggggaacuucaagaaccuccgcgaguucguguucaagaacaucgacggcuacuucaagaucuacuccaagcacaccccgaucaaccugguccgggaccugccccagggguucagcgcccucgagccccugguggaccugcccaucggcaucaacaucacccgcuuccagacccuccuggcccugcaccgguccuaccucacgccgggggacagcagcuccggcuggaccgcgggcgccgccgccuacuacgugggguaccugcagccccgcaccuuccugcucaaguacaacgagaacggcaccaucacggacgcggucgacugcgcccuggacccccugagcgagaccaagugcacccucaaguccuucaccguggagaaggggaucuaccagacgagcaacuuccgggugcagcccaccgaguccaucguccgcuucccgaacaucaccaaccugugccccuucggcgagguguucaacgccacccgguucgccagcgucuacgccuggaaccgcaagcggaucuccaacugcguggcggacuacagcgugcuguacaacuccgccagcuucuccacguucaagugcuacggcgucagccccaccaagcucaacgaccugugcuucaccaacguguacgccgacuccuucgugauccgcggggacgagguccggcagaucgcccccggccagaccgggaagaucgccgacuacaacuacaagcugccggacgacuucacgggcugcgugaucgcguggaacagcaacaaccucgacuccaaggucgggggcaacuacaacuaccuguaccgccuguuccgcaagagcaaccucaagcccuucgagcgggacaucuccaccgagaucuaccaggccggcagcacccccugcaacgggguggagggcuucaacugcuacuucccccugcaguccuacggguuccagccgaccaacggcgugggguaccagcccuaccggguggucgugcugagcuucgagcuccugcacgcccccgccacggugugcggccccaagaaguccaccaaccuggucaagaacaagugcgugaacuucaacuucaacggccucaccgggaccggcgugcugaccgagagcaacaagaaguuccugccguuccagcaguucgggcgcgacaucgccgacacgaccgacgcgguccgcgacccccagacccuggagauccucgacaucacccccugcagcuucggcgggguguccgugaucacgccgggcaccaacaccagcaaccaggucgccgugcuguaccagggcgugaacugcaccgagguccccguggccauccacgccgaccagcugacgcccaccuggcggguguacuccaccgggagcaacgucuuccagacccgcgccggcugccucaucggggcggagcacgugaacaacuccuacgagugcgacauccccaucggcgccggcaucugcgccagcuaccagacgcagaccaacuccccgcggcgcgcccggagcguggcgucccagagcaucaucgccuacaccaugucccugggggccgagaacagcgucgccuacuccaacaacagcaucgccauccccaccaacuucacgaucuccgugaccaccgagauccugcccgugagcaugaccaagacgagcgucgacugcaccauguacaucugcggcgacuccaccgagugcagcaaccuccugcugcaguacggguccuucugcacccagcucaaccgcgcgcugacgggcaucgccguggagcaggacaagaacacccaggagguguucgcccaggucaagcagaucuacaagacgcccccgaucaaggacuucgggggcuucaacuucagccagauccugcccgaccccuccaagcccagcaagcgguccuucaucgaggaccuccuguucaacaaggugacccuggccgacgccggcuucaucaagcaguacggggacugccucggcgacaucgcggcccgcgaccugaucugcgcccagaaguucaacgggcugaccgugcucccgccccugcugaccgacgagaugaucgcccaguacaccagcgcccuccuggcgggcaccaucacguccggguggaccuucggcgccggcgccgcccugcagauccccuucgcgaugcagauggccuaccgguucaacgggaucggcgucacccagaacgugcucuacgagaaccagaagcugaucgccaaccaguucaacagcgccaucgggaagauccaggacucccugagcuccaccgccagcgcgcucggcaagcugcaggacguggucaaccagaacgcccaggcccugaacacgcucgugaagcagcuguccagcaacuucggggccaucuccagcgugcugaacgacauccucucccgccuggacaaggucgaggccgaggugcagaucgaccggcugaucaccggccgccuccagagccugcagaccuacgugacccagcagcugauccgggcggccgagauccgcgccagcgccaaccucgccgcgaccaagauguccgagugcguccugggccagagcaagcggguggacuucugcgggaagggcuaccaccugauguccuucccccagagcgccccgcacgggguggucuuccuccacgugacguacguccccgcccaggagaagaacuucaccaccgcccccgcgaucugccacgacggcaaggcccacuucccccgcgaggggguguucguguccaacggcacccacugguucgucacgcagcggaacuucuacgagccgcagaucaucaccaccgacaacaccuucgugagcggcaacugcgacguggucaucgggaucgugaacaacacgguguacgacccccugcagcccgagcuggacuccuucaaggaggagcucgacaaguacuucaagaaccacaccagccccgacgucgaccugggcgacaucuccgggaucaacgccagcguggugaacauccagaaggagaucgaccgccugaacgaggucgccaagaaccucaacgagucccugaucgaccugcaggagcucggcaaguacgagcaguacaucaaguggccgugguacaucuggcugggcuucaucgccgggcugaucgcgaucgugauggugaccaucaugcucugcugcaugaccagcugcugcuccugccugaagggcugcugcagcugcggguccugcugcaaguucgacgaggacgacagcgagcccguccugaagggcgugaagcuccacuacacgugaggacuagucccuguucccagagcccacuuuuuuuucuuuuuuugaaauaaaauagccugucuuucagaucucaaaggcucuuuucagagccaccaaaaaaaaaaaaaaaaaaaaaaaaaaaaaaaaaaaaaaaaaaaaaaaaaaaaaaaaaaaaaaaaaaaaaaaaaaaaaaaaaaaaaaaaaaaaaaaaaaaaa

SEQ ID NO: 12280 - RNA, 4094 nt, Artificial Sequence
  SARS-CoV-2/Wuhan/HBCDC-HB-02/2020__EPI_ISL_412978 spike protein mRNA gc (1-1273)
aggagagucccgcagucggcguccagcggcucugcuuguucgugugugugucguugcaggccuuauucaagcuuaccauguucguguuccugguccuccugccccuggugagcucccagugcgugaaccucaccacccgcacgcagcugccgcccgccuacaccaacagcuucacccggggcgucuacuaccccgacaagguguuccgcuccagcgugcugcacuccacccaggaccucuuccugcccuucuucagcaacgucacgugguuccacgccauccacguguccgggaccaacggcaccaagcgguucgacaacccggugcugcccuucaacgacggggucuacuucgcgagcaccgagaaguccaacaucauccgcggcuggaucuucgggacgacccucgacagcaagacccagucccugcugaucgugaacaacgccaccaacguggucaucaaggugugcgaguuccaguucugcaacgaccccuuccucggcguguacuaccacaagaacaacaagagcuggauggaguccgaguuccgggucuacagcuccgccaacaacugcacguucgaguacgugagccagcccuuccugauggaccuggagggcaagcaggggaacuucaagaaccuccgcgaguucguguucaagaacaucgacggcuacuucaagaucuacuccaagcacaccccgaucaaccugguccgggaccugccccagggguucagcgcccucgagccccugguggaccugcccaucggcaucaacaucacccgcuuccagacccuccuggcccugcaccgguccuaccucacgccgggggacagcagcuccggcuggaccgcgggcgccgccgccuacuacgugggguaccugcagccccgcaccuuccugcucaaguacaacgagaacggcaccaucacggacgcggucgacugcgcccuggacccccugagcgagaccaagugcacccucaaguccuucaccguggagaaggggaucuaccagacgagcaacuuccgggugcagcccaccgaguccaucguccgcuucccgaacaucaccaaccugugccccuucggcgagguguucaacgccacccgguucgccagcgucuacgccuggaaccgcaagcggaucuccaacugcguggcggacuacagcgugcuguacaacuccgccagcuucuccacguucaagugcuacggcgucagccccaccaagcucaacgaccugugcuucaccaacguguacgccgacuccuucgugauccgcggggacgagguccggcagaucgcccccggccagaccgggaagaucgccgacuacaacuacaagcugccggacgacuucacgggcugcgugaucgcguggaacagcaacaaccucgacuccaaggucgggggcaacuacaacuaccuguaccgccuguuccgcaagagcaaccucaagcccuucgagcgggacaucuccaccgagaucuaccaggccggcagcacccccugcaacgggguggagggcuucaacugcuacuucccccugcaguccuacggguuccagccgaccaacggcgugggguaccagcccuaccggguggucgugcugagcuucgagcuccugcacgcccccgccacggugugcggccccaagaaguccaccaaccuggucaagaacaagugcgugaacuucaacuucaacggccucaccgggaccggcgugcugaccgagagcaacaagaaguuccugccguuccagcaguucgggcgcgacaucgccgacacgaccgacgcgguccgcgacccccagacccuggagauccucgacaucacccccugcagcuucggcgggguguccgugaucacgccgggcaccaacaccagcaaccaggucgccgugcuguaccaggacgugaacugcaccgagguccccguggccauccacgccgaccagcugacgcccaccuggcggguguacuccaccggcagcaacgucuuccagacccgcgccgggugccucaucggcgcggagcacgugaacaacuccuacgagugcgacauccccaucggggccggcaucugcgccagcuaccagacgcagaccaacuccccgcggcgcgcccggagcguggcgucccagagcaucaucgccuacaccaugucccugggcgccgagaacagcgucgccuacuccaacaacagcaucgccauccccaccaacuucacgaucuccgugaccaccgagauccugcccgugagcaugaccaagacgagcgucgacugcaccauguacaucugcggggacuccaccgagugcagcaacuuccuccugcaguacggcuccuucugcacccagcugaaccgcgcgcucacggggaucgccguggagcaggacaagaacacccaggagguguucgcccaggucaagcagaucuacaagacgcccccgaucaaggacuucggcggguucaacuucagccagauccugcccgaccccuccaagcccagcaagcgguccuucaucgaggaccuccuguucaacaaggugacccuggccgacgccggcuucaucaagcaguacggcgacugccugggggacaucgcggcccgcgaccucaucugcgcccagaaguucaacggccugaccgugcugccgccccuccugaccgacgagaugaucgcccaguacaccagcgcccugcucgcggggaccaucacguccggcuggaccuucggggccggcgccgcccugcagauccccuucgcgaugcagauggccuaccgguucaacggcaucggggucacccagaacgugcuguacgagaaccagaagcucaucgccaaccaguucaacagcgccaucggcaagauccaggacucccugagcuccaccgccagcgcgcuggggaagcuccaggacguggucaaccagaacgcccaggcccugaacacgcuggugaagcagcucuccagcaacuucggcgccaucuccagcgugcugaacgacauccugucccgccucgacaaggucgaggccgaggugcagaucgaccggcugaucaccgggcgccugcagagccuccagaccuacgugacccagcagcugauccgggcggccgagauccgcgccagcgccaaccuggccgcgaccaagauguccgagugcguccucggccagagcaagcggguggacuucugcggcaagggguaccaccugauguccuucccccagagcgccccgcacggcguggucuuccugcacgugacguacguccccgcccaggagaagaacuucaccaccgcccccgcgaucugccacgacgggaaggcccacuucccccgcgagggcguguucguguccaacgggacccacugguucgucacgcagcggaacuucuacgagccgcagaucaucaccaccgacaacaccuucgugagcggcaacugcgacguggucaucggcaucgugaacaacacgguguacgacccccuccagcccgagcuggacuccuucaaggaggagcuggacaaguacuucaagaaccacaccagccccgacgucgaccucggggacaucuccggcaucaacgccagcguggugaacauccagaaggagaucgaccgccugaacgaggucgccaagaaccugaacgagucccucaucgaccugcaggagcuggggaaguacgagcaguacaucaaguggccgugguacaucuggcucggcuucaucgccggccugaucgcgaucgugauggugaccaucaugcugugcugcaugaccagcugcugcuccugccucaaggggugcugcagcugcggcuccugcugcaaguucgacgaggacgacagcgagcccguccugaagggggugaagcugcacuacacgugaggacuagucccuguucccagagcccacuuuuuuuucuuuuuuugaaauaaaauagccugucuuucagaucucaaaggcucuuuucagagccaccaaaaaaaaaaaaaaaaaaaaaaaaaaaaaaaaaaaaaaaaaaaaaaaaaaaaaaaaaaaaaaaaaaaaaaaaaaaaaaaaaaaaaaaaaaaaaaaaaaaaa

SEQ ID NO: 12281 - RNA, 4094 nt, Artificial Sequence
  SARS-CoV-2/Australia/QLD02/2020__EPI_ISL_407896 spike protein mRNA gc (1-1273)
aggagagucccgcagucggcguccagcggcucugcuuguucgugugugugucguugcaggccuuauucaagcuuaccauguucguguuccugguccuccugccccuggugagcucccagugcgugaaccucaccacccgcacgcagcugccgcccgccuacaccaacagcuucacccggggcgucuacuaccccgacaagguguuccgcuccagcgugcugcacuccacccaggaccucuuccugcccuucuucagcaacgucacgugguuccacgccauccacguguccgggaccaacggcaccaagcgguucgacaacccggugcugcccuucaacgacggggucuacuucgcgagcaccgagaaguccaacaucauccgcggcuggaucuucgggacgacccucgacagcaagacccagucccugcugaucgugaacaacgccaccaacguggucaucaaggugugcgaguuccaguucugcaacgaccccuuccucggcguguacuaccacaagaacaacaagagcuggauggaguccgaguuccgggucuacagcuccgccaacaacugcacguucgaguacgugagccagcccuuccugauggaccuggagggcaagcaggggaacuucaagaaccuccgcgaguucguguucaagaacaucgacggcuacuucaagaucuacuccaagcacaccccgaucaaccugguccgggaccugccccagggguucagcgcccucgagccccugguggaccugcccaucggcaucaacaucacccgcuuccagacccuccuggcccugcaccgguccuaccucacgccgggggacagcagcuccggcuggaccgcgggcgccgccgccuacuacgugggguaccugcagccccgcaccuuccugcucaaguacaacgagaacggcaccaucacggacgcggucgacugcgcccuggacccccugagcgagaccaagugcacccucaaguccuucaccguggagaaggggaucuaccagacgagcaacuuccgggugcagcccaccgaguccaucguccgcuucccgaacaucaccaaccugugccccuucggcgagguguucaacgccacccgguucgccagcgucuacgccuggaaccgcaagcggaucuccaacugcguggcggacuacagcgugcuguacaacuccgccagcuucuccacguucaagugcuacggcgucagccccaccaagcucaacgaccugugcuucaccaacguguacgccgacuccuucgugauccgcggggacgagguccggcagaucgcccccggccagaccgggaagaucgccgacuacaacuacaagcugccggacgacuucacgggcugcgugaucgcguggaacagcaacaaccucgacuccaaggucgggggcaacuacaacuaccuguaccgccuguuccgcaagagcaaccucaagcccuucgagcgggacaucuccaccgagaucuaccaggccggcagcacccccugcaacgggguggagggcuucaacugcuacuucccccugcaguccuacggguuccagccgaccaacggcgugggguaccagcccuaccggguggucgugcugagcuucgagcuccugcacgcccccgccacggugugcggccccaagaaguccaccaaccuggucaagaacaagugcgugaacuucaacuucaacggccucaccgggaccggcgugcugaccgagagcaacaagaaguuccugccguuccagcaguucgggcgcgacaucgccgacacgaccgacgcgguccgcgacccccagacccuggagauccucgacaucacccccugcagcuucggcgggguguccgugaucacgccgggcaccaacaccagcaaccaggucgccgugcuguaccaggacgugaacugcaccgagguccccguggccauccacgccgaccagcugacgcccaccuggcggguguacuccaccggcagcaacgucuuccagacccgcgccgggugccucaucggcgcggagcacgugaacaacuccuacgagugcgacauccccaucggggccggcaucugcgccagcuaccagacgcagaccaacuccccgcggcgcgcccggagcguggcgucccagagcaucaucgccuacaccaugucccugggcgccgagaacagcgucgccuacuccaacaacagcaucgccauccccaccaacuucacgaucuccgugaccaccgagauccugcccgugagcaugaccaagacgagcgucgacugcaccauguacaucugcggggacuccaccgagugcagcaaccuccugcugcaguacggcuccuucugcacccagcucaaccgcgcgcugacggggaucgccguggagcaggacaagaacacccaggagguguucgcccaggucaagcagaucuacaagacgcccccgaucaaggacuucggcggguucaacuucagccagauccugcccgaccccuccaagcccagcaagcgguccuucaucgaggaccuccuguucaacaaggugacccuggccgacgccggcuucaucaagcaguacggcgacugccucggggacaucgcggcccgcgaccugaucugcgcccagaaguucaacggccugaccgugcucccgccccugcugaccgacgagaugaucgcccaguacaccagcgcccuccuggcggggaccaucacguccggcuggaccuucggggccggcgccgcccugcagauccccuucgcgaugcagauggccuaccgguucaacggcaucggggucacccagaacgugcucuacgagaaccagaagcugaucgccaaccaguucaacagcgccaucggcaagauccaggacucccugagcuccaccgccagcgcgcucgggaagcugcaggacguggucaaccagaacgcccaggcccugaacacgcucgugaagcagcuguccagcaacuucggcgccaucuccagcgugcugaacgacauccucucccgccuggacaaggucgaggccgaggugcagaucgaccggcugaucaccgggcgccuccagagccugcagaccuacgugacccagcagcugauccgggcggccgagauccgcgccagcgccaaccucgccgcgaccaagauguccgagugcguccugggccagagcaagcggguggacuucugcggcaagggguaccaccugauguccuucccccagagcgccccgcacggcguggucuuccuccacgugacguacguccccgcccaggagaagaacuucaccaccgcccccgcgaucugccacgacgggaaggcccacuucccccgcgagggcguguucguguccaacgggacccacugguucgucacgcagcggaacuucuacgagccgcagaucaucaccaccgacaacaccuucgugagcggcaacugcgacguggucaucggcaucgugaacaacacgguguacgacccccugcagcuggagcucgacuccuucaaggaggagcuggacaaguacuucaagaaccacaccagccccgacgucgaccugggggacaucuccggcaucaacgccagcguggugaacauccagaaggagaucgaccgccucaacgaggucgccaagaaccugaacgagucccugaucgaccuccaggagcuggggaaguacgagcaguacaucaaguggcccugguacaucuggcugggcuucaucgccggccucaucgcgaucgugauggugaccaucaugcugugcugcaugaccagcugcugcuccugccugaaggggugcugcagcugcggcuccugcugcaaguucgacgaggacgacagcgagccgguccucaagggggugaagcugcacuacacgugaggacuagucccuguucccagagcccacuuuuuuuucuuuuuuugaaauaaaauagccugucuuucagaucucaaaggcucuuuucagagccaccaaaaaaaaaaaaaaaaaaaaaaaaaaaaaaaaaaaaaaaaaaaaaaaaaaaaaaaaaaaaaaaaaaaaaaaaaaaaaaaaaaaaaaaaaaaaaaaaaaaaa

SEQ ID NO: 12282 - RNA, 4094 nt, Artificial Sequence
  SARS-CoV-2/India/1-31/2020__EPI_ISL_413523 spike protein mRNA gc (1-1273)
aggagagucccgcagucggcguccagcggcucugcuuguucgugugugugucguugcaggccuuauucaagcuuaccauguucguguuccugguccuccugccccuggugagcucccagugcgugaaccucaccacccgcacgcagcugccgcccgccuacaccaacagcuucacccggggcgucuacuaccccgacaagguguuccgcuccagcgugcugcacuccacccaggaccucuuccugcccuucuucagcaacgucacgugguuccacgccauccacguguccgggaccaacggcaccaagcgguucgacaacccggugcugcccuucaacgacggggucuacuucgcgagcaccgagaaguccaacaucauccgcggcuggaucuucgggacgacccucgacagcaagacccagucccugcugaucgugaacaacgccaccaacguggucaucaaggugugcgaguuccaguucugcaacgaccccuuccucggcguguacuaccacaagaacaacaagagcuggauggaguccgaguuccgggucuacagcuccgccaacaacugcacguucgaguacgugagccagcccuuccugauggaccuggagggcaagcaggggaacuucaagaaccuccgcgaguucguguucaagaacaucgacggcuacuucaagaucuacuccaagcacaccccgaucaaccugguccgggaccugccccagggguucagcgcccucgagccccugguggaccugcccaucggcaucaacaucacccgcuuccagacccuccuggcccugcaccgguccuaccucacgccgggggacagcagcuccggcuggaccgcgggcgccgccgccuacuacgugggguaccugcagccccgcaccuuccugcucaaguacaacgagaacggcaccaucacggacgcggucgacugcgcccuggacccccugagcgagaccaagugcacccucaaguccuucaccguggagaaggggaucuaccagacgagcaacuuccgggugcagcccaccgaguccaucguccgcuucccgaacaucaccaaccugugccccuucggcgagguguucaacgccacccgguucgccagcgucuacgccuggaaccgcaagcggaucuccaacugcguggcggacuacagcgugcuguacaacuccgccagcuucuccacguucaagugcuacggcgucagccccaccaagcucaacgaccugugcuucaccaacguguacgccgacuccuucgugauccgcggggacgagguccggcagaucgcccccggccagaccgggaagaucgccgacuacaacuacaagcugccggacgacuucacgggcugcgugaucgcguggaacagcaacaaccucgacuccaaggucgggggcaacuacaacuaccuguaccgccuguuccgcaagagcaaccucaagcccuucgagcgggacaucuccaccgagaucuaccaggccggcagcacccccugcaacgggguggagggcuucaacugcuacuucccccugcaguccuacggguuccagccgaccaacggcgugggguaccagcccuaccggguggucgugcugagcuucgagcuccugcacgcccccgccacggugugcggccccaagaaguccaccaaccuggucaagaacaagugcgugaacuucaacuucaacggccucaccgggaccggcgugcugaccgagagcaacaagaaguuccugccguuccagcaguucgggcgcgacaucgccgacacgaccgacgcgguccgcgacccccagacccuggagauccucgacaucacccccugcagcuucggcgggguguccgugaucacgccgggcaccaacaccagcaaccaggucgccgugcuguaccaggacgugaacugcaccgagguccccguggccauccacgccgaccagcugacgcccaccuggcggguguacuccaccggcagcaacgucuuccagacccgcgccgggugccucaucggcgcggagcacgugaacaacuccuacgagugcgacauccccaucggggccggcaucugcgccagcuaccagacgcagaccaacuccccgcggcgcgcccggagcguggcgucccagagcaucaucgccuacaccaugucccugggcgccgagaacagcgucgccuacuccaacaacagcaucgccauccccaccaacuucacgaucuccgugaccaccgagauccugcccgugagcaugaccaagacgagcgucgacugcaccauguacaucugcggggacuccaccgagugcagcaaccuccugcugcaguacggcuccuucugcacccagcucaaccgcgcgcugacggggaucgccguggagcaggacaagaacacccaggagguguucgcccaggucaagcagaucuacaagacgcccccgaucaaggacuucggcggguucaacuucagccagauccugcccgaccccuccaagcccagcaagcgguccuucaucgaggaccuccuguucaacaaggugacccuggccgacgccggcuucaucaagcaguacggcgacugccucggggacaucgcggcccgcgaccugaucugcgcccagaaguucaacggccugaccgugcucccgccccugcugaccgacgagaugaucgcccaguacaccagcgcccuccuggcggggaccaucacguccggcuggaccuucggggccggcgccgcccugcagauccccuucgcgaugcagauggccuaccgguucaacggcaucggggucacccagaacgugcucuacgagaaccagaagcugaucgccaaccaguucaacagcgugaucggcaagauccaggacucccugagcuccaccgccagcgcccucgggaagcugcaggacgucgugaaccagaacgcgcaggcccugaacacgcucgugaagcagcuguccagcaacuucggcgccaucuccagcguccugaacgacauccucucccgccuggacaagguggaggccgaggugcagaucgaccggcugaucaccgggcgccuccagagccugcagaccuacgucacccagcagcugauccgggccgcggagauccgcgccagcgccaaccucgccgccaccaagauguccgagugcgugcugggccagagcaagcggguggacuucugcggcaagggguaccaccugauguccuucccccagagcgcgccgcacggcgucguguuccuccacgucacguacgugcccgcccaggagaagaacuucaccaccgcccccgccaucugccacgacgggaaggcgcacuucccccgcgagggcguguucgucuccaacgggacccacugguucgugacgcagcggaacuucuacgagccgcagaucaucaccaccgacaacaccuucgugagcggcaacugcgacgucgugaucggcaucgugaacaacacggucuacgacccccugcagcccgagcuggacuccuucaaggaggagcucgacaaguacuucaagaaccacaccagccccgacguggaccugggggacaucuccggcaucaacgccagcguggucaacauccagaaggagaucgaccgccugaacgagguggccaagaaccucaacgagucccugaucgaccugcaggagcucgggaaguacgagcaguacaucaaguggccgugguacaucuggcugggcuucaucgccggccugaucgccaucgugauggucaccaucaugcucugcugcaugaccagcugcugcuccugccugaaggggugcugcagcugcggcuccugcugcaaguucgacgaggacgacagcgagcccgugcugaagggggugaagcuccacuacacgugaggacuagucccuguucccagagcccacuuuuuuuucuuuuuuugaaauaaaauagccugucuuucagaucucaaaggcucuuuucagagccaccaaaaaaaaaaaaaaaaaaaaaaaaaaaaaaaaaaaaaaaaaaaaaaaaaaaaaaaaaaaaaaaaaaaaaaaaaaaaaaaaaaaaaaaaaaaaaaaaaaaaa

SEQ ID NO: 12283 - RNA, 4094 nt, Artificial Sequence
  SARS-CoV-2/Guangdong/GD2020087-P0008/2020__EPI_ISL_413863 spike protein mRNA gc (1-1273)
aggagagucccgcagucggcguccagcggcucugcuuguucgugugugugucguugcaggccuuauucaagcuuaccauguucguguuccugguccuccugccccuggugagcucccagugcgugaaccucaccacccgcacgcagcugccgcccgccuacaccaacagcuucacccggggcgucuacuaccccgacaagguguuccgcuccagcgugcugcacuccacccaggaccucuuccugcccuucuucagcaacgucacgugguuccacgccauccacguguccgggaccaacggcaccaagcgguucgacaacccggugcugcccuucaacgacggggucuacuucgcgagcaccgagaaguccaacaucauccgcggcuggaucuucgggacgacccucgacagcaagacccagucccugcugaucgugaacaacgccaccaacguggucaucaaggugugcgaguuccaguucugcaacgaccccuuccucggcguguacuaccacaagaacaacaagagcuggauggaguccgaguuccgggucuacagcuccgccaacaacugcacguucgaguacgugagccagcccuuccugauggaccuggagggcaagcaggggaacuucaagaaccuccgcgaguucguguucaagaacaucgacggcuacuucaagaucuacuccaagcacaccccgaucaaccugguccgggaccugccccagggguucagcgcccucgagccccugguggaccugcccaucggcaucaacaucacccgcuuccagacccuccuggcccugcaccgguccuaccucacgccgggggacagcagcuccggcuggaccgcgggcgccgccgccuacuacgugggguaccugcagccccgcaccuuccugcucaaguacaacgagaacggcaccaucacggacgcggucgacugcgcccuggacccccugagcgagaccaagugcacccucaaguccuucaccguggagaaggggaucuaccagacgagcaacuuccgggugcagcccaccgaguccaucguccgcuucccgaacaucaccaaccugugccccuucggcgagguguucaacgccacccgguucgccagcgucuacgccuggaaccgcaagcggaucuccaacugcguggcggacuacagcgugcuguacaacuccgccagcuucuccacguucaagugcuacggcgucagccccaccaagcucaacgaccugugcuucaccaacguguacgccgacuccuucgugauccgcggggacgagguccgggagaucgcccccggccagaccgggaagaucgccgacuacaacuacaagcugccggacgacuucacgggcugcgugaucgcguggaacagcaacaaccucgacuccaaggucgggggcaacuacaacuaccuguaccgccuguuccgcaagagcaaccucaagcccuucgagcgggacaucuccaccgagaucuaccaggccggcagcacccccugcaacgggguggagggcuucaacugcuacuucccccugcaguccuacggguuccagccgaccaacggcgugggguaccagcccuaccggguggucgugcugagcuucgagcuccugcacgcccccgccacggugugcggccccaagaaguccaccaaccuggucaagaacaagugcgugaacuucaacuucaacggccucaccgggaccggcgugcugaccgagagcaacaagaaguuccugccguuccagcaguucgggcgcgacaucgccgacacgaccgacgcgguccgcgacccccagacccuggagauccucgacaucacccccugcagcuucggcgggguguccgugaucacgccgggcaccaacaccagcaaccaggucgccgugcuguaccaggacgugaacugcaccgagguccccguggccauccacgccgaccagcugacgcccaccuggcggguguacuccaccggcagcaacgucuuccagacccgcgccgggugccucaucggcgcggagcacgugaacaacuccuacgagugcgacauccccaucggggccggcaucugcgccagcuaccagacgcagaccaacuccccgcggcgcgcccggagcguggcgucccagagcaucaucgccuacaccaugucccugggcgccgagaacagcgucgccuacuccaacaacagcaucgccauccccaccaacuucacgaucuccgugaccaccgagauccugcccgugagcaugaccaagacgagcgucgacugcaccauguacaucugcggggacuccaccgagugcagcaaccuccugcugcaguacggcuccuucugcacccagcucaaccgcgcgcugacggggaucgccguggagcaggacaagaacacccaggagguguucgcccaggucaagcagaucuacaagacgcccccgaucaaggacuucggcggguucaacuucagccagauccugcccgaccccuccaagcccagcaagcgguccuucaucgaggaccuccuguucaacaaggugacccuggccgacgccggcuucaucaagcaguacggcgacugccucggggacaucgcggcccgcgaccugaucugcgcccagaaguucaacggccugaccgugcucccgccccugcugaccgacgagaugaucgcccaguacaccagcgcccuccuggcggggaccaucacguccggcuggaccuucggggccggcgccgcccugcagauccccuucgcgaugcagauggccuaccgguucaacggcaucggggucacccagaacgugcucuacgagaaccagaagcugaucgccaaccaguucaacagcgccaucggcaagauccaggacucccugagcuccaccgccagcgcgcucgggaagcugcaggacguggucaaccagaacgcccaggcccugaacacgcucgugaagcagcuguccagcaacuucggcgccaucuccagcgugcugaacgacauccucucccgccuggacaaggucgaggccgaggugcagaucgaccggcugaucaccgggcgccuccagagccugcagaccuacgugacccagcagcugauccgggcggccgagauccgcgccagcgccaaccucgccgcgaccaagauguccgagugcguccugggccagagcaagcggguggacuucugcggcaagggguaccaccugauguccuucccccagagcgccccgcacggcguggucuuccuccacgugacguacguccccgcccaggagaagaacuucaccaccgcccccgcgaucugccacgacgggaaggcccacuucccccgcgagggcguguucguguccaacgggacccacugguucgucacgcagcggaacuucuacgagccgcagaucaucaccaccgacaacaccuucgugagcggcaacugcgacguggucaucggcaucgugaacaacacgguguacgacccccugcagcccgagcuggacuccuucaaggaggagcucgacaaguacuucaagaaccacaccagccccgacgucgaccugggggacaucuccggcaucaacgccagcguggugaacauccagaaggagaucgaccgccugaacgaggucgccaagaaccucaacgagucccugaucgaccugcaggagcucgggaaguacgagcaguacaucaaguggccgugguacaucuggcugggcuucaucgccggccugaucgcgaucgugauggugaccaucaugcucugcugcaugaccagcugcugcuccugccugaaggggugcugcagcugcggcuccugcugcaaguucgacgaggacgacagcgagcccguccugaagggggugaagcuccacuacacgugaggacuagucccuguucccagagcccacuuuuuuuucuuuuuuugaaauaaaauagccugucuuucagaucucaaaggcucuuuucagagccaccaaaaaaaaaaaaaaaaaaaaaaaaaaaaaaaaaaaaaaaaaaaaaaaaaaaaaaaaaaaaaaaaaaaaaaaaaaaaaaaaaaaaaaaaaaaaaaaaaaaaa

SEQ ID NO: 12284 - RNA, 4094 nt, Artificial Sequence
  SARS-CoV-2/Sweden/01/2020__EPI_ISL_411951 spike protein mRNA gc (1-1273)
aggagagucccgcagucggcguccagcggcucugcuuguucgugugugugucguugcaggccuuauucaagcuuaccauguucguguuccugguccuccugccccuggugagcucccagugcgugaaccucaccacccgcacgcagcugccgcccgccuacaccaacagcuucacccggggcgucuacuaccccgacaagguguuccgcuccagcgugcugcacuccacccaggaccucuuccugcccuucuucagcaacgucacgugguuccacgccauccacguguccgggaccaacggcaccaagcgguucgacaacccggugcugcccuucaacgacggggucuacuucgcgagcaccgagaaguccaacaucauccgcggcuggaucuucgggacgacccucgacagcaagacccagucccugcugaucgugaacaacgccaccaacguggucaucaaggugugcgaguuccaguucugcaacgaccccuuccucggcguguacuaccacaagaacaacaagagcuggauggaguccgaguuccgggucuacagcuccgccaacaacugcacguucgaguacgugagccagcccuuccugauggaccuggagggcaagcaggggaacuucaagaaccuccgcgaguucguguucaagaacaucgacggcuacuucaagaucuacuccaagcacaccccgaucaaccugguccgggaccugccccagggguucagcgcccucgagccccugguggaccugcccaucggcaucaacaucacccgcuuccagacccuccuggcccugcaccgguccuaccucacgccgggggacagcagcuccggcuggaccgcgggcgccgccgccuacuacgugggguaccugcagccccgcaccuuccugcucaaguacaacgagaacggcaccaucacggacgcggucgacugcgcccuggacccccugagcgagaccaagugcacccucaaguccuucaccguggagaaggggaucuaccagacgagcaacuuccgggugcagcccaccgaguccaucguccgcuucccgaacaucaccaaccugugccccuucggcgagguguucaacgccacccgguucgccagcgucuacgccuggaaccgcaagcggaucuccaacugcguggcggacuacagcgugcuguacaacuccgccagcuucuccacguucaagugcuacggcgucagccccaccaagcucaacgaccugugcuucaccaacguguacgccgacuccuucgugauccgcggggacgagguccggcagaucgcccccggccagaccgggaagaucgccgacuacaacuacaagcugccggacgacuucacgggcugcgugaucgcguggaacagcaacaaccucgacuccaaggucgggggcaacuacaacuaccuguaccgccuguuccgcaagagcaaccucaagcccuucgagcgggacaucuccaccgagaucuaccaggccggcagcacccccugcaacgggguggagggcuucaacugcuacuucccccugcaguccuacggguuccagccgaccaacggcgugggguaccagcccuaccggguggucgugcugagcuucgagcuccugcacgcccccgccacggugugcggccccaagaaguccaccaaccuggucaagaacaagugcgugaacuucaacuucaacggccucaccgggaccggcgugcugaccgagagcaacaagaaguuccugccguuccagcaguucgggcgcgacaucgccgacacgaccgacgcgguccgcgacccccagacccuggagauccucgacaucacccccugcagcuucggcgggguguccgugaucacgccgggcaccaacaccagcaaccaggucgccgugcuguaccaggacgugaacugcaccgagguccccguggccauccacgccgaccagcugacgcccaccuggcggguguacuccaccggcagcaacgucuuccagacccgcgccgggugccucaucggcgcggagcacgugaacaacuccuacgagugcgacauccccaucggggccggcaucugcgccagcuaccagacgcagaccaacuccccgcggcgcgcccggagcguggcgucccagagcaucaucgccuacaccaugucccugggcgccgagaacagcgucgccuacuccaacaacagcaucgccauccccaccaacuucacgaucuccgugaccaccgagauccugcccgugagcaugaccaagacgagcgucgacugcaccauguacaucugcggggacuccaccgagugcagcaaccuccugcugcaguacggcuccuucugcacccagcucaaccgcgcgcugacggggaucgccguggagcaggacaagaacacccaggagguguucgcccaggucaagcagaucuacaagacgcccccgaucaaggacugcggcggguucaacuucagccagauccugcccgaccccuccaagcccagcaagcgguccuucaucgaggaccuccuguucaacaaggugacccuggccgacgccggcuucaucaagcaguacggcgacugccucggggacaucgcggcccgcgaccugaucugcgcccagaaguucaacggccugaccgugcucccgccccugcugaccgacgagaugaucgcccaguacaccagcgcccuccuggcggggaccaucacguccggcuggaccuucggggccggcgccgcccugcagauccccuucgcgaugcagauggccuaccgguucaacggcaucggggucacccagaacgugcucuacgagaaccagaagcugaucgccaaccaguucaacagcgccaucggcaagauccaggacucccugagcuccaccgccagcgcgcucgggaagcugcaggacguggucaaccagaacgcccaggcccugaacacgcucgugaagcagcuguccagcaacuucggcgccaucuccagcgugcugaacgacauccucucccgccuggacaaggucgaggccgaggugcagaucgaccggcugaucaccgggcgccuccagagccugcagaccuacgugacccagcagcugauccgggcggccgagauccgcgccagcgccaaccucgccgcgaccaagauguccgagugcguccugggccagagcaagcggguggacuucugcggcaagggguaccaccugauguccuucccccagagcgccccgcacggcguggucuuccuccacgugacguacguccccgcccaggagaagaacuucaccaccgcccccgcgaucugccacgacgggaaggcccacuucccccgcgagggcguguucguguccaacgggacccacugguucgucacgcagcggaacuucuacgagccgcagaucaucaccaccgacaacaccuucgugagcggcaacugcgacguggucaucggcaucgugaacaacacgguguacgacccccugcagcccgagcuggacuccuucaaggaggagcucgacaaguacuucaagaaccacaccagccccgacgucgaccugggggacaucuccggcaucaacgccagcguggugaacauccagaaggagaucgaccgccugaacgaggucgccaagaaccucaacgagucccugaucgaccugcaggagcucgggaaguacgagcaguacaucaaguggccgugguacaucuggcugggcuucaucgccggccugaucgcgaucgugauggugaccaucaugcucugcugcaugaccagcugcugcuccugccugaaggggugcugcagcugcggcuccugcugcaaguucgacgaggacgacagcgagcccguccugaagggggugaagcuccacuacacgugaggacuagucccuguucccagagcccacuuuuuuuucuuuuuuugaaauaaaauagccugucuuucagaucucaaaggcucuuuucagagccaccaaaaaaaaaaaaaaaaaaaaaaaaaaaaaaaaaaaaaaaaaaaaaaaaaaaaaaaaaaaaaaaaaaaaaaaaaaaaaaaaaaaaaaaaaaaaaaaaaaaaa

SEQ ID NO: 12285 - RNA, 4094 nt, Artificial Sequence
  SARS-CoV-2/Tianmen/HBCDC-HB-07/2020__EPI_ISL_412983 spike protein mRNA gc (1-1273)
aggagagucccgcagucggcguccagcggcucugcuuguucgugugugugucguugcaggccuuauucaagcuuaccauguucguguuccugguccuccugccccuggugagcucccagugcgugaaccucaccacccgcacgcagcugccgcccgccuacaccaacagcuucacccggggcgucuacuaccccgacaagguguuccgcuccagcgugcugcacuccacccaggaccucuuccugcccuucuucagcaacgucacgugguuccacgccauccacguguccgggaccaacggcaccaagcgguucgacaacccggugcugcccuucaacgacggggucuacuucgcgagcaccgagaaguccaacaucauccgcggcuggaucuucgggacgacccucgacagcaagacccagucccugcugaucgugaacaacgccaccaacguggucaucaaggugugcgaguuccaguucugcaacgaccccuuccucggcguguacuaccacaagaacaacaagagcuggauggaguccgaguuccgggucuacagcuccgccaacaacugcacguucgaguacgugagccagcccuuccugauggaccuggagggcaagcaggggaacuucaagaaccuccgcgaguucguguucaagaacaucgacggcuacuucaagaucuacuccaagcacaccccgaucaaccugguccgggaccugccccagggguucagcgcccucgagccccugguggaccugcccaucggcaucaacaucacccgcuuccagacccuccuggcccugcaccgguccuaccucacgccgggggacagcagcuccggcuggaccgcgggcgccgccgccuacuacgugggguaccugcagccccgcaccuuccugcucaaguacaacgagaacggcaccaucacggacgcggucgacugcgcccuggacccccugagcgagaccaagugcacccucaaguccuucaccguggagaaggggaucuaccagacgagcaacuuccgggugcagcccaccgaguccaucguccgcuucccgaacaucaccaaccugugccccuucggcgagguguucaacgccacccgguucgccagcgucuacgccuggaaccgcaagcggaucuccaacugcguggcggacuacagcgugcuguacaacuccgccagcuucuccacguucaagugcuacggcgucagccccaccaagcucaacgaccugugcuucaccaacguguacgccgacuccuucgugauccgcggggacgagguccggcagaucgcccccggccagaccgggaagaucgccgacuacaacuacaagcugccggacgacuucacgggcugcgugaucgcguggaacagcaacaaccucgacuccaaggucgggggcaacuacaacuaccuguaccgccuguuccgcaagagcaaccucaagcccuucgagcgggacaucuccaccgagaucuaccaggccggcagcacccccugcaacgggguggagggcuucaacugcuacuucccccugcaguccuacggguuccagccgaccaacggcgugggguaccagcccuaccggguggucgugcugagcuucgagcuccugcacgcccccgccacggugugcggccccaagaaguccaccaaccuggucaagaacaagugcgugaacuucaacuucaacggccucaccgggaccggcgugcugaccgagagcaacaagaaguuccugccguuccagcaguucgggcgcgacaucgccgacacgaccgacgcgguccgcgacccccagacccuggagauccucgacaucacccccugcagcuucggcgggguguccgugaucacgccgggcaccaacaccagcaaccaggucgccgugcuguaccaggaccugaacugcaccgaggugcccgucgccauccacgccgaccagcucacgcccaccuggcggguguacuccaccggcagcaacguguuccagacccgcgccgggugccugaucggcgcggagcacgucaacaacuccuacgagugcgacauccccaucggggccggcaucugcgccagcuaccagacgcagaccaacuccccgcggcgcgcccggagcguggcgucccagagcaucaucgccuacaccaugucccugggcgccgagaacagcguggccuacuccaacaacagcaucgccauccccaccaacuucacgaucuccgucaccaccgagauccuccccgugagcaugaccaagacgagcguggacugcaccauguacaucugcggggacuccaccgagugcagcaaccugcugcuccaguacggcuccuucugcacccagcugaaccgcgcgcugacggggaucgccgucgagcaggacaagaacacccaggagguguucgcccaggugaagcagaucuacaagacgcccccgaucaaggacuucggcggguucaacuucagccagauccuccccgaccccuccaagcccagcaagcgguccuucaucgaggaccugcuguucaacaaggucacccucgccgacgccggcuucaucaagcaguacggcgacugccugggggacaucgcggcccgcgaccugaucugcgcccagaaguucaacggccucaccgugcugccgccccugcucaccgacgagaugaucgcccaguacaccagcgcccugcuggcggggaccaucacguccggcuggaccuucggggccggcgccgcccuccagauccccuucgcgaugcagauggccuaccgguucaacggcaucggggugacccagaacguccuguacgagaaccagaagcugaucgccaaccaguucaacagcgccaucggcaagauccaggacucccucagcuccaccgccagcgcgcuggggaagcugcaggacguggugaaccagaacgcccaggcccucaacacgcuggucaagcagcuguccagcaacuucggcgccaucuccagcgugcucaacgacauccugucccgccuggacaagguggaggccgagguccagaucgaccggcucaucaccgggcgccugcagagccugcagaccuacgugacccagcagcucauccgggcggccgagauccgcgccagcgccaaccuggccgcgaccaagauguccgagugcgugcugggccagagcaagcgggucgacuucugcggcaagggguaccaccucauguccuucccccagagcgccccgcacggcgugguguuccugcacgucacguacgugcccgcccaggagaagaacuucaccaccgcccccgcgaucugccacgacgggaaggcccacuucccccgcgagggcgucuucguguccaacgggacccacugguucgugacgcagcggaacuucuacgagccgcagaucaucaccaccgacaacaccuucgucagcggcaacugcgacguggugaucggcaucgucaacaacacgguguacgacccccugcagcccgagcucgacuccuucaaggaggagcuggacaaguacuucaagaaccacaccagccccgacguggaccugggggacaucuccggcaucaacgccagcgucgugaacauccagaaggagaucgaccgccucaacgagguggccaagaaccugaacgagucccugaucgaccuccaggagcuggggaaguacgagcaguacaucaaguggccgugguacaucuggcugggcuucaucgccggccucaucgcgaucgucauggugaccaucaugcugugcugcaugaccagcugcugcuccugccugaaggggugcugcagcugcggcuccugcugcaaguucgacgaggacgacagcgagcccgugcucaagggggucaagcugcacuacacgugaggacuagucccuguucccagagcccacuuuuuuuucuuuuuuugaaauaaaauagccugucuuucagaucucaaaggcucuuuucagagccaccaaaaaaaaaaaaaaaaaaaaaaaaaaaaaaaaaaaaaaaaaaaaaaaaaaaaaaaaaaaaaaaaaaaaaaaaaaaaaaaaaaaaaaaaaaaaaaaaaaaaa

SEQ ID NO: 12286 - RNA, 4094 nt, Artificial Sequence
  SARS-CoV-2/Hong Kong/case42_VM20002493/2020__EPI_ISL_414527 spike protein mRNA gc (1-1273)
aggagagucccgcagucggcguccagcggcucugcuuguucgugugugugucguugcaggccuuauucaagcuuaccauguucguguuccugguccuccugccccuggugagcucccagugcgugaaccucaccacccgcacgcagcugccgcccgccuacaccaacagcuucacccggggcgucuacuaccccgacaagguguuccgcuccagcgugcugcacuccacccaggaccucuuccugcccuucuucagcaacgucacgugguuccacgccauccacguguccgggaccaacggcaccaagcgguucgacaacccggugcugcccuucaacgacggggucuacuucgcgagcaccgagaaguccaacaucauccgcggcuggaucuucgggacgacccucgacagcaagacccagucccugcugaucgugaacaacgccaccaacguggucaucaaggugugcgaguuccaguucugcaacgaccccuuccucggcguguacuaccacaagaacaacaagagcuggauggaguccgaguuccgggucuacagcuccgccaacaacugcacguucgaguacgugagccagcccuuccugauggaccuggagggcaagcaggggaacuucaagaaccuccgcgaguucguguucaagaacaucgacggcuacuucaagaucuacuccaagcacaccccgaucaaccugguccgggaccugccccagggguucagcgcccucgagccccugguggaccugcccaucggcaucaacaucacccgcuuccagacccuccuggcccugcaccgguccuaccucacgccgggggacagcagcuccggcuggaccgcgggcgccgccgccuacuacgugggguaccugcagccccgcaccuuccugcucaaguacaacgagaacggcaccaucacggacgcggucgacugcgcccuggacccccugagcgagaccaagugcacccucaaguccuucaccguggagaaggggaucuaccagacgagcaacuuccgggugcagcccaccgaguccaucguccgcuucccgaacaucaccaaccugugccccuucggcgagguguucaacgccacccgguucgccagcgucuacgccuggaaccgcaagcggaucuccaacugcguggcggacuacagcgugcuguacaacuccgccagcuucuccacguucaagugcuacggcgucagccccaccaagcucaacgaccugugcuucaccaacguguacgccgacuccuucgugauccgcggggacgagguccggcagaucgcccccggccagaccgggaagaucgccgacuacaacuacaagcugccggacgacuucacgggcugcgugaucgcguggaacagcaacaaccucgacuccaaggucgggggcaacuacaacuaccuguaccgccuguuccgcaagagcaaccucaagcccuucgagcgggacaucuccaccgagaucuaccaggccggcagcacccccugcaacgggguggagggcuucaacugcuacuucccccugcaguccuacggguuccagccgaccaacggcgugggguaccagcccuaccggguggucgugcugagcuucgagcuccugcacgcccccgccacggugugcggccccaagaaguccaccaaccuggucaagaacaagugcgugaacuucaacuucaacggccucaccgggaccggcgugcugaccgagagcaacaagaaguuccugccguuccagcaguucgggcgcgacaucgccgacacgaccgacgcgguccgcgacccccagacccuggagauccucgacaucacccccugcagcuucggcgggguguccgugaucacgccgggcaccaacaccagcaaccaggucgccgugcuguaccaggacgugaacugcaccgagguccccguggccauccacgccgaccagcugacgcccaccuggcggguguacuccaccggcagcaacgucuuccagacccgcgccgggugccucaucggcgcggagcacgugaacaacuccuacgagugcgacauccccaucggggccggcaucugcgccagcuaccagacgcagaccaacuccccgcggcgcgcccggagcguggcgucccagagcaucaucgccuacaccaugucccugggcgccgagaacagcgucgccuacuccaacaacagcaucgccauccccaccaacuucgcgaucuccgugacgaccgagauccugcccgugagcaugaccaagaccagcgucgacugcacgauguacaucugcggggacuccaccgagugcagcaaccuccugcugcaguacggcuccuucugcacccagcucaaccgcgcccugaccgggaucgccguggagcaggacaagaacacgcaggagguguucgcccaggucaagcagaucuacaagacgcccccgaucaaggacuucggcggguucaacuucagccagauccugcccgaccccuccaagcccagcaagcgguccuucaucgaggaccuccuguucaacaaggugacccuggccgacgcgggcuucaucaagcaguacggcgacugccucggggacaucgccgcccgcgaccugaucugcgcccagaaguucaacggccugaccgugcucccgccccugcugaccgacgagaugaucgcccaguacaccagcgcgcuccuggccgggaccaucaccuccggcuggacguucggggccggcgccgcgcugcagauccccuucgccaugcagauggccuaccgguucaacggcaucggggucacccagaacgugcucuacgagaaccagaagcugaucgccaaccaguucaacagcgccaucggcaagauccaggacucccugagcuccaccgcgagcgcccucgggaagcugcaggacguggucaaccagaacgcccaggcccugaacacccucgugaagcagcuguccagcaacuucggcgccaucuccagcgugcugaacgacauccucucccgccuggacaaggucgaggcggaggugcagaucgaccggcugaucacggggcgccuccagagccugcagaccuacgugacccagcagcugauccgggccgccgagauccgcgccagcgccaaccucgcggccaccaagauguccgagugcguccugggccagagcaagcggguggacuucugcggcaagggguaccaccugauguccuucccccagagcgccccgcacggcguggucuuccuccacgugaccuacguccccgcccaggagaagaacuucacgaccgcgcccgccaucugccacgacgggaaggcccacuucccccgcgagggcguguucguguccaacgggacccacugguucgucacccagcggaacuucuacgagccgcagaucaucacgaccgacaacaccuucgugagcggcaacugcgacguggucaucggcaucgugaacaacaccguguacgacccccugcagcccgagcuggacuccuucaaggaggagcucgacaaguacuucaagaaccacacgagccccgacgucgaccugggggacaucuccggcaucaacgccagcguggugaacauccagaaggagaucgaccgccugaacgaggucgccaagaaccucaacgagucccugaucgaccugcaggagcucgggaaguacgagcaguacaucaaguggccgugguacaucuggcugggcuucaucgcgggccugaucgccaucgugauggugaccaucaugcucugcugcaugaccagcugcugcuccugccugaaggggugcugcagcugcggcuccugcugcaaguucgacgaggacgacagcgagcccguccugaagggggugaagcuccacuacaccugaggacuagucccuguucccagagcccacuuuuuuuucuuuuuuugaaauaaaauagccugucuuucagaucucaaaggcucuuuucagagccaccaaaaaaaaaaaaaaaaaaaaaaaaaaaaaaaaaaaaaaaaaaaaaaaaaaaaaaaaaaaaaaaaaaaaaaaaaaaaaaaaaaaaaaaaaaaaaaaaaaaaa

SEQ ID NO: 12287 - RNA, 4094 nt, Artificial Sequence
  SARS-CoV-2/USA/CruiseA-23/2020__EPI_ISL_414482 spike protein mRNA gc (1-1273)
aggagagucccgcagucggcguccagcggcucugcuuguucgugugugugucguugcaggccuuauucaagcuuaccauguucguguuccugguccuccugccccuggugagcucccagugcgugaaccucaccacccgcacgcagcugccgcccgccuacaccaacagcuucacccggggcgucuacuaccccgacaagguguuccgcuccagcgugcugcacuccacccaggaccucuuccugcccuucuucagcaacgucacgugguuccacgccauccacguguccgggaccaacggcaccaagcgguucgacaacccggugcugcccuucaacgacggggucuacuucgcgagcaccgagaaguccaacaucauccgcggcuggaucuucgggacgacccucgacagcaagacccagucccugcugaucgugaacaacgccaccaacguggucaucaaggugugcgaguuccaguucugcaacgaccccuuccucggcguguacuaccacaagaacaacaagagcuggauggaguccgaguuccgggucuacagcuccgccaacaacugcacguucgaguacgugagccagcccuuccugauggaccuggaggugaagcagggcaacuucaagaaccuccgcgaguucgucuucaagaacaucgacggguacuucaagaucuacuccaagcacaccccgaucaaccuggugcgggaccugccccagggcuucagcgcccucgagccccugguggaccugcccaucgggaucaacaucacccgcuuccagacccuccuggcccugcaccgguccuaccucacgccgggcgacagcagcuccggguggaccgcgggcgccgccgccuacuacgucggcuaccugcagccccgcaccuuccugcucaaguacaacgagaacgggaccaucacggacgcgguggacugcgcccuggacccccugagcgagaccaagugcacccucaaguccuucaccguggagaagggcaucuaccagacgagcaacuuccggguccagcccaccgaguccaucgugcgcuucccgaacaucaccaaccugugccccuucggggaggucuucaacgccacccgguucgccagcguguacgccuggaaccgcaagcggaucuccaacugcguggcggacuacagcguccuguacaacuccgccagcuucuccacguucaagugcuacggcgugagccccaccaagcucaacgaccugugcuucaccaacguguacgccgacuccuucgucauccgcggcgacgaggugcggcagaucgcccccgggcagaccggcaagaucgccgacuacaacuacaagcugccggacgacuucacggggugcgugaucgcguggaacagcaacaaccucgacuccaaggucggcgggaacuacaacuaccuguaccgccuguuccgcaagagcaaccucaagcccuucgagcgggacaucuccaccgagaucuaccaggccggcagcacccccugcaacggcguggagggguucaacugcuacuucccccugcaguccuacggcuuccagccgaccaacggggugggcuaccagcccuaccgggucguggugcugagcuucgagcuccugcacgcccccgccacggucugcgggcccaagaaguccaccaaccuggugaagaacaagugcgugaacuucaacuucaacggccucaccggcaccgggguccugaccgagagcaacaagaaguuccugccguuccagcaguucggccgcgacaucgccgacacgaccgacgcggugcgcgacccccagacccuggagauccucgacaucacccccugcagcuucgggggcguguccgucaucacgccggggaccaacaccagcaaccagguggccgugcuguaccaggacgucaacugcaccgaggugcccguggccauccacgccgaccagcugacgcccaccuggcgggucuacuccaccggcagcaacguguuccagacccgcgccggcugccucaucggggcggagcacgugaacaacuccuacgagugcgacauccccaucggcgccgggaucugcgccagcuaccagacgcagaccaacuccccgcggcgcgcccggagcgucgcgucccagagcaucaucgccuacaccaugucccugggcgccgagaacagcguggccuacuccaacaacagcaucgccauccccaccaacuucacgaucuccgugaccaccgagauccugcccgucagcaugaccaagacgagcguggacugcaccauguacaucugcggcgacuccaccgagugcagcaaccuccugcugcaguacggguccuucugcacccagcucaaccgcgcgcugacgggcaucgccguggagcaggacaagaacacccaggaggucuucgcccaggugaagcagaucuacaagacgcccccgaucaaggacuucgggggcuucaacuucagccagauccugcccgaccccuccaagcccagcaagcgguccuucaucgaggaccuccuguucaacaaggugacccuggccgacgccggguucaucaagcaguacggcgacugccucggcgacaucgcggcccgcgaccugaucugcgcccagaaguucaacgggcugaccguccucccgccccugcugaccgacgagaugaucgcccaguacaccagcgcccuccuggcgggcaccaucacguccggguggaccuucggcgccggggccgcccugcagauccccuucgcgaugcagauggccuaccgguucaacggcaucggcgugacccagaacgugcucuacgagaaccagaagcugaucgccaaccaguucaacagcgccaucgggaagauccaggacucccugagcuccaccgccagcgcgcucggcaagcugcaggacgucgugaaccagaacgcccaggcccugaacacgcucgugaagcagcuguccagcaacuucggggccaucuccagcguccugaacgacauccucucccgccuggacaagguggaggccgaggugcagaucgaccggcugaucaccggccgccuccagagccugcagaccuacgucacccagcagcugauccgggcggccgagauccgcgccagcgccaaccucgccgcgaccaagauguccgagugcgugcuggggcagagcaagcggguggacuucugcggcaagggcuaccaccugauguccuucccccagagcgccccgcacggggucguguuccuccacgucacguacgugcccgcccaggagaagaacuucaccaccgcccccgcgaucugccacgacggcaaggcccacuucccccgcgaggggguguucgucuccaacggcacccacugguucgugacgcagcggaacuucuacgagccgcagaucaucaccaccgacaacaccuucgugagcgggaacugcgacgucgugaucggcaucgugaacaacacggucuacgacccccugcagcccgagcuggacuccuucaaggaggagcucgacaaguacuucaagaaccacaccagccccgacguggaccugggcgacaucuccgggaucaacgccagcguggucaacauccagaaggagaucgaccgccugaacgagguggccaagaaccucaacgagucccugaucgaccugcaggagcucggcaaguacgagcaguacaucaaguggccgugguacaucuggcugggguucaucgccggccugaucgcgaucgugauggucaccaucaugcucugcugcaugaccagcugcugcuccugccugaagggcugcugcagcugcggguccugcugcaaguucgacgaggacgacagcgagcccgugcugaagggcgugaagcuccacuacacgugaggacuagucccuguucccagagcccacuuuuuuuucuuuuuuugaaauaaaauagccugucuuucagaucucaaaggcucuuuucagagccaccaaaaaaaaaaaaaaaaaaaaaaaaaaaaaaaaaaaaaaaaaaaaaaaaaaaaaaaaaaaaaaaaaaaaaaaaaaaaaaaaaaaaaaaaaaaaaaaaaaaaa

SEQ ID NO: 12288 - RNA, 4094 nt, Artificial Sequence
  SARS-CoV-2/Hong Kong/case85_VM20002868/2020__EPI_ISL_414519 spike protein mRNA gc (1-1273)
aggagagucccgcagucggcguccagcggcucugcuuguucgugugugugucguugcaggccuuauucaagcuuaccauguucguguuccugguccucgugccccuggugagcucccagugcgucaaccugaccacccgcacgcagcucccgcccgccuacaccaacagcuucacccggggcguguacuaccccgacaagguguuccgcuccagcguccugcacuccacccaggaccuguuccuccccuucuucagcaacgugacgugguuccacgccauccacguguccgggaccaacggcaccaagcgguucgacaacccgguccugcccuucaacgacgggguguacuucgcgagcaccgagaaguccaacaucauccgcggcuggaucuucgggacgacccuggacagcaagacccagucccuccugaucgugaacaacgccaccaacgucgugaucaaggugugcgaguuccaguucugcaacgaccccuuccugggcgucuacuaccacaagaacaacaagagcuggauggaguccgaguuccggguguacagcuccgccaacaacugcacguucgaguacgugagccagcccuuccucauggaccuggagggcaagcaggggaacuucaagaaccugcgcgaguucgucuucaagaacaucgacggcuacuucaagaucuacuccaagcacaccccgaucaaccucgugcgggaccugccccagggguucagcgcccuggagccccucguggaccugcccaucggcaucaacaucacccgcuuccagacccugcucgcccugcaccgguccuaccugacgccgggggacagcagcuccggcuggaccgcgggcgccgccgccuacuacgucggguaccuccagccccgcaccuuccugcugaaguacaacgagaacggcaccaucacggacgcgguggacugcgcccucgacccccugagcgagaccaagugcacccugaaguccuucaccguggagaaggggaucuaccagacgagcaacuuccggguccagcccaccgaguccaucgugcgcuucccgaacaucaccaaccucugccccuucggcgaggucuucaacgccacccgguucgccagcguguacgccuggaaccgcaagcggaucuccaacugcguggcggacuacagcguccuguacaacuccgccagcuucuccacguucaagugcuacggcgugagccccaccaagcugaacgaccucugcuucaccaacguguacgccgacuccuucgucauccgcggggacgaggugcggcagaucgcccccggccagaccgggaagaucgccgacuacaacuacaagcugccggacgacuucacgggcugcgugaucgcguggaacagcaacaaccuggacuccaaggucgggggcaacuacaacuaccucuaccgccuguuccgcaagagcaaccugaagcccuucgagcgggacaucuccaccgagaucuaccaggccggcagcacccccugcaacgggguggagggcuucaacugcuacuucccccuccaguccuacggguuccagccgaccaacggcgugggguaccagcccuaccgggucguggugcugagcuucgagcugcuccacgcccccgccacggucugcggccccaagaaguccaccaaccuggugaagaacaagugcgugaacuucaacuucaacggccugaccgggaccggcguccucaccgagagcaacaagaaguuccugccguuccagcaguucgggcgcgacaucgccgacacgaccgacgcggugcgcgacccccagacccuggagauccuggacaucacccccugcagcuucggcgggguguccgucaucacgccgggcaccaacaccagcaaccagguggccgugcucuaccaggacgucaacugcaccgaggugcccguggccauccacgccgaccagcugacgcccaccuggcgggucuacuccaccggcagcaacguguuccagacccgcgccgggugccugaucggcgcggagcacgugaacaacuccuacgagugcgacauccccaucggggccggcaucugcgccagcuaccagacgcagaccaacuccccgcggcgcgcccggagcgucgcgucccagagcaucaucgccuacaccaugucccucggcgccgagaacagcguggccuacuccaacaacagcaucgccauccccaccaacuucacgaucuccgugaccaccgagauccugcccgucagcaugaccaagacgagcguggacugcaccauguacaucugcggggacuccaccgagugcagcaaccugcuccugcaguacggcuccuucugcacccagcugaaccgcgcgcucacggggaucgccguggagcaggacaagaacacccaggaggucuucgcccaggugaagcagaucuacaagacgcccccgaucaaggacuucggcggguucaacuucagccagauccugcccgaccccuccaagcccagcaagcgguccuucaucgaggaccuccuguucaacaaggugacccuggccgacgccggcuucaucaagcaguacggcgacugccugggggacaucgcggcccgcgaccucaucugcgcccagaaguucaacggccugaccguccugccgccccuccugaccgacgagaugaucgcccaguacaccagcgcccugcucgcggggaccaucacguccggcuggaccuucggggccggcgccgcccugcagauccccuucgcgaugcagauggccuaccgguucaacggcaucggggugacccagaacgugcuguacgagaaccagaagcucaucgccaaccaguucaacagcgccaucggcaagauccaggacucccugagcuccaccgccagcgcgcuggggaagcuccaggacgucgugaaccagaacgcccaggcccugaacacgcuggugaagcagcucuccagcaacuucggcgccaucuccagcguccugaacgacauccugucccgccucgacaagguggaggccgaggugcagaucgaccggcugaucaccgggcgccugcagagccuccagaccuacgucacccagcagcugauccgggcggccgagauccgcgccagcgccaaccuggccgcgaccaagauguccgagugcgugcucggccagagcaagcggguggacuucugcggcaagggguaccaccugauguccuucccccagagcgccccgcacggcgucguguuccugcacgucacguacgugcccgcccaggagaagaacuucaccaccgcccccgcgaucugccacgacgggaaggcccacuucccccgcgagggcguguucgucuccaacgggacccacugguucgugacgcagcggaacuucuacgagccgcagaucaucaccaccgacaacaccuucgugagcggcaacugcgacgucgugaucggcaucgugaacaacacggucuacgacccccuccagcccgagcuggacuccuucaaggaggagcuggacaaguacuucaagaaccacaccagccccgacguggaccucggggacaucuccggcaucaacgccagcguggucaacauccagaaggagaucgaccgccugaacgagguggccaagaaccugaacgagucccucaucgaccugcaggagcuggggaaguacgagcaguacaucaaguggccgugguacaucuggcucggcuucaucgccggccugaucgcgaucgugauggucaccaucaugcugugcugcaugaccagcugcugcuccugccucaaggggugcugcagcugcggcuccugcugcaaguucgacgaggacgacagcgagcccgugcugaagggggugaagcugcacuacacgugaggacuagucccuguucccagagcccacuuuuuuuucuuuuuuugaaauaaaauagccugucuuucagaucucaaaggcucuuuucagagccaccaaaaaaaaaaaaaaaaaaaaaaaaaaaaaaaaaaaaaaaaaaaaaaaaaaaaaaaaaaaaaaaaaaaaaaaaaaaaaaaaaaaaaaaaaaaaaaaaaaaaa

SEQ ID NO: 12289 - RNA, 4094 nt, Artificial Sequence
  SARS-CoV-2/England/200990660/2020__EPI_ISL_414523 spike protein mRNA gc (1-1273)
aggagagucccgcagucggcguccagcggcucugcuuguucgugugugugucguugcaggccuuauucaagcuuaccauguucguguuccugguccuccugccccuggugagcucccagugcgugaaccucaccacccgcacgcagcugccgcccgccuacaccaacagcuucacccggggcgucuacuaccccgacaagguguuccgcuccagcgugcugcacuccacccaggaccucuuccugcccuucuucagcaacgucacgugguuccacgccauccacguguccgggaccaacggcaccaagcgguucgacaacccggugcugcccuucaacgacggggucuacuucgcgagcaccgagaaguccaacaucauccgcggcuggaucuucgggacgacccucgacagcaagacccagucccugcugaucgugaacaacgccaccaacguggucaucaaggugugcgaguuccaguucugcaacgaccccuuccucggcguguacuaccacaagaacaacaagagcuggauggaguccgaguuccgggucuacagcuccgccaacaacugcacguucgaguacgugagccagcccuuccugauggaccuggagggcaagcaggggaacuucaagaaccuccgcgaguucguguucaagaacaucgacggcuacuucaagaucuacuccaagcacaccccgaucaaccugguccgggaccugccccagggguucagcgcccucgagccccugguggaccugcccaucggcaucaacaucacccgcuuccagacccuccuggcccugcaccgguccuaccucacgccgggggacagcagcuccggcuggaccgcgggcgccgccgccuacuacgugggguaccugcagccccgcaccuuccugcucaaguacaacgagaacggcaccaucacggacgcggucgacugcgcccuggacccccugagcgagaccaagugcacccucaaguccuucaccguggagaaggggaucuaccagacgagcaacuuccgggugcagcccaccgaguccaucguccgcuucccgaacaucaccaaccugugccccuucggcgagguguucaacgccacccgguucgccagcgucuacgccuggaaccgcaagcggaucuccaacugcguggcggacuacagcgugcuguacaacuccgccagcuucuccacguucaagugcuacggcgucagccccaccaagcucaacgaccugugcuucaccaacguguacgccgacuccuucgugauccgcggggacgagguccggcagaucgcccccggccagaccgggaagaucgccgacuacaacuacaagcugccggacgacuucacgggcugcgugaucgcguggaacagcaacaaccucgacuccaaggucgggggcaacuacaacuaccuguaccgccuguuccgcaagagcaaccucaagcccuucgagcgggacaucuccaccgagaucuaccaggccggcagcacccccugcaacgggguggagggcuucaacugcuacuucccccugcaguccuacggguuccagccgaccaacggcgugggguaccagcccuaccggguggucgugcugagcuucgagcuccugcacgcccccgccacggugugcggccccaagaaguccaccaaccuggucaagaacaagugcgugaacuucaacuucaacggccucaccgggaccggcgugcugaccgagagcaacaagaaguuccugccguuccagcaguucgggcgcgacaucgccgacacgaccgacgcgguccgcgacccccagacccuggagauccucgacaucacccccugcagcuucggcgggguguccgugaucacgccgggcaccaacaccagcaaccaggucgccgugcuguaccagggcgugaacugcaccgagguccccguggccauccacgccgaccagcugacgcccaccuggcggguguacuccaccgggagcaacgucuuccagacccgcgccggcugccucaucggggcggagcacgugaacaacuccuacgagugcgacauccccaucggcgccggcaucugcgccagcuaccagacgcagaccaacuccccgcggcgcgcccggagcguggcgucccagagcaucaucgccuacaccaugucccugggggccgagaacagcgucgccuacuccaacaacagcaucgccauccccaccaacuucacgaucuccgugaccaccgagauccugcccgugagcaugaccaagacgagcgucgacugcaccauguacaucugcggcgacuccaccgagugcagcaaccuccugcugcaguacggguccuucugcacccagcucaaccgcgcgcugacgggcaucgccguggagcaggacaagaacacccaggagguguucgcccaggucaagcagaucuacaagacgcccccgaucaaggacuucgggggcuucaacuucagccagauccugcccgaccccuccaagcccagcaagcgguccuucaucgaggaccuccuguucaacaaggugacccuggccgacgccggcuucaucaagcaguacggggacugccucggcgacaucgcggcccgcgaccugaucugcgcccagaaguucaacgggcugaccgugcucccgccccugcugaccgacgagaugaucgcccaguacaccagcgcccuccuggcgggcaccaucacguccggguggaccuucggcgccggcgccgcccugcagauccccuucgcgaugcagauggccuaccgguucaacgggaucggcgucacccagaacgugcucuacgagaaccagaagcugaucgccaaccaguucaacagcgccaucgggaagauccaggacucccugagcuccaccgccagcgcgcucggcaagcugcaggacguggucaaccagaacgcccaggcccugaacacgcucgugaagcagcuguccagcaacuucggggccaucuccagcgugcugaacgacauccucucccgccuggacaaggucgaggccgaggugcagaucgaccggcugaucaccggccgccuccagagccugcagaccuacgugacccagcagcugauccgggcggccgagauccgcgccagcgccaaccucgccgcgaccaagauguccgagugcguccugggccagagcaagcggguggacuucugcgggaagggcuaccaccugauguccuucccccagagcgccccgcacgggguggucuuccuccacgugacguacguccccgcccaggagaagaacuucaccaccgcccccgcgaucugccacgacggcaaggcccacuucccccgcgaggggguguucguguccaacggcacccacugguucgucacgcagcggaacuucuacgagccgcagaucaucaccaccgacaacaccuucgugagcggcaacugcgacguggucaucgggaucgugaacaacacgguguacgacccccugcagcccgagcuggacuccuucaaggaggagcucgacaaguacuucaagaaccacaccagccccgacgucgaccugggcgacaucuccgggaucaacgccagcguggugaacauccagaaggagaucgaccgccugaacgaggucgccaagaaccucaacgagucccugaucgaccugcaggagcucggcaaguacgagcaguacaucaaguggccgugguacaucuggcugggcuucaucgccgggcugaucgcgaucgugauggugaccaucaugcucugcugcaugaccagcugcugcuccugccugaagggcugcugcagcugcggguccugcugcaaguucgacgaggacgacagcgagcugguccucaagggcgugaagcugcacuacacgugaggacuagucccuguucccagagcccacuuuuuuuucuuuuuuugaaauaaaauagccugucuuucagaucucaaaggcucuuuucagagccaccaaaaaaaaaaaaaaaaaaaaaaaaaaaaaaaaaaaaaaaaaaaaaaaaaaaaaaaaaaaaaaaaaaaaaaaaaaaaaaaaaaaaaaaaaaaaaaaaaaaaa

SEQ ID NO: 12290 - RNA, 4094 nt, Artificial Sequence
  SARS-CoV-2/Australia/NSW09/2020__EPI_ISL_413595 spike protein mRNA gc (1-1273)
aggagagucccgcagucggcguccagcggcucugcuuguucgugugugugucguugcaggccuuauucaagcuuaccauguucguguuccugguccuccugccccuggugagcucccagugcgugaaccucaccacccgcacgcagcugccgcccgccuacaccaacagcuucacccggggcgucuacuaccccgacaagguguuccgcuccagcgugcugcacuccacccaggaccucuuccugcccuucuucagcaacgucacgugguuccacgccauccacguguccgggaccaacggcaccaagcgguucgacaacccggugcugcccuucaacgacggggucuacuucgcgagcaccgagaaguccaacaucauccgcggcuggaucuucgggacgacccucgacagcaagacccagucccugcugaucgugaacaacgccaccaacguggucaucaaggugugcgaguuccaguucugcaacgaccccuuccucggcguguacuaccacaagaacaacaagagcuggauggaguccgaguuccgggucuacagcuccgccaacaacugcacguucgaguacgugagccagcccuuccugauggaccuggagggcaagcaggggaacuucaagaaccuccgcgaguucguguucaagaacaucgacggcuacuucaagaucuacuccaagcacaccccgaucaaccugguccgggaccugccccagggguucagcgcccucgagccccugguggaccugcccaucggcaucaacaucacccgcuuccagacccuccuggcccugcaccgguccuaccucacgccgggggacagcagcuccggcuggaccgcgggcgccgccgccuacuacgugggguaccugcagccccgcaccuuccugcucaaguacaacgagaacggcaccaucacggacgcggucgacugcgcccuggacccccugagcgagaccaagugcacccucaaguccuucaccguggagaaggggaucuaccagacgagcaacuuccgggugcagcccaccgaguccaucguccgcuucccgaacaucaccaaccugugccccuucggcgagguguucaacgccacccgguucgccagcgucuacgccuggaaccgcaagcggaucuccaacugcguggcggacuacagcgugcuguacaacuccgccagcuucuccacguucaagugcuacggcgucagccccaccaagcucaacgaccugugcuucaccaacguguacgccgacuccuucgugauccgcggggacgagguccggcagaucgcccccggccagaccgggaagaucgccgacuacaacuacaagcugccggacgacuucacgggcugcgugaucgcguggaacagcaacaaccucgacuccaaggucgggggcaacuacaacuaccuguaccgccuguuccgcaagagcaaccucaagcccuucgagcgggacaucuccaccgagaucuaccaggccggcagcacccccugcaacgggguggagggcuucaacugcuacuucccccugcaguccuacggguuccagccgaccaacggcgugggguaccagcccuaccggguggucgugcugagcuucgagcuccugcacgcccccgccacggugugcggccccaagaaguccaccaaccuggucaagaacaagugcgugaacuucaacuucaacggccucaccgggaccggcgugcugaccgagagcaacaagaaguuccugccguuccagcaguucgggcgcgacaucgccgacacgaccgacgcgguccgcgacccccagacccuggagauccucgacaucacccccugcagcuucggcgggguguccgugaucacgccgggcaccaacaccagcaaccaggucgccgugcuguaccaggacgugaacugcaccgagguccccguggccauccacgccgaccagcugacgcccaccuggcggguguacuccaccggcagcaacgucuuccagacccgcgccgggugccucaucggcgcggagcacgugaacaacuccuacgagugcgacauccccaucggggccggcaucugcgccagcuaccagacgcagaccaacuccccgcggcgcgcccggagcguggcgucccagagcaucaucgccuacaccaugucccugggcgccgagaacagcgucgccuacuccaacaacagcaucgccauccccaccaacuucacgaucuccgugaccaccgagauccugcccgugagcaugaccaagacgagcgucgacugcaccauguacaucugcggggacuccaccgagugcagcaaccuccugcugcaguacggcuccuucugcacccagcucaaccgcgcgcugacggggaucgccguggagcaggacaagaacacccaggagguguucgcccaggucaagcagaucuacaagacgcccccgaucaaggacuucggcggguucaacuucagccagauccugcccgaccccuccaagcccagcaagcgguccuucaucgaggaccuccuguucaacaaggugacccuggccgacgccggcuucaucaagcaguacggcgacugccucggggacaucgcggcccgcgaccugaucugcgcccagaaguucaacggccugaccgugcucccgccccugcugaccgacgagaugaucgcccaguacaccagcgcccuccuggcggggaccaucacguccggcuggaccuucggggccggcgccgcccugcagauccccuucgcgaugcagauggccuaccgguucaacggcaucggggucacccagaacgugcucuacgagaaccagaagcugaucgccaaccaguucaacagcgccaucggcaagauccaggacucccugagcuucaccgccuccgcgcucgggaagcugcaggacguggucaaccagaacgcccaggcccugaacacgcucgugaagcagcugagcuccaacuucggcgccaucagcuccgugcugaacgacauccucagccgccuggacaaggucgaggccgaggugcagaucgaccggcugaucaccgggcgccuccagucccugcagaccuacgugacccagcagcugauccgggcggccgagauccgcgccagcgccaaccucgccgcgaccaagaugagcgagugcguccugggccaguccaagcggguggacuucugcggcaagggguaccaccugaugagcuucccccaguccgccccgcacggcguggucuuccuccacgugacguacguccccgcccaggagaagaacuucaccaccgcccccgcgaucugccacgacgggaaggcccacuucccccgcgagggcguguucgugagcaacgggacccacugguucgucacgcagcggaacuucuacgagccgcagaucaucaccaccgacaacaccuucguguccggcaacugcgacguggucaucggcaucgugaacaacacgguguacgacccccugcagcccgagcuggacagcuucaaggaggagcucgacaaguacuucaagaaccacaccucccccgacgucgaccugggggacaucagcggcaucaacgccuccguggugaacauccagaaggagaucgaccgccugaacgaggucgccaagaaccucaacgagagccugaucgaccugcaggagcucgggaaguacgagcaguacaucaaguggccgugguacaucuggcugggcuucaucgccggccugaucgcgaucgugauggugaccaucaugcucugcugcaugaccuccugcugcagcugccugaaggggugcugcuccugcggcagcugcugcaaguucgacgaggacgacuccgagcccguccugaagggggugaagcuccacuacacgugaggacuagucccuguucccagagcccacuuuuuuuucuuuuuuugaaauaaaauagccugucuuucagaucucaaaggcucuuuucagagccaccaaaaaaaaaaaaaaaaaaaaaaaaaaaaaaaaaaaaaaaaaaaaaaaaaaaaaaaaaaaaaaaaaaaaaaaaaaaaaaaaaaaaaaaaaaaaaaaaaaaaa

SEQ ID NO: 12291 - RNA, 4094 nt, Artificial Sequence
  SARS-CoV-2/Australia/NSW10/2020__EPI_ISL_413596 spike protein mRNA gc (1-1273)
aggagagucccgcagucggcguccagcggcucugcuuguucgugugugugucguugcaggccuuauucaagcuuaccauguucguguuccugguccuccugccccuggugagcucccagugcgugaaccucaccacccgcacgcagcugccgcccgccuacaccaacagcuucacccggggcgucuacuaccccgacaagguguuccgcuccagcgugcugcacuccacccaggaccucuuccugcccuucuucagcaacgucacgugguuccacgccauccacguguccgggaccaacggcaccaagcgguucgacaacccggugcugcccuucaacgacggggucuacuucgcgagcaccgagaaguccaacaucauccgcggcuggaucuucgggacgacccucgacagcaagacccagucccugcugaucgugaacaacgccaccaacguggucaucaaggugugcgaguuccaguucugcaacgaccccuuccucggcguguacuaccacaagaacaacaagagcuggauggaguccgaguuccgggucuacagcuccgccaacaacugcacguucgaguacgugagccagcccuuccugauggaccuggagggcaagcaggggaacuucaagaaccuccgcgaguucguguucaagaacaucgacggcuacuucaagaucuacuccaagcacaccccgaucaaccugguccgggaccugccccagggguucagcgcccucgagccccugguggaccugcccaucggcaucaacaucacccgcuuccagacccuccuggcccugcaccgguccuaccucacgccgggggacagcagcuccggcuggaccgcgggcgccgccgccuacuacgugggguaccugcagccccgcaccuuccugcucaaguacaacgagaacggcaccaucacggacgcggucgacugcgcccuggacccccugagcgagaccaagugcacccucaaguccuucaccguggagaaggggaucuaccagacgagcaacuuccgggugcagcccaccgaguccaucguccgcuucccgaacaucaccaaccugugccccuucggcgagguguucaacgccacccgguucgccagcgucuacgccuggaaccgcaagcggaucuccaacugcguggcggacuacagcgugcuguacaacuccgccagcuucuccacguucaagugcuacggcgucagccccaccaagcucaacgaccugugcuucaccaacguguacgccgacuccuucgugauccgcggggacgagguccggcagaucgcccccggccagaccgggaagaucgccgacuacaacuacaagcugccggacgacuucacgggcugcgugaucgcguggaacagcaacaaccucgacuccaaggucgggggcaacuacaacuaccuguaccgccuguuccgcaagagcaaccucaagcccuucgagcgggacaucuccaccgagaucuaccaggccggcagcacccccugcaacgggguggagggcuucaacugcuacuucccccugcaguccuacggguuccagccgaccaacggcgugggguaccagcccuaccggguggucgugcugagcuucgagcuccugcacgcccccgccacggugugcggccccaagaaguccaccaaccuggucaagaacaagugcgugaacuucaacuucaacggccucaccgggaccggcgugcugaccgagagcaacaagaaguuccugccguuccagcaguucgggcgcgacaucgccgacacgaccgacgcgguccgcgacccccagacccuggagauccucgacaucacccccugcagcuucggcgggguguccgugaucacgccgggcaccaacaccagcaaccaggucgccgugcuguaccaggacgugaacugcaccgagguccccguggccauccacgccgaccagcugacgcccaccuggcggguguacuccaccggcagcaacgucuuccagacccgcgccgggugccucaucggcgcggagcacgugaacaacuccuacgagugcgacauccccaucggggccggcaucugcgccagcuaccagacgcagaccaacuccccgcggcgcgcccggagcguggcgucccagagcaucaucgccuacaccaugucccugggcgccgagaacagcgucgccuacuccaacaacagcaucgccauccccaccaacuucacgaucuccgugaccaccgagauccugcccgugagcaugaccaagacgagcgucgacugcaccauguacaucugcggggacuccaccgagugcagcaaccuccugcugcaguacggcuccuucugcacccagcucaaccgcgcgcugacggggaucgccguggagcaggacaagaacacccaggagguguucgcccaggucaagcagaucuacaagacgcccccgaucaaggacuucggcggguucaacuucagccagauccugcccgaccccuccaagcccagcaagcgguccuucaucgaggaccuccuguucaacaaggugacccuggccgacgccggcuucaucaagcaguacggcgacugccucggggacaucgcggcccgcgaccugaucugcgcccagaaguucaacggccugaccgugcucccgccccugcugaccgacgagaugaucgcccaguacaccagcgcccuccuggcggggaccaucacguccggcuggaccuucggggccggcgccgcccugcagauccccuucgcgaugcagauggccuaccgguucaacggcaucggggucacccagaacgugcucuacgagaaccagaagcugaucgccaaccaguucaacagcgccaucggcaagauccaggacucccugagcuccaccgccagcgcgcucgggaagcugcaggacguggucaaccagaacgcccaggcccugaacacgcucgugaagcagcuguccagcaacuucggcgccaucuccagcgugcugaacgacauccucucccgccuggacaaggucgaggccgaggugcagaucgaccggcugaucaccgggcgccuccagagccugcagaccuacgugacccagcagcugauccgggcggccgagauccgcgccagcgccaaccucgccgcgaccaagauguccgagugcguccugggccagagcaagcggguggacuucugcggcaagggguaccaccugauguccuucccccagagcgccccgcacggcguggucuuccuccacgugacguacguccccgcccaggagaagaacuucaccaccgcccccgcgaucugccacgacgggaaggcccacuucccccgcgagggcguguucguguccaacgggacccacugguucgucacgcagcggaacuucuacgagccgcagaucaucaccaccgacaacaccuucgugagcggcaacugcgacguggucaucggcaucgugaacaacacgguguacgacccccugcagcccgagcuggacuccuucaaggaggagcucgacaaguacuucaagaaccacaccagccccgacgucgaccugggggacaucuccggcaucaacgccagcguggugaacauccagaaggagaucgaccgccugaacgaggucgccaagaaccucaacgagucccugaucgaccugcaggagcucgggaaguacgagcaguacaucaaguggccgugguacaucuggcugggcuucaucgccggccugaucgcgaucgugauggugaccaucaugcucugcugcaugaccagcugcugcuccugccugaaggggugcugcagcugcggcuccugcuucaaguucgacgaggacgacagcgagcccguccugaagggggugaagcuccacuacacgugaggacuagucccuguucccagagcccacuuuuuuuucuuuuuuugaaauaaaauagccugucuuucagaucucaaaggcucuuuucagagccaccaaaaaaaaaaaaaaaaaaaaaaaaaaaaaaaaaaaaaaaaaaaaaaaaaaaaaaaaaaaaaaaaaaaaaaaaaaaaaaaaaaaaaaaaaaaaaaaaaaaaa

SEQ ID NO: 12292 - RNA, 4094 nt, Artificial Sequence
  SARS-CoV-2/Switzerland/1000477797/2020__EPI_ISL_413023 spike protein mRNA gc (1-1273)
aggagagucccgcagucggcguccagcggcucugcuuguucgugugugugucguugcaggccuuauucaagcuuaccauguucguguuccugguccuccugccccuggugagcucccagugcgugaaccucaccacccgcacgcagcugccgcccgccuacaccaacagcuucacccggggcgucuacuaccccgacaagguguuccgcuccagcgugcugcacuccacccaggaccucuuccugcccuucuucagcaacgucacgugguuccacgccauccacguguccgggaccaacggcaccaagcgguucgacaacccggugcugcccuucaacgacggggucuacuucgcgagcaccgagaaguccaacaucauccgcggcuggaucuucgggacgacccucgacagcaagacccagucccugcugaucgugaacaacgccaccaacguggucaucaaggugugcgaguuccaguucugcaacgaccccuuccucggcguguacuaccacaagaacaacaagagcuggauggaguccgaguuccgggucuacagcuccgccaacaacugcacguucgaguacgugagccagcccuuccugauggaccuggagggcaagcaggggaacuucaagaaccuccgcgaguucguguucaagaacaucgacggcuacuucaacaucuacuccaagcacaccccgaucaaccugguccgggaccugccccagggguucagcgcccucgagccccugguggaccugcccaucggcaucaacaucacccgcuuccagacccuccuggcccugcaccgguccuaccucacgccgggggacagcagcuccggcuggaccgcgggcgccgccgccuacuacgugggguaccugcagccccgcaccuuccugcucaaguacaacgagaacggcaccaucacggacgcggucgacugcgcccuggacccccugagcgagaccaagugcacccucaaguccuucaccguggagaaggggaucuaccagacgagcaacuuccgggugcagcccaccgaguccaucguccgcuucccgaacaucaccaaccugugccccuucggcgagguguucaacgccacccgguucgccagcgucuacgccuggaaccgcaagcggaucuccaacugcguggcggacuacagcgugcuguacaacuccgccagcuucuccacguucaagugcuacggcgucagccccaccaagcucaacgaccugugcuucaccaacguguacgccgacuccuucgugauccgcggggacgagguccggcagaucgcccccggccagaccgggaagaucgccgacuacaacuacaagcugccggacgacuucacgggcugcgugaucgcguggaacagcaacaaccucgacuccaaggucgggggcaacuacaacuaccuguaccgccuguuccgcaagagcaaccucaagcccuucgagcgggacaucuccaccgagaucuaccaggccggcagcacccccugcaacgggguggagggcuucaacugcuacuucccccugcaguccuacggguuccagccgaccaacggcgugggguaccagcccuaccggguggucgugcugagcuucgagcuccugcacgcccccgccacggugugcggccccaagaaguccaccaaccuggucaagaacaagugcgugaacuucaacuucaacggccucaccgggaccggcgugcugaccgagagcaacaagaaguuccugccguuccagcaguucgggcgcgacaucgccgacacgaccgacgcgguccgcgacccccagacccuggagauccucgacaucacccccugcagcuucggcgggguguccgugaucacgccgggcaccaacaccagcaaccaggucgccgugcuguaccagggcgugaacugcaccgagguccccguggccauccacgccgaccagcugacgcccaccuggcggguguacuccaccgggagcaacgucuuccagacccgcgccggcugccucaucggggcggagcacgugaacaacuccuacgagugcgacauccccaucggcgccggcaucugcgccagcuaccagacgcagaccaacuccccgcggcgcgcccggagcguggcgucccagagcaucaucgccuacaccaugucccugggggccgagaacagcgucgccuacuccaacaacagcaucgccauccccaccaacuucacgaucuccgugaccaccgagauccugcccgugagcaugaccaagacgagcgucgacugcaccauguacaucugcggcgacuccaccgagugcagcaaccuccugcugcaguacggguccuucugcacccagcucaaccgcgcgcugacgggcaucgccguggagcaggacaagaacacccaggagguguucgcccaggucaagcagaucuacaagacgcccccgaucaaggacuucgggggcuucaacuucagccagauccugcccgaccccuccaagcccagcaagcgguccuucaucgaggaccuccuguucaacaaggugacccuggccgacgccggcuucaucaagcaguacggggacugccucggcgacaucgcggcccgcgaccugaucugcgcccagaaguucaacgggcugaccgugcucccgccccugcugaccgacgagaugaucgcccaguacaccagcgcccuccuggcgggcaccaucacguccggguggaccuucggcgccggcgccgcccugcagauccccuucgcgaugcagauggccuaccgguucaacgggaucggcgucacccagaacgugcucuacgagaaccagaagcugaucgccaaccaguucaacagcgccaucgggaagauccaggacucccugagcuccaccgccagcgcgcucggcaagcugcaggacguggucaaccagaacgcccaggcccugaacacgcucgugaagcagcuguccagcaacuucggggccaucuccagcgugcugaacgacauccucucccgccuggacaaggucgaggccgaggugcagaucgaccggcugaucaccggccgccuccagagccugcagaccuacgugacccagcagcugauccgggcggccgagauccgcgccagcgccaaccucgccgcgaccaagauguccgagugcguccugggccagagcaagcggguggacuucugcgggaagggcuaccaccugauguccuucccccagagcgccccgcacgggguggucuuccuccacgugacguacguccccgcccaggagaagaacuucaccaccgcccccgcgaucugccacgacggcaaggcccacuucccccgcgaggggguguucguguccaacggcacccacugguucgucacgcagcggaacuucuacgagccgcagaucaucaccaccgacaacaccuucgugagcggcaacugcgacguggucaucgggaucgugaacaacacgguguacgacccccugcagcccgagcuggacuccuucaaggaggagcucgacaaguacuucaagaaccacaccagccccgacgucgaccugggcgacaucuccgggaucaacgccagcguggugaacauccagaaggagaucgaccgccugaacgaggucgccaagaaccucaacgagucccugaucgaccugcaggagcucggcaaguacgagcaguacaucaaguggccgugguacaucuggcugggcuucaucgccgggcugaucgcgaucgugauggugaccaucaugcucugcugcaugaccagcugcugcuccugccugaagggcugcugcagcugcggguccugcugcaaguucgacgaggacgacagcgagcccguccugaagggcgugaagcuccacuacacgugaggacuagucccuguucccagagcccacuuuuuuuucuuuuuuugaaauaaaauagccugucuuucagaucucaaaggcucuuuucagagccaccaaaaaaaaaaaaaaaaaaaaaaaaaaaaaaaaaaaaaaaaaaaaaaaaaaaaaaaaaaaaaaaaaaaaaaaaaaaaaaaaaaaaaaaaaaaaaaaaaaaaa

SEQ ID NO: 12293 - RNA, 4094 nt, Artificial Sequence
  SARS-CoV-2/Belgium/BA-02291/2020__EPI_ISL_415159 spike protein mRNA gc (1-1273)
aggagagucccgcagucggcguccagcggcucugcuuguucgugugugugucguugcaggccuuauucaagcuuaccauguucguguuccugguccuccugccccuggugagcucccagugcgugaaccucaccacccgcacgcagcugccgcccgccuacaccaacagcuucacccggggcgucuacuaccccgacaagguguuccgcuccagcgugcugcacuccacccaggaccucuuccugcccuucuucagcaacgucacgugguuccacgccauccacguguccgggaccaacggcaccaagcgguucgacaacccggugcugcccuucaacgacggggucuacuucgcgagcaccgagaaguccaacaucauccgcggcuggaucuucgggacgacccucgacagcaagacccagucccugcugaucgugaacaacgccaccaacguggucaucaaggugugcgaguuccaguucugcaacgaccccuuccucggcguguacuaccacaagaacaacaagagcuggauggaguccgaguuccgggucuacagcuccgccaacaacugcacguucgaguacgugagccagcccuuccugauggaccuggagggcaagcaggggaacuucaagaaccuccgcgaguucguguucaagaacaucgacggcuacuucaagaucuacuccaagcacaccccgaucaaccugguccgggaccugccccagggguucagcgcccucgagccccugguggaccugcccaucggcaucaacaucacccgcuuccagacccuccuggcccugcaccgguccuaccucacgccgggggacagcagcuccggcuggaccgcgggcgccgccgccuacuacgugggguaccugcagccccgcaccuuccugcucaaguacaacgagaacggcaccaucacggacgcggucgacugcgcccuggacccccugagcgagaccaagugcacccucaaguccuucaccguggagaaggggaucuaccagacgagcaacuuccgggugcagcccaccgaguccaucguccgcuucccgaacaucaccaaccugugccccuucggcgagguguucaacgccacccgguucgccagcgucuacgccuggaaccgcaagcggaucuccaacugcguggcggacuacagcgugcuguacaacuccgccagcuucuccacguucaagugcuacggcgucagccccaccaagcucaacgaccugugcuucaccaacguguacgccgacuccuucgugauccgcggggacgagguccggcagaucgcccccggccagaccgggaagaucgccgacuacaacuacaagcugccggacgacuucacgggcugcgugaucgcguggaacagcaacaaccucgacuccaaggucgggggcaacuacaacuaccuguaccgccuguuccggcgcagcaaccucaagcccuucgagcgggacaucuccaccgagaucuaccaggccggcagcacccccugcaacgggguggagggcuucaacugcuacuucccccugcaguccuacggguuccagccgaccaacggcgugggguaccagcccuaccgcguggucgugcugagcuucgagcuccugcccgcccccgccacggugugcggcccgaagaaguccaccaaccuggucaagaacaagugcgugaacuucaacuucaacggccucaccgggaccggcgugcugaccgaguccaacaagaaguuccugcccuuccagcaguucgggcgcgacaucgccgacacgaccgacgcgguccgggacccccagacccuggagauccucgacaucaccccgugcagcuucggcgggguguccgugaucacgcccggcaccaacaccagcaaccaggucgccgugcuguaccagggcgugaacugcaccgagguccccguggccauccacgccgaccagcugacgcccaccuggcgcguguacuccaccgggagcaacgucuuccagacccgggccggcugccucaucggggcggagcacgugaacaacuccuacgagugcgacaucccgaucggcgccggcaucugcgccagcuaccagacgcagaccaacagcccccgccgggcccgcagcguggcgucccagagcaucaucgccuacaccaugucccugggggccgagaacagcgucgccuacuccaacaacagcaucgccauccccaccaacuucacgaucuccgugaccaccgagauccugcccgugagcaugaccaagacgagcgucgacugcaccauguacaucugcggcgacuccaccgagugcagcaaccuccugcugcaguacggguccuucugcacccagcucaaccgggcgcugacgggcaucgccguggagcaggacaagaacacccaggagguguucgcccaggucaagcagaucuacaagaccccgcccaucaaggacuucgggggcuucaacuucagccagauccugcccgaccccuccaagccgagcaagcgcuccuucaucgaggaccuccuguucaacaaggugacccuggccgacgccggcuucaucaagcaguacggggacugccucggcgacaucgcggcccgggaccugaucugcgcccagaaguucaacgggcugacggugcucccgccccugcugaccgacgagaugaucgcccaguacaccagcgcccuccuggcgggcaccaucacguccggguggaccuucggcgccggcgccgcccugcagauccccuucgcgaugcagauggccuaccgcuucaacgggaucggcgucacccagaacgugcucuacgagaaccagaagcugaucgccaaccaguucaacagcgccaucgggaagauccaggacucccugagcuccgccgcgcccgcccucggcaagcugcaggacguggucaaccagaacgcccaggcccugaacacccucgugaagcagcugagcuccaacuucggggccaucagcuccgugcugaacgacauccucagccggcuggacaaggucgaggcggaggugcagaucgaccgccugaucacgggccggcuccagucccugcagaccuacgugacccagcagcugauccgcgccgccgagauccgggccagcgccaaccucgcggccaccaagaugagcgagugcguccugggccaguccaagcgcguggacuucugcgggaagggcuaccaccugaugagcuucccccaguccgcgccccacgggguggucuuccuccacgugaccuacguccccgcccaggagaagaacuucacgaccgccccggccaucugccacgacggcaaggcccacuucccccgggaggggguguucgugagcaacggcacccacugguucgucacccagcgcaacuucuacgagccccagaucaucacgaccgacaacaccuucguguccggcaacugcgacguggucaucgggaucgugaacaacaccguguacgacccccugcagccggagcuggacagcuucaaggaggagcucgacaaguacuucaagaaccacacgucccccgacgucgaccugggcgacaucagcgggaucaacgccuccguggugaacauccagaaggagaucgaccggcugaacgaggucgccaagaaccucaacgagagccugaucgaccugcaggagcucggcaaguacgagcaguacaucaaguggcccugguacaucuggcugggcuucaucgcggggcugaucgccaucgugauggugaccaucaugcucugcugcaugaccuccugcugcagcugccugaagggcugcugcuccugcgggagcugcugcaaguucgacgaggacgacuccgagccgguccugaagggcgugaagcuccacuacaccugaggacuagucccuguucccagagcccacuuuuuuuucuuuuuuugaaauaaaauagccugucuuucagaucucaaaggcucuuuucagagccaccaaaaaaaaaaaaaaaaaaaaaaaaaaaaaaaaaaaaaaaaaaaaaaaaaaaaaaaaaaaaaaaaaaaaaaaaaaaaaaaaaaaaaaaaaaaaaaaaaaaaa

SEQ ID NO: 12294 - RNA, 4094 nt, Artificial Sequence
  SARS-CoV-2/USA/WA8-UW5/2020__EPI_ISL_413486 spike protein mRNA gc (1-1273)
aggagagucccgcagucggcguccagcggcucugcuuguucgugugugugucguugcaggccuuauucaagcuuaccauguucguguuccugguccuccugccccuggugagcucccagugcgugaaccucaccacccgcacgcagcugccgcccgccuacaccaacagcuucacccggggcgucuacuaccccgacaagguguuccgcuccagcgugcugcacuccacccaggaccucuuccugcccuucuucagcaacgucacgugguuccacgccauccacguguccgggaccaacggcaccaagcgguucgacaacccggugcugcccuucaacgacggggucuacuucgcgagcaccgagaaguccaacaucauccgcggcuggaucuucgggacgacccucgacagcaagacccagucccugcugaucgugaacaacgccaccaacguggucaucaaggugugcgaguuccaguucugcaacgaccccuuccucggcguguacuaccacaagaacaacaagagcuggauggaguccgaguuccgggucuacagcuccgccaacaacugcacguucgaguacgugagccagcccuuccugauggaccuggagggcaagcaggggaacuucaagaaccuccgcgaguucguguucaagaacaucgacggcuacuucaagaucuacuccaagcacaccccgaucaaccugguccgggaccugccccagggguucagcgcccucgagccccugguggaccugcccaucggcaucaacaucacccgcuuccagacccuccuggcccugcaccgguccuaccucacgccgggggacagcagcuccggcuggaccgcgggcgccgccgccuacuacgugggguaccugcagccccgcaccuuccugcucaaguacaacgagaacggcaccaucacggacgcggucgacugcgcccuggacccccugagcgagaccaagugcacccucaaguccuucaccguggagaaggggaucuaccagacgagcaacuuccgggugcagcccaccgaguccaucguccgcuucccgaacaucaccaaccugugccccuucggcgagguguucaacgccacccgguucgccagcgucuacgccuggaaccgcaagcggaucuccaacugcguggcggacuacagcgugcuguacaacuccgccagcuucuccacguucaagugcuacggcgucagccccaccaagcucaacgaccugugcuucaccaacguguacgccgacuccuucgugauccgcggggacgagguccggcagaucgcccccggccagaccgggaagaucgccgacuacaacuacaagcugccggacgacuucacgggcugcgugaucgcguggaacagcaacaaccucgacuccaaggucgggggcaacuacaacuaccuguaccgccuguuccgcaagagcaaccucaagcccuucgagcgggacaucuccaccgagaucuaccaggccggcagcacccccugcaacgggguggagggcuucaacugcuacuucccccugcaguccuacggguuccagccgaccaacggcgugggguaccagcccuaccggguggucgugcugagcuucgagcuccugcacgcccccgccacggugugcggccccaagaaguccaccaaccuggucaagaacaagugcgugaacuucaacuucaacggccucaccgggaccggcgugcugaccgagagcaacaagaaguuccugccguuccagcaguucgggcgcgacaucgccgacacgaccgacgcgguccgcgacccccagacccuggagauccucgacaucacccccugcagcuucggcgggguguccgugaucacgccgggcaccaacaccagcaaccaggucgccgugcuguaccaggacgugaacugcaccgagguccccguggccauccacgccgaccagcugacgcccaccuggcggguguacuccaccggcagcaacgucuuccagacccgcgccgggugccucaucggcgcggaguacgugaacaacuccuacgagugcgacauccccaucggggccggcaucugcgccagcuaccagacgcagaccaacuccccgcggcgcgcccggagcguggcgucccagagcaucaucgccuacaccaugucccugggcgccgagaacagcgucgccuacuccaacaacagcaucgccauccccaccaacuucacgaucuccgugaccaccgagauccugcccgugagcaugaccaagacgagcgucgacugcaccauguacaucugcggggacuccaccgagugcagcaaccuccugcugcaguacggcuccuucugcacccagcucaaccgcgcgcugacggggaucgccguggagcaggacaagaacacccaggagguguucgcccaggucaagcagaucuacaagacgcccccgaucaaggacuucggcggguucaacuucagccagauccugcccgaccccuccaagcccagcaagcgguccuucaucgaggaccuccuguucaacaaggugacccuggccgacgccggcuucaucaagcaguacggcgacugccucggggacaucgcggcccgcgaccugaucugcgcccagaaguucaacggccugaccgugcucccgccccugcugaccgacgagaugaucgcccaguacaccagcgcccuccuggcggggaccaucacguccggcuggaccuucggggccggcgccgcccugcagauccccuucgcgaugcagauggccuaccgguucaacggcaucggggucacccagaacgugcucuacgagaaccagaagcugaucgccaaccaguucaacagcgccaucggcaagauccaggacucccugagcuccaccgccagcgcgcucgggaagcugcaggacguggucaaccagaacgcccaggcccugaacacgcucgugaagcagcuguccagcaacuucggcgccaucuccagcgugcugaacgacauccucucccgccuggacaaggucgaggccgaggugcagaucgaccggcugaucaccgggcgccuccagagccugcagaccuacgugacccagcagcugauccgggcggccgagauccgcgccagcgccaaccucgccgcgaccaagauguccgagugcguccugggccagagcaagcggguggacuucugcggcaagggguaccaccugauguccuucccccagagcgccccgcacggcguggucuuccuccacgugacguacguccccgcccaggagaagaacuucaccaccgcccccgcgaucugccacgacgggaaggcccacuucccccgcgagggcguguucguguccaacgggacccacugguucgucacgcagcggaacuucuacgagccgcagaucaucaccaccgacaacaccuucgugagcggcaacugcgacguggucaucggcaucgugaacaacacgguguacgacccccugcagcccgagcuggacuccuucaaggaggagcucgacaaguacuucaagaaccacaccagccccgacgucgaccugggggacaucuccggcaucaacgccagcguggugaacauccagaaggagaucgaccgccugaacgaggucgccaagaaccucaacgagucccugaucgaccugcaggagcucgggaaguacgagcaguacaucaaguggccgugguacaucuggcugggcuucaucgccggccugaucgcgaucgugauggugaccaucaugcucugcugcaugaccagcugcugcuccugccugaaggggugcugcagcugcggcuccugcugcaaguucgacgaggacgacagcgagcccguccugaagggggugaagcuccacuacacgugaggacuagucccuguucccagagcccacuuuuuuuucuuuuuuugaaauaaaauagccugucuuucagaucucaaaggcucuuuucagagccaccaaaaaaaaaaaaaaaaaaaaaaaaaaaaaaaaaaaaaaaaaaaaaaaaaaaaaaaaaaaaaaaaaaaaaaaaaaaaaaaaaaaaaaaaaaaaaaaaaaaaa

SEQ ID NO: 12295 - RNA, 4094 nt, Artificial Sequence
  SARS-CoV-2/England/20102000506/2020__EPI_ISL_415147 spike protein mRNA gc (1-1273)
aggagagucccgcagucggcguccagcggcucugcuuguucgugugugugucguugcaggccuuauucaagcuuaccauguucguguuccugguccuccugccccuggugagcucccagugcgugaaccucaccacccgcacgcagcugccgcccgccuacaccaacagcuucacccggggcgucuacuaccccgacaagguguuccgcuccagcgugcugcacuccacccaggaccucuuccugcccuucuucagcaacgucacgugguuccacgccauccacguguccgggaccaacggcaccaagcgguucgacaacccggugcugcccuucaacgacggggucuacuucgcgagcaccgagaaguccaacaucauccgcggcuggaucuucgggacgacccucgacagcaagacccagucccugcugaucgugaacaacgccaccaacguggucaucaaggugugcgaguuccaguucugcaacgaccccuuccucggcguguacuaccacaagaacaacaagagcuggauggaguccgaguuccgggucuacagcuccgccaacaacugcacguucgaguacgugagccagcccuuccugauggaccuggagggcaagcaggggaacuucaagaaccuccgcgaguucguguucaagaacaucgacggcuacuucaagaucuacuccaagcacaccccgaucaaccugguccgggaccugccccagggguucagcgcccucgagccccugguggaccugcccaucggcaucaacaucacccgcuuccagacccuccuggcccugcaccgguccuaccucacgccgggggacagcagcuccggcuggaccgcgggcgccgccgccuacuacgugggguaccugcagccccgcaccuuccugcucaaguacaacgagaacggcaccaucacggacgcggucgacugcgcccuggacccccugagcgagaccaagugcacccucaaguccuucaccguggagaaggggaucuaccagacgagcaacuuccgggugcagcccaccgaguccaucguccgcuucccgaacaucaccaaccugugccccuucggcgagguguucaacgccacccgguucgccagcgucuacgccuggaaccgcaagcggaucuccaacugcguggcggacuacagcgugcuguacaacuccgccagcuucuccacguucaagugcuacggcgucagccccaccaagcucaacgaccugugcuucaccaacguguacgccgacuccuucgugauccgcggggacgagguccggcagaucgcccccggccagaccgggaagaucgccgacuacaacuacaagcugccggacgacuucacgggcugcgugaucgcguggaacagcaacaaccucgacuccaaggucgggggcaacuacaacuaccuguaccgccuguuccgcaagagcaaccucaagcccuucgagcgggacaucuccaccgagaucuaccaggccggcagcacccccugcaacgggguggagggcuucaacugcuacuucccccugcaguccuacggguuccagccgaccaacggcgugggguaccagcccuaccggguggucgugcugagcuucgagcuccugcacgcccccgccacggugugcggccccaagaaguccaccaaccuggucaagaacaagugcgugaacuucaacuucaacggccucaccgggaccggcgugcugaccgagagcaacaagaaguuccugccguuccagcaguucgggcgcgacaucgccgacacgaccgacgcgguccgcgacccccagacccuggagauccucgacaucacccccugcagcuucggcgggguguccgugaucacgccgggcaccaacaccagcaaccaggucgccgugcuguaccagggcgugaacugcaccgagguccccguggccauccacgccgaccagcugacgcccaccuggcggguguacuccaccgggagcaacgucuuccagacccgcgccggcugccucaucggggcggagcacgugaacaacuccuacgagugcgacauccccaucggcgccggcaucugcgccagcuaccagacgcagaccaacuccccgcggcgcgcccggagcguggcgucccagagcaucaucgccuacaccaugucccugggggccgagaacagcgucgccuacuccaacaacagcaucgccauccccaccaacuucacgaucuccgugaccaccgagauccugcccgugagcaugaccaagacgagcgucgacugcaccauguacaucugcggcgacuccaccgagugcagcaaccuccugcugcaguacggguccuucugcacccagcucaaccgcgcgcugacgggcaucgccguggagcaggacaagaacacccaggagguguucgcccaggucaagcagaucuacaagacgcccccgaucaaggacuucgggggcuucaacuucagccagauccugcccgaccccuccaagcccagcaagcgguccuucaucgaggaccuccuguucaacaaggugacccuggccgacgccggcuucaucaagcaguacggguacugccucggcgacaucgcggcccgcgaccugaucugcgcccagaaguucaacgggcugaccgugcucccgccccugcugaccgacgagaugaucgcccaguacaccagcgcccuccuggcgggcaccaucacguccggguggaccuucggcgccggcgccgcccugcagauccccuucgcgaugcagauggccuaccgguucaacgggaucggcgucacccagaacgugcucuacgagaaccagaagcugaucgccaaccaguucaacagcgccaucgggaagauccaggacucccugagcuccaccgccagcgcgcucggcaagcugcaggacguggucaaccagaacgcccaggcccugaacacgcucgugaagcagcuguccagcaacuucggggccaucuccagcgugcugaacgacauccucucccgccuggacaaggucgaggccgaggugcagaucgaccggcugaucaccggccgccuccagagccugcagaccuacgugacccagcagcugauccgggcggccgagauccgcgccagcgccaaccucgccgcgaccaagauguccgagugcguccugggccagagcaagcggguggacuucugcgggaagggcuaccaccugauguccuucccccagagcgccccgcacgggguggucuuccuccacgugacguacguccccgcccaggagaagaacuucaccaccgcccccgcgaucugccacgacggcaaggcccacuucccccgcgaggggguguucguguccaacggcacccacugguucgucacgcagcggaacuucuacgagccgcagaucaucaccaccgacaacaccuucgugagcggcaacugcgacguggucaucgggaucgugaacaacacgguguacgacccccugcagcccgagcuggacuccuucaaggaggagcucgacaaguacuucaagaaccacaccagccccgacgucgaccugggcgacaucuccgggaucaacgccagcguggugaacauccagaaggagaucgaccgccugaacgaggucgccaagaaccucaacgagucccugaucgaccugcaggagcucggcaaguacgagcaguacaucaaguggccgugguacaucuggcugggcuucaucgccgggcugaucgcgaucgugauggugaccaucaugcucugcugcaugaccagcugcugcuccugccugaagggcugcugcagcugcggguccugcugcaaguucgacgaggacgacagcgagcccguccugaagggcgugaagcuccacuacacgugaggacuagucccuguucccagagcccacuuuuuuuucuuuuuuugaaauaaaauagccugucuuucagaucucaaaggcucuuuucagagccaccaaaaaaaaaaaaaaaaaaaaaaaaaaaaaaaaaaaaaaaaaaaaaaaaaaaaaaaaaaaaaaaaaaaaaaaaaaaaaaaaaaaaaaaaaaaaaaaaaaaaa

SEQ ID NO: 12296 - RNA, 4094 nt, Artificial Sequence
  SARS-CoV-2/Belgium/VAG-03013/2020__EPI_ISL_415155 spike protein mRNA gc (1-1273)
aggagagucccgcagucggcguccagcggcucugcuuguucgugugugugucguugcaggccuuauucaagcuuaccauguucguguuccugguccuccugccccuggugagcucccagugcgugaaccucaccacccgcacgcagcugccgcccgccuacaccaacagcuucacccggggcgucuacuaccccgacaagguguuccgcuccagcgugcugcacuccacccaggaccucuuccugcccuucuucagcaacgucacgugguuccacgccauccacguguccgggaccaacggcaccaagcgguucgacaacccggugcugcccuucaacgacggggucuacuucgcgagcaccgagaaguccaacaucauccgcggcuggaucuucgggacgacccucgacagcaagacccagucccugcugaucgugaacaacgccaccaacguggucaucaaggugugcgaguuccaguucugcaacgaccccuuccucggcguguacuaccacaagaacaacaagagcuggauggaguccgaguuccgggucuacagcuccgccaacaacugcacguucgaguacgugagccagcccuuccugauggaccuggagggcaagcaggggaacuucaagaaccuccgcgaguucguguucaagaacaucgacggcuacuucaagaucuacuccaagcacaccccgaucaaccugguccgggaccugccccagggguucagcgcccucgagccccugguggaccugcccaucggcaucaacaucacccgcuuccagacccuccuggcccugcaccgguccuaccucacgccgggggacagcagcuccggcuggaccgcgggcgccgccgccuacuacgugggguaccugcagccccgcaccuuccugcucaaguacaacgagaacggcaccaucacggacgcggucgacugcgcccuggacccccugagcgagaccaagugcacccucaaguccuucaccguggagaaggggaucuaccagacgagcaacuuccgggugcagcccaccgaguccaucguccgcuucccgaacaucaccaaccugugccccuucggcgagguguucaacgccacccgguucgccagcgucuacgccuggaaccgcaagcggaucuccaacugcguggcggacuacagcgugcuguacaacuccgccagcuucuccacguucaagugcuacggcgucagccccaccaagcucaacgaccugugcuucaccaacguguacgccgacuccuucgugauccgcggggacgagguccggcagaucgcccccggccagaccgggaagaucgccgacuacaacuacaagcugccggacgacuucacgggcugcgugaucgcguggaacagcaacaaccucgacuccaaggucgggggcaacuacaacuaccuguaccgccuguuccgcaagagcaaccucaagcccuucgagcgggacaucuccaccgagaucuaccaggccggcagcacccccugcaacgggguggagggcuucaacugcuacuucccccugcaguccuacggguuccagccgaccaacggcgugggguaccagcccuaccggguggucgugcugagcuucgagcuccugcacgcccccgccacggugugcggccccaagaaguccaccaaccuggucaagaacaagugcgugaacuucaacuucaacggccucaccgggaccggcgugcugaccgagagcaacaagaaguuccugccguuccagcaguucgggcgcgacaucgccgacacgaccgacgcgguccgcgacccccagacccuggagauccucgacaucacccccugcagcuucggcgggguguccgugaucacgccgggcaccaacaccagcaaccaggucgccgugcuguaccagggcgugaacugcaccgagguccccguggccauccacgccgaccagcugacgcccaccuggcggguguacuccaccgggagcaacgucuuccagacccgcgccggcugccucaucggggcggagcacgugaacaacuccuacgagugcgacauccccaucggcgccggcaucugcgccagcuaccagacgcagaccaacuccccgcggcgcgcccggagcguggcgucccagagcaucaucgccuacaccaugucccugggggccgagaacagcgucgccuacuccaacaacagcaucgccauccccaccaacuucacgaucuccgugaccaccgagauccugcccgugagcaugaccaagacgagcgucgacugcaccauguacaucugcggcgacuccaccgagugcagcaaccuccugcugcaguacggguccuucugcacccagcucaaccgcgcgcugacgggcaucgccguggagcaggacaagaacacccaggagguguucgcccaggucaagcagaucuacaagacgcccccgaucaaggacuucgggggcuucaacuucagccagauccugcccgaccccuccaagcccagcaagcgguccuucaucgaggaccuccuguucaacaaggugacccuggccgacgccggcuucaucaagcaguacggggacugccucggcgacaucgcggcccgcgaccugaucugcgcccagaaguucaacgggcugaccgugcucccgccccugcugaccgacgagaugaucgcccaguacaccagcgcccuccuggcgggcaccaucacguccggguggaccuucggcgccggcgccgcccugcagauccccuucgcgaugcagauggccuaccgguucaacgggaucggcgucacccagaacgugcucuacgagaaccagaagcugaucgccaaccaguucaacagcgccaucgggaagauccaggacucccugagcuccaccgccacggcgcucggcaagcugcaggacguggucaaccagaacgcccaggcccugaacacccucgugaagcagcugagcuccaacuucggggccaucagcuccgugcugaacgacauccucagccgccuggacaaggucgaggccgaggugcagaucgaccggcugaucaccggccgccuccagucccugcagaccuacgugacccagcagcugauccgggcggccgagauccgcgccagcgccaaccucgccgcgacgaagaugagcgagugcguccugggccaguccaagcggguggacuucugcgggaagggcuaccaccugaugagcuucccccaguccgccccgcacgggguggucuuccuccacgugaccuacguccccgcccaggagaagaacuucaccaccgcccccgcgaucugccacgacggcaaggcccacuucccccgcgaggggguguucgugagcaacggcacgcacugguucgucacccagcggaacuucuacgagccgcagaucaucaccaccgacaacacguucguguccggcaacugcgacguggucaucgggaucgugaacaacaccguguacgacccccugcagcccgagcuggacagcuucaaggaggagcucgacaaguacuucaagaaccacaccucccccgacgucgaccugggcgacaucagcgggaucaacgccuccguggugaacauccagaaggagaucgaccgccugaacgaggucgccaagaaccucaacgagagccugaucgaccugcaggagcucggcaaguacgagcaguacaucaaguggccgugguacaucuggcugggcuucaucgccgggcugaucgcgaucgugauggugaccaucaugcucugcugcaugacguccugcugcagcugccugaagggcugcugcuccugcgggagcugcugcaaguucgacgaggacgacuccgagcccguccugaagggcgugaagcuccacuacaccugaggacuagucccuguucccagagcccacuuuuuuuucuuuuuuugaaauaaaauagccugucuuucagaucucaaaggcucuuuucagagccaccaaaaaaaaaaaaaaaaaaaaaaaaaaaaaaaaaaaaaaaaaaaaaaaaaaaaaaaaaaaaaaaaaaaaaaaaaaaaaaaaaaaaaaaaaaaaaaaaaaaaa

SEQ ID NO: 12297 - RNA, 4094 nt, Artificial Sequence
  SARS-CoV-2/Belgium/BC-03016/2020__EPI_ISL_415157 spike protein mRNA gc (1-1273)
aggagagucccgcagucggcguccagcggcucugcuuguucgugugugugucguugcaggccuuauucaagcuuaccauguucguguuccugguccuccugccccuggugagcucccagugcgugaaccucaccacccgcacgcagcugccgcccgccuacaccaacagcuucacccggggcgucuacuaccccgacaagguguuccgcuccagcgugcugcacuccacccaggaccucuuccugcccuucuucagcaacgucacgugguuccacgccauccacguguccgggaccaacggcaccaagcgguucgacaacccggugcugcccuucaacgacggggucuacuucgcgagcaccgagaaguccaacaucauccgcggcuggaucuucgggacgacccucgacagcaagacccagucccugcugaucgugaacaacgccaccaacguggucaucaaggugugcgaguuccaguucugcaacgaccccuuccucggcguguacuaccacaagaacaacaagagcuggauggaguccgaguuccgggucuacagcuccgccaacaacugcacguucgaguacgugagccagcccuuccugauggaccuggagggcaagcaggggaacuucaagaaccuccgcgaguucguguucaagaacaucgacggcuacuucaagaucuacuccaagcacaccccgaucaaccugguccgggaccugccccagggguucagcgcccucgagccccugguggaccugcccaucggcaucaacaucacccgcuuccagacccuccuggcccugcaccgguccuaccucacgccgggggacagcagcuccggcuggaccgcgggcgccgccgccuacuacgugggguaccugcagccccgcaccuuccugcucaaguacaacgagaacggcaccaucacggacgcggucgacugcgcccuggacccccugagcgagaccaagugcacccucaaguccuucaccguggagaaggggaucuaccagacgagcaacuuccgggugcagcccaccgaguccaucguccgcuucccgaacaucaccaaccugugccccuucggcgagguguucaacgccacccgguucgccagcgucuacgccuggaaccgcaagcggaucuccaacugcguggcggacuacagcgugcuguacaacuccgccagcuucuccacguucaagugcuacggcgucagccccaccaagcucaacgaccugugcuucaccaacguguacgccgacuccuucgugauccgcggggacgagguccggcagaucgcccccggccagaccgggaagaucgccgacuacaacuacaagcugccggacgacuucacgggcugcgugaucgcguggaacagcaacaaccucgacuccaaggucgggggcaacuacaacuaccuguaccgccuguuccgcaagagcaaccucaagcccuucgagcgggacaucuccaccgagaucuaccaggccggcagcacccccugcaacgggguggagggcuucaacugcuacuucccccugcaguccuacggguuccagccgaccaacggcgugggguaccagcccuaccggguggucgugcugagcuucgagcuccugcacgcccccgccacggugugcggccccaagaaguccaccaaccuggucaagaacaagugcgugaacuucaacuucaacggccucaccgggaccggcgugcugaccgagagcaacaagaaguuccugccguuccagcaguucgggcgcgacaucgccgacacgaccgacgcgguccgcgacccccagacccuggagauccucgacaucacccccugcagcuucggcgggguguccgugaucacgccgggcaccaacaccagcaaccaggucgccgugcuguaccagggcgugaacugcaccgagguccccguggccauccacgccgaccagcugacgcccaccuggcggguguacuccaccgggagcaacgucuuccagacccgcgccggcugccucaucggggcggagcacgugaacaacuccuacgagugcgacauccccaucggcgccggcaucugcgccagcuaccagacgcagaccaacuccccgcggcgcgcccggagcguggcgucccagagcaucaucgccuacaccaugucccugggggccgagaacagcgucgccuacuccaacaacagcaucgccauccccaccaacuucacgaucuccgugaccaccgagauccugcccgugagcaugaccaagacgagcgucgacugcaccauguacaucugcggcgacuccaccgagugcagcaaccuccugcugcaguacggguccuucugcacccagcucaaccgcgcgcugacgggcaucgccguggagcaggacaagaacacccaggagguguucgcccaggucaagcagaucuacaagacgcccccgaucaaggacuucgggggcuucaacuucagccagauccugcccgaccccuccaagcccagcaagcgguccuucaucgaggaccuccuguucaacaaggugacccuggccgacgccggcuucaucaagcaguacggggacugccucggcgacaucgcggcccgcgaccugaucugcgcccagaaguucaacgggcugaccgugcucccgccccugcugaccgacgagaugaucgcccaguacaccagcgcccuccuggcgggcaccaucacguccggguggaccuucggcgccggcgccgcccugcagauccccuucgcgaugcagauggccuaccgguucaacgggaucggcgucacccagaacgugcucuacgagaaccagaagcugaucgccaaccaguucaacagcgccaucgggaagauccaggacucccugagcuccaccgcccccgcgcucggcaagcugcaggacguggucaaccagaacgcccaggcccugaacacgcucgugaagcagcugagcuccaacuucggggccaucagcuccgugcugaacgacauccucagccgccuggacaaggucgaggccgaggugcagaucgaccggcugaucaccggccgccuccagucccugcagaccuacgugacccagcagcugauccgggcggccgagauccgcgccagcgccaaccucgccgcgaccaagaugagcgagugcguccugggccaguccaagcggguggacuucugcgggaagggcuaccaccugaugagcuucccgcaguccgcgccccacgggguggucuuccuccacgugacguacguccccgcccaggagaagaacuucaccaccgcccccgccaucugccacgacggcaaggcccacuucccgcgcgaggggguguucgugagcaacggcacccacugguucgucacgcagcggaacuucuacgagccccagaucaucaccaccgacaacaccuucguguccggcaacugcgacguggucaucgggaucgugaacaacacgguguacgacccccugcagcccgagcuggacagcuucaaggaggagcucgacaaguacuucaagaaccacaccuccccggacgucgaccugggcgacaucagcgggaucaacgccuccguggugaacauccagaaggagaucgaccgccugaacgaggucgccaagaaccucaacgagagccugaucgaccugcaggagcucggcaaguacgagcaguacaucaaguggcccugguacaucuggcugggcuucaucgccgggcugaucgcgaucgugauggugaccaucaugcucugcugcaugaccuccugcugcagcugccugaagggcugcugcuccugcgggagcugcugcaaguucgacgaggacgacuccgagcccguccugaagggcgugaagcuccacuacacgugaggacuagucccuguucccagagcccacuuuuuuuucuuuuuuugaaauaaaauagccugucuuucagaucucaaaggcucuuuucagagccaccaaaaaaaaaaaaaaaaaaaaaaaaaaaaaaaaaaaaaaaaaaaaaaaaaaaaaaaaaaaaaaaaaaaaaaaaaaaaaaaaaaaaaaaaaaaaaaaaaaaaa

SEQ ID NO: 12298 - RNA, 4094 nt, Artificial Sequence
  SARS-CoV-2/Germany/BavPat3/2020__EPI_ISL_414521 spike protein mRNA gc (1-1273)
aggagagucccgcagucggcguccagcggcucugcuuguucgugugugugucguugcaggccuuauucaagcuuaccauguucguguuccugguccuccugccccuggugagcucccagugcgugaaccucaccacccgcacgcagcugccgcccgccuacaccaacagcuucacccggggcgucuacuaccccgacaagguguuccgcuccagcgugcugcacuccacccaggaccucuuccugcccuucuucagcaacgucacgugguuccacgccauccacguguccgggaccaacggcaccaagcgguucgacaacccggugcugcccuucaacgacggggucuacuucgcgagcaccgagaaguccaacaucauccgcggcuggaucuucgggacgacccucgacagcaagacccagucccugcugaucgugaacaacgccaccaacguggucaucaaggugugcgaguuccaguucugcaacgaccccuuccucggcguguacuaccacaagaacaacaagagcuggauggaguccgaguuccgggucuacagcuccgccaacaacugcacguucgaguacgugagccagcccuuccugauggaccuggagggcaagcaggggaacuucaagaaccuccgcgaguucguguucaagaacaucgacggcuacuucaagaucuacuccaagcacaccccgaucaaccugguccgggaccugccccagggguucagcgcccucgagccccugguggaccugcccaucggcaucaacaucacccgcuuccagacccuccuggcccugcaccgguccuaccucacgccgggggacagcagcuccggcuggaccgcgggcgccgccgccuacuacgugggguaccugcagccccgcaccuuccugcucaaguacaacgagaacggcaccaucacggacgcggucgacugcgcccuggacccccugagcgagaccaagugcacccucaaguccuucaccguggagaaggggaucuaccagacgagcaacuuccgggugcagcccaccgaguccaucguccgcuucccgaacaucaccaaccugugccccuucggcgagguguucaacgccacccgguucgccagcgucuacgccuggaaccgcaagcggaucuccaacugcguggcggacuacagcgugcuguacaacuccgccagcuucuccacguucaagugcuacggcgucagccccaccaagcucaacgaccugugcuucaccaacguguacgccgacuccuucgugauccgcggggacgagguccggcagaucgcccccggccagaccgggaagaucgccgacuacaacuacaagcugccggacgacuucacgggcugcgugaucgcguggaacagcaacaaccucgacuccaaggucgggggcaacuacaacuaccuguaccgccuguuccgcaagagcaaccucaagcccuucgagcgggacaucuccaccgagaucuaccaggccggcagcacccccugcaacgggguggagggcuucaacugcuacuucccccugcaguccuacggguuccagccgaccaacggcgugggguaccagcccuaccggguggucgugcugagcuucgagcuccugcacgcccccgccacggugugcggccccaagaaguccaccaaccuggucaagaacaagugcgugaacuucaacuucaacggccucaccgggaccggcgugcugaccgagagcaacaagaaguuccugccguuccagcaguucgggcgcgacaucgccgacacgaccgacgcgguccgcgacccccagacccuggagauccucgacaucacccccugcagcuucggcgggguguccgugaucacgccgggcaccaacaccagcaaccaggucgccgugcuguaccaggacgugaacugcaccgagguccccguggccauccacgccgaccagcugacgcccaccuggcggguguacuccaccggcagcaacgucuuccagacccgcgccgggugccucaucggcgcggagcacgugaacaacuccuacgagugcgacauccccaucggggccggcaucugcgccagcuaccagacgcagaccaacuccccgcggcgcgcccggagcguggcgucccagagcaucaucgccuacaccaugucccugggcgccgagaacagcgucgccuacuccaacaacagcaucgccauccccaccaacuucacgaucuccgugaccaccgagauccugcccgugagcaugaccaagacgagcgucgacugcaccauguacaucugcggggacuccaccgagugcagcaaccuccugcugcaguacggcuccuucugcacccagcucaaccgcgcgcugacggggaucgccguggagcaggacaagaacacccagcaggucuucgcccaggugaagcagaucuacaagacgcccccgaucaaggacuucggcggguucaacuucagccagauccugcccgaccccuccaagcccagcaagcgguccuucaucgaggaccuccuguucaacaaggugacccuggccgacgccggcuucaucaagcaguacggcgacugccucggggacaucgcggcccgcgaccugaucugcgcccagaaguucaacggccugaccgugcucccgccccugcugaccgacgagaugaucgcccaguacaccagcgcccuccuggcggggaccaucacguccggcuggaccuucggggccggcgccgcccugcagauccccuucgcgaugcagauggccuaccgguucaacggcaucggggucacccagaacgugcucuacgagaaccagaagcugaucgccaaccaguucaacagcgccaucggcaagauccaggacucccugagcuccaccgccagcgcgcucgggaagcugcaggacguggucaaccagaacgcccaggcccugaacacgcucgugaagcagcuguccagcaacuucggcgccaucuccagcgugcugaacgacauccucucccgccuggacaaggucgaggccgaggugcagaucgaccggcugaucaccgggcgccuccagagccugcagaccuacgugacccagcagcugauccgggcggccgagauccgcgccagcgccaaccucgccgcgaccaagauguccgagugcguccugggccagagcaagcggguggacuucugcggcaagggguaccaccugauguccuucccccagagcgccccgcacggcguggucuuccuccacgugacguacguccccgcccaggagaagaacuucaccaccgcccccgcgaucugccacgacgggaaggcccacuucccccgcgagggcguguucguguccaacgggacccacugguucgucacgcagcggaacuucuacgagccgcagaucaucaccaccgacaacaccuucgugagcggcaacugcgacguggucaucggcaucgugaacaacacgguguacgacccccugcagcccgagcuggacuccuucaaggaggagcucgacaaguacuucaagaaccacaccagccccgacgucgaccugggggacaucuccggcaucaacgccagcguggugaacauccagaaggagaucgaccgccugaacgaggucgccaagaaccucaacgagucccugaucgaccugcaggagcucgggaaguacgagcaguacaucaaguggccgugguacaucuggcugggcuucaucgccggccugaucgcgaucgugauggugaccaucaugcucugcugcaugaccagcugcugcuccugccugaaggggugcugcagcugcggcuccugcugcaaguucgacgaggacgacagcgagcccguccugaagggggugaagcuccacuacacgugaggacuagucccuguucccagagcccacuuuuuuuucuuuuuuugaaauaaaauagccugucuuucagaucucaaaggcucuuuucagagccaccaaaaaaaaaaaaaaaaaaaaaaaaaaaaaaaaaaaaaaaaaaaaaaaaaaaaaaaaaaaaaaaaaaaaaaaaaaaaaaaaaaaaaaaaaaaaaaaaaaaaa

SEQ ID NO: 12299 - RNA, 4094 nt, Artificial Sequence
  SARS-CoV-2/France/HF1805/2020__EPI_ISL_414628 spike protein mRNA gc (1-1273)
aggagagucccgcagucggcguccagcggcucugcuuguucgugugugugucguugcaggccuuauucaagcuuaccauguucguguuccugguccuccugccccuggugagcucccagugcgugaaccucaccacccgcacgcagcugccgcccgccuacaccaacagcuucacccggggcgucuacuaccccgacaagguguuccgcuccagcgugcugcacuccacccaggaccucuuccugcccuucuucagcaacgucacgugguuccacgccauccacguguccgggaccaacggcaccaagcgguucgacaacccggugcugcccuucaacgacggggucuacuucgcgagcaccgagaaguccaacaucauccgcggcuggaucuucgggacgacccucgacagcaagacccagucccugcugaucgugaacaacgccaccaacguggucaucaaggugugcgaguuccaguucugcaacgaccccuuccucggcguguacuaccacaagaacaacaagagcuggauggaguccgaguuccgggucuacagcuccgccaacaacugcacguucgaguacgugagccagcccuuccugauggaccuggagggcaagcaggggaacuucaagaaccuccgcgaguucguguucaagaacaucgacggcuacuucaagaucuacuccaagcacaccccgaucaaccugguccgggaccugccccagggguucagcgcccucgagccccugguggaccugcccaucggcaucaacaucacccgcuuccagacccuccuggcccugcaccgguccuaccucacgccgggggacagcagcuccggcuggaccgcgggcgccgccgccuacuacgugggguaccugcagccccgcaccuuccugcucaaguacaacgagaacggcaccaucacggacgcggucgacugcgcccuggacccccugagcgagaccaagugcacccucaaguccuucaccguggagaaggggaucuaccagacgagcaacuuccgggugcagcccaccgaguccaucguccgcuucccgaacaucaccaaccugugccccuucggcgagguguucaacgccacccgguucgccagcgucuacgccuggaaccgcaagcggaucuccaacugcguggcggacuacagcgugcuguacaacuccgccagcuucuccacguucaagugcuacggcgucagccccaccaagcucaacgaccugugcuucaccaacguguacgccgacuccuucgugauccgcggggacgagguccggcagaucgcccccggccagaccgggaagaucgccgacuacaacuacaagcugccggacgacuucacgggcugcgugaucgcguggaacagcaacaaccucgacuccaaggucgggggcaacuacaacuaccuguaccgccuguuccgcaagagcaaccucaagcccuucgagcgggacaucuccaccgagaucuaccaggccggcagcacccccugcaacgggguggagggcuucaacugcuacuucccccugcaguccuacggguuccagccgaccaacggcgugggguaccagcccuaccggguggucgugcugagcuucgagcuccugcacgcccccgccacggugugcggccccaagaaguccaccaaccuggucaagaacaagugcgugaacuucaacuucaacggccucaccgggaccggcgugcugaccgagagcaacaagaaguuccugccguuccagcaguucgggcgcgacaucgccgacacgaccgacgcgguccgcgacccccagacccuggagauccucgacaucacccccugcagcuucggcgggguguccgugaucacgccgggcaccaacaccagcaaccaggucgccgugcuguaccagggcgugaacugcaccgagguccccguggccauccacgccgaccagcugacgcccaccuggcggguguacuccaccgggagcaacgucuuccagacccgcgccggcugccucaucggggcggagcacgugaacaacuccuacgagugcgacauccccaucggcgccggcaucugcgccagcuaccagacgcagaccaacuccccgcggcgcgcccggagcguggcgucccagagcaucaucgccuacaccaugucccugggggccgagaacagcgucgccuacuccaacaacagcaucgccauccccaccaacuucacgaucuccgugaccaccgagauccugcccgugagcaugaccaagacgagcgucgacugcaccauguacaucugcggcgacuccaccgagugcagcaaccuccugcugcaguacggguccuucugcacccagcucaaccgcgcgcugacgggcaucgccguggagcaggacaagaacacccaggagguguucgcccaggucaagcagaucuacaagacgcccccgaucaaggacuucgggggcuucaacuucagccagauccugcccgaccccuccaagcccagcaagcgguccuucaucgaggaccuccuguucaacaaggugacccuggccgacgccggcuucaucaagcaguacggggacugccucggcgacaucgcggcccgcgaccugaucugcgcccagaaguucaacgggcugaccgugcucccgccccugcugaccgacgagaugaucgcccaguacaccagcgcccuccuggcgggcaccaucacguccggguggaccuucggcgccggcgccgcccugcagauccccuucgcgaugcagauggccuaccgguucaacgggaucggcgucacccagaacgugcucuacgagaaccagaagcugaucgccaaccaguucaacagcgccaucgggaagauccaggacucccugagcuccaccgccagcgcgcucggcaagcugcaggacguggucaaccagaacgcccaggcccugaacacgcucgugaagcagcuguccagcaacuucggggccaucuccagcgugcugaacgacauccucucccgccuggacaaggucgaggccgaggugcagaucgaccggcugaucaccggccgccuccagagccugcagaccuacgugacccagcagcugauccgggcggccgagauccgcgccagcgccaaccucgccgcgaccaagauguccgagugcguccugggccagagcaagcggguggacuucugcgggaagggcuaccaccugauguccuucccccagagcgccccgcacgggguggucuuccuccacgugacguacguccccgcccaggagaagaacuucaccaccgcccccgcgaucugccacgacggcaaggcccacuucccccgcgaggggguguucguguccaacggcacccacugguucgucacgcagcggaacuucuacgagccgcagaucaucaccaccgacaacaccuucgugagcggcaacugcgacguggucaucgggguggugaacaacacggucuacgacccccugcagcccgagcuggacuccuucaaggaggagcucgacaaguacuucaagaaccacaccagccccgacguggaccugggcgacaucuccgggaucaacgccagcguggucaacauccagaaggagaucgaccgccugaacgagguggccaagaaccucaacgagucccugaucgaccugcaggagcucggcaaguacgagcaguacaucaaguggccgugguacaucuggcugggcuucaucgccgggcugaucgcgaucgugauggucaccaucaugcucugcugcaugaccagcugcugcuccugccugaagggcugcugcagcugcggguccugcugcaaguucgacgaggacgacagcgagcccgugcugaagggcgugaagcuccacuacacgugaggacuagucccuguucccagagcccacuuuuuuuucuuuuuuugaaauaaaauagccugucuuucagaucucaaaggcucuuuucagagccaccaaaaaaaaaaaaaaaaaaaaaaaaaaaaaaaaaaaaaaaaaaaaaaaaaaaaaaaaaaaaaaaaaaaaaaaaaaaaaaaaaaaaaaaaaaaaaaaaaaaaa

SEQ ID NO: 12300 - RNA, 4094 nt, Artificial Sequence
  SARS-CoV-2/Netherlands/ZuidHolland_9/2020__EPI_ISL_414445 spike protein mRNA gc (1-1273)
aggagagucccgcagucggcguccagcggcucugcuuguucgugugugugucguugcaggccuuauucaagcuuaccauguucguguuccugguccuccugccccuggugagcucccagugcgugaaccucaccacccgcacgcagcugccgcccgccuacaccaacagcuucacccggggcgucuacuaccccgacaagguguuccgcuccagcgugcugcacuccacccaggaccucuuccugcccuucuucagcaacgucacgugguuccacgccauccacguguccgggaccaacggcaccaagcgguucgacaacccggugcugcccuucaacgacggggucuacuucgcgagcaccgagaaguccaacaucauccgcggcuggaucuucgggacgacccucgacagcaagacccagucccugcugaucgugaacaacgccaccaacguggucaucaaggugugcgaguuccaguucugcaacgaccccuuccucggcguguacuaccacaagaacaacaagagcuggauggaguccgaguuccgggucuacagcuccgccaacaacugcacguucgaguacgugagccagcccuuccugauggaccuggagggcaagcaggggaacuucaagaaccuccgcgaguucguguucaagaacaucgacggcuacuucaagaucuacuccaagcacaccccgaucaaccugguccgggaccugccccagggguucagcgcccucgagccccugguggaccugcccaucggcaucaacaucacccgcuuccagacccuccuggcccugcaccgguccuaccucacgccgggggacagcagcuccggcuggaccgcgggcgccgccgccuacuacgugggguaccugcagccccgcaccuuccugcucaaguacaacgagaacggcaccaucacggacgcggucgacugcgcccuggacccccugagcgagaccaagugcacccucaaguccuucaccguggagaaggggaucuaccagacgagcaacuuccgggugcagcccaccgaguccaucguccgcuucccgaacaucaccaaccugugccccuucggcgagguguucaacgccacccgguucgccagcgucuacgccuggaaccgcaagcggaucuccaacugcguggcggacuacagcgugcuguacaacuccgccagcuucuccacguucaagugcuacggcgucagccccaccaagcucaacgaccugugcuucaccaacguguacgccgacuccuucgugauccgcggggacgagguccggcagaucgcccccggccagaccgggaagaucgccgacuacaacuacaagcugccggacgacuucacgggcugcgugaucgcguggaacagcaacaaccucgacuccaaggucgggggcaacuacaacuaccuguaccgccuguuccgcaagagcaaccucaagcccuucgagcgggacaucuccaccgagaucuaccaggccggcagcacccccugcaacgggguggagggcuucaacugcuacuucccccugcaguccuacggguuccagccgaccaacggcgugggguaccagcccuaccggguggucgugcugagcuucgagcuccugcacgcccccgccacggugugcggccccaagaaguccaccaaccuggucaagaacaagugcgugaacuucaacuucaacggccucaccgggaccggcgugcugaccgagagcaacaagaaguuccugccguuccagcaguucgggcgcgacaucgccgacacgaccgacgcgguccgcgacccccagacccuggagauccucgacaucacccccugcagcuucggcgggguguccgugaucacgccgggcaccaacaccagcaaccaggucgccgugcuguaccagggcgugaacugcaccgagguccccguggccauccacgccgaccagcugacgcccaccuggcggguguacuccaccgggagcaacgucuuccagacccgcgccggcugccucaucggggcggagcacgugaacaacuccuacgagugcgacauccccaucggcgccggcaucugcgccagcuaccagacgcagaccaacuccccgcggcgcgcccggagcguggcgucccagagcaucaucgccuacaccaugucccugggggccgagaacagcgucgccuacuccaacaacagcaucgccauccccaccaacuucacgaucuccgugaccaccgagauccugcccgugagcaugaccaagacgagcgucgacugcaccauguacaucugcggcgacuccaccgagugcagcaaccuccugcugcaguacggguccuucugcacccagcucaaccgcgcgcugacgggcaucgccguggagcaggacaagaacacccaggagguguucgcccaggucaagcagaucuacaagacgcccccgaucaaggacuucgggggcuucaacuucagccagauccugcccgaccccuccaagcccagcaagcgguccuucaucgaggaccuccuguucaacaaggugacccuggccgacgccggcuucaucaagcaguacggggacugccucggcgacaucgcggcccgcgaccugaucugcgugcagaaguucaacgggcugaccguccucccgccccugcugaccgacgagaugaucgcccaguacaccagcgcccuccuggccggcaccaucacguccggguggaccuucggcgcgggcgccgcccugcagauccccuucgccaugcagauggcguaccgguucaacgggaucggcgugacccagaacgugcucuacgagaaccagaagcugaucgccaaccaguucaacagcgccaucgggaagauccaggacucccugagcuccaccgccagcgcccucggcaagcugcaggacgucgugaaccagaacgcgcaggcccugaacacgcucgugaagcagcuguccagcaacuucggggccaucuccagcguccugaacgacauccucucccgccuggacaagguggaggccgaggugcagaucgaccggcugaucaccggccgccuccagagccugcagaccuacgucacccagcagcugauccgggccgcggagauccgcgccagcgccaaccucgccgccaccaagauguccgagugcgugcugggccagagcaagcggguggacuucugcgggaagggcuaccaccugauguccuucccccagagcgcgccgcacggggucguguuccuccacgucacguacgugcccgcccaggagaagaacuucaccaccgcccccgccaucugccacgacggcaaggcgcacuucccccgcgaggggguguucgucuccaacggcacccacugguucgugacgcagcggaacuucuacgagccgcagaucaucaccaccgacaacaccuucgugagcggcaacugcgacgucgugaucgggaucgugaacaacacggucuacgacccccugcagcccgagcuggacuccuucaaggaggagcucgacaaguacuucaagaaccacaccagccccgacguggaccugggcgacaucuccgggaucaacgccagcguggucaacauccagaaggagaucgaccgccugaacgagguggccaagaaccucaacgagucccugaucgaccugcaggagcucggcaaguacgagcaguacaucaaguggccgugguacaucuggcugggcuucaucgccgggcugaucgccaucgugauggucaccaucaugcucugcugcaugaccagcugcugcuccugccugaagggcugcugcagcugcggguccugcugcaaguucgacgaggacgacagcgagcccgugcugaagggcgugaagcuccacuacacgugaggacuagucccuguucccagagcccacuuuuuuuucuuuuuuugaaauaaaauagccugucuuucagaucucaaaggcucuuuucagagccaccaaaaaaaaaaaaaaaaaaaaaaaaaaaaaaaaaaaaaaaaaaaaaaaaaaaaaaaaaaaaaaaaaaaaaaaaaaaaaaaaaaaaaaaaaaaaaaaaaaaaa

SEQ ID NO: 12301 - RNA, 4094 nt, Artificial Sequence
  SARS-CoV-2/Finland/FIN03032020A/2020__EPI_ISL_413602 spike protein mRNA gc (1-1273)
aggagagucccgcagucggcguccagcggcucugcuuguucgugugugugucguugcaggccuuauucaagcuuaccauguucguguuccugguccuccugccccuggugagcucccagugcgugaaccucaccacccgcacgcagcugccgcccgccuacaccaacagcuucacccggggcgucuacuaccccgacaagguguuccgcuccagcgugcugcacuccacccaggaccucuuccugcccuucuucagcaacgucacgugguuccacgccauccacguguccgggaccaacggcaccaagcgguucgacaacccggugcugcccuucaacgacggggucuacuucgcgagcaccgagaaguccaacaucauccgcggcuggaucuucgggacgacccucgacagcaagacccagucccugcugaucgugaacaacgccaccaacguggucaucaaggugugcgaguuccaguucugcaacgaccccuuccucggcguguacuaccacaagaacaacaagagcuggauggaguccgaguuccgggucuacagcuccgccaacaacugcacguucgaguacgugagccagcccuuccugauggaccuggagggcaagcaggggaacuucaagaaccuccgcgaguucguguucaagaacaucgacggcuacuucaagaucuacuccaagcacaccccgaucaaccugguccgggaccugccccagggguucagcgcccucgagccccugguggaccugcccaucggcaucaacaucacccgcuuccagacccuccuggcccugcaccgguccuaccucacgccgggggacagcagcuccggcuggaccgcgggcgccgccgccuacuacgugggguaccugcagccccgcaccuuccugcucaaguacaacgagaacggcaccaucacggacgcggucgacugcgcccuggacccccugagcgagaccaagugcacccucaaguccuucaccguggagaaggggaucuaccagacgagcaacuuccgggugcagcccaccgaguccaucguccgcuucccgaacaucaccaaccugugccccuucggcgagguguucaacgccacccgguucgccagcgucuacgccuggaaccgcaagcggaucuccaacugcguggcggacuacagcgugcuguacaacuccgccagcuucuccacguucaagugcuacggcgucagccccaccaagcucaacgaccugugcuucaccaacguguacgccgacuccuucgugauccgcggggacgagguccggcagaucgcccccggccagaccgggaagaucgccgacuacaacuacaagcugccggacgacuucacgggcugcgugaucagcuggaacuccaacaaccucgacagcaaggucgggggcaacuacaacuaccuguaccgccuguuccggaaguccaaccucaagcccuucgagcgcgacaucagcaccgagaucuaccaggcgggcuccacccccugcaacgggguggagggcuucaacugcuacuucccccugcagagcuacggguuccagccgaccaacggcgugggguaccagcccuaccggguggucgugcugagcuucgagcuccugcacgcccccgccacggugugcggccccaagaaguccaccaaccuggucaagaacaagugcgugaacuucaacuucaacggccucaccgggaccggcgugcugaccgagagcaacaagaaguuccugccguuccagcaguucgggcgcgacaucgccgacacgaccgacgccguccgcgacccccagacccuggagauccucgacaucacccccugcuccuucggcggggugagcgugaucacgccgggcaccaacaccuccaaccaggucgcggugcuguaccagggcgugaacugcaccgagguccccguggccauccacgccgaccagcugacgcccaccuggcggguguacagcaccggguccaacgucuuccagacccgcgccggcugccucaucggggccgagcacgugaacaacagcuacgagugcgacauccccaucggcgcgggcaucugcgccuccuaccagacgcagaccaacagcccgcggcgcgcccgguccguggccagccaguccaucaucgcguacaccaugagccugggggccgagaacuccgucgccuacagcaacaacuccaucgccauccccaccaacuucacgaucagcgugaccaccgagauccugcccgugagcaugaccaagacguccgucgacugcaccauguacaucugcggcgacagcaccgagugcuccaaccuccugcugcaguacgggagcuucugcacccagcucaaccgcgcccugacgggcaucgcgguggagcaggacaagaacacccaggagguguucgcccaggucaagcagaucuacaagacgcccccgaucaaggacuucgggggcuucaacuucucccagauccugcccgaccccagcaagcccuccaagcggagcuucaucgaggaccuccuguucaacaaggugacccuggccgacgccggcuucaucaagcaguacggggacugccucggcgacaucgccgcgcgcgaccugaucugcgcccagaaguucaacgggcugaccgugcucccgccccugcugaccgacgagaugaucgcccaguacaccuccgcccuccuggccggcaccaucacgagcggguggaccuucggcgcgggcgccgcccugcagauccccuucgccaugcagauggcguaccgguucaacgggaucggcgucacccagaacgugcucuacgagaaccagaagcugaucgccaaccaguucaacuccgccaucgggaagauccaggacagccuguccagcaccgccuccgcccucggcaagcugcaggacguggucaaccagaacgcgcaggcccugaacacgcucgugaagcagcugagcuccaacuucggggccaucagcuccgugcugaacgacauccucagccgccuggacaaggucgaggccgaggugcagaucgaccggcugaucaccggccgccuccagagccugcagaccuacgugacccagcagcugauccgggccgcggagauccgcgccuccgccaaccucgccgccaccaagaugagcgagugcguccugggccaguccaagcggguggacuucugcgggaagggcuaccaccugaugagcuucccccaguccgcgccgcacgggguggucuuccuccacgugacguacguccccgcccaggagaagaacuucaccaccgcccccgccaucugccacgacggcaaggcgcacuucccccgcgaggggguguucgugagcaacggcacccacugguucgucacgcagcggaacuucuacgagccgcagaucaucaccaccgacaacaccuucguguccggcaacugcgacguggucaucgggaucgugaacaacacgguguacgacccccugcagcccgagcuggacagcuucaaggaggagcucgacaaguacuucaagaaccacaccucccccgacgucgaccugggcgacaucagcgggaucaacgccuccguggugaacauccagaaggagaucgaccgccugaacgaggucgccaagaaccucaacgagagccugaucgaccugcaggagcucggcaaguacgagcaguacaucaaguggccgugguacaucuggcugggcuucaucgccgggcugaucgccaucgugauggugaccaucaugcucugcugcaugaccuccugcugcagcugccugaagggcugcugcuccugcgggagcugcugcaaguucgacgaggacgacuccgagcccguccugaagggcgugaagcuccacuacacgugaggacuagucccuguucccagagcccacuuuuuuuucuuuuuuugaaauaaaauagccugucuuucagaucucaaaggcucuuuucagagccaccaaaaaaaaaaaaaaaaaaaaaaaaaaaaaaaaaaaaaaaaaaaaaaaaaaaaaaaaaaaaaaaaaaaaaaaaaaaaaaaaaaaaaaaaaaaaaaaaaaaaa

SEQ ID NO: 12302 - RNA, 4094 nt, Artificial Sequence
  SARS-CoV-2/France/GE1977/2020__EPI_ISL_414632 spike protein mRNA gc (1-1273)
aggagagucccgcagucggcguccagcggcucugcuuguucgugugugugucguugcaggccuuauucaagcuuaccauguucguguuccugguccuccugccccuggugagcucccagugcgugaaccucaccacccgcacgcagcugccgcccgccuacaccaacagcuucacccggggcgucuacuaccccgacaagguguuccgcuccagcgugcugcacuccacccaggaccucuuccugcccuucuucagcaacgucacgugguuccacgccauccacguguccgggaccaacggcaccaagcgguucgacaacccggugcugcccuucaacgacggggucuacuucgcgagcaccgagaaguccaacaucauccgcggcuggaucuucgggacgacccucgacagcaagacccagucccugcugaucgugaacaacgccaccaacguggucaucaaggugugcgaguuccaguucugcaacgaccccuuccucggcguguacuaccacaagaacaacaagagcuggauggaguccgaguuccgggucuacagcuccgccaacaacugcacguucgaguacgugagccagcccuuccugauggaccuggagggcaagcaggggaacuucaagaaccuccgcgaguucguguucaagaacaucgacggcuacuucaagaucuacuccaagcacaccccgaucaaccugguccgggaccugccccagggguucagcgcccucgagccccugguggaccugcccaucggcaucaacaucacccgcuuccagacccuccuggcccugcaccgguccuaccucacgccgggggacagcagcuccggcuggaccgcgggcgccgccgccuacuacgugggguaccugcagccccgcaccuuccugcucaaguacaacgagaacggcaccaucacggacgcggucgacugcgcccuggacccccugagcgagaccaagugcacccucaaguccuucaccguggagaaggggaucuaccagacgagcaacuuccgggugcagcccaccgaguccaucguccgcuucccgaacaucaccaaccugugccccuucggcgagguguucaacgccacccgguucgccagcgucuacgccuggaaccgcaagcggaucuccaacugcguggcggacuacagcgugcuguacaacuccgccagcuucuccacguucaagugcuacggcgucagccccaccaagcucaacgaccugugcuucaccaacguguacgccgacuccuucgugauccgcggggacgagguccggcagaucgcccccggccagaccgggaagaucgccgacuacaacuacaagcugccggacgacuucacgggcugcgugaucgcguggaacagcaacaaccucgacuccaaggucgggggcaacuacaacuaccuguaccgccuguuccgcaagagcaaccucaagcccuucgagcgggacaucuccaccgagaucuaccaggccggcagcacccccugcaacgggguggagggcuucaacugcuacuucccccugcaguccuacggguuccagccgaccaacggcgugggguaccagcccuaccggguggucgugcugagcuucgagcuccugcacgcccccgccacggugugcggccccaagaaguccaccaaccuggucaagaacaagugcgugaacuucaacuucaacggccucaccgggaccggcgugcugaccgagagcaacaagaaguuccugccguuccagcaguucgggcgcgacaucgccgacacgaccgacgcgguccgcgacccccagacccuggagauccucgacaucacccccugcagcuucggcgggguguccgugaucacgccgggcaccaacaccagcaaccaggucgccgugcuguaccagggcgugaacugcaccgagguccccguggccauccacgccgaccagcugacgcccaccuggcggguguacuccaccgggagcaacgucuuccagacccgcgccggcugccucaucggggcggagcacgugaacaacuccuacgagugcgacauccccaucggcgccggcaucugcgccagcuaccagacgcagaccaacuccccgcggcgcgcccggagcguggcgucccagagcaucaucgccuacaccaugucccugggggccgagaacagcgucgccuacuccaacaacagcaucgccauccccaccaacuucacgaucuccgugaccaccgagauccugcccgugagcaugaccaagacgagcgucgacugcaccauguacaucugcggcgacuccaccgagugcagcaaccuccugcugcaguacggguccuucugcacccagcucaaccgcgcgcugacgggcaucgccguggagcaggacaagaacacccaggagguguucgcccaggucaagcagaucuacaagacgcccccgaucaaggacuucgggggcuucaacuucagccagauccugcccgaccccuccaagcccagcaagcgguccuucaucgaggaccuccuguucaacaaggugacccuggccgacgccggcuucaucaagcaguacggggacugccucggcgacaucgcggcccgcgaccugaucugcgcccagaaguucaacgggcugaccgugcucccgccccugcugaccgacgagaugaucgcccaguacaccagcgcccuccuggcgggcaccaucacguccggguggaccuucggcgccggcgccgcccugcagauccccuucgcgaugcagauggccuaccgguucaacgggaucggcgucacccagaacgugcucuacgagaaccagaagcugaucgccaaccaguucaacagcgccaucgggaagauccaggacucccuguucagcaccgccuccgcgcucggcaagcugcaggacguggucaaccagaacgcccaggcccugaacacgcucgugaagcagcugagcuccaacuucggggccaucagcuccgugcugaacgacauccucagccgccuggacaaggucgaggccgaggugcagaucgaccggcugaucaccggccgccuccagucccugcagaccuacgugacccagcagcugauccgggcggccgagauccgcgccagcgccaaccucgccgcgaccaagaugagcgagugcguccugggccaguccaagcggguggacuucugcgggaagggcuaccaccugaugagcuucccccaguccgccccgcacgggguggucuuccuccacgugacguacguccccgcccaggagaagaacuucaccaccgcccccgcgaucugccacgacggcaaggcccacuucccccgcgaggggguguucgugagcaacggcacccacugguucgucacgcagcggaacuucuacgagccgcagaucaucaccaccgacaacaccuucguguccggcaacugcgacguggucaucgggaucgugaacaacacgguguacgacccccugcagcccgagcuggacagcuucaaggaggagcucgacaaguacuucaagaaccacaccucccccgacgucgaccugggcgacaucagcgggaucaacgccuccguggugaacauccagaaggagaucgaccgccugaacgaggucgccaagaaccucaacgagagccugaucgaccugcaggagcucggcaaguacgagcaguacaucaaguggccgugguacaucuggcugggcuucaucgccgggcugaucgcgaucgugauggugaccaucaugcucugcugcaugaccuccugcugcagcugccugaagggcugcugcuccugcgggagcugcugcaaguucgacgaggacgacuccgagcccguccugaagggcgugaagcuccacuacacgugaggacuagucccuguucccagagcccacuuuuuuuucuuuuuuugaaauaaaauagccugucuuucagaucucaaaggcucuuuucagagccaccaaaaaaaaaaaaaaaaaaaaaaaaaaaaaaaaaaaaaaaaaaaaaaaaaaaaaaaaaaaaaaaaaaaaaaaaaaaaaaaaaaaaaaaaaaaaaaaaaaaaa

SEQ ID NO: 12303 - RNA, 4094 nt, Artificial Sequence
  SARS-CoV-2/Finland/FIN-313/2020__EPI_ISL_414641 spike protein mRNA gc (1-1273)
aggagagucccgcagucggcguccagcggcucugcuuguucgugugugugucguugcaggccuuauucaagcuuaccauguucguguuccugguccuccugccccuggugagcucccagugcgugaaccucaccacccgcacgcagcugccgcccgccuacaccaacagcuucacccggggcgucuacuaccccgacaagguguuccgcuccagcgugcugcacuccacccaggaccucuuccugcccuucuucagcaacgucacgugguuccacgccauccacguguccgggaccaacggcaccaagcgguucgacaacccggugcugcccuucaacgacggggucuacuucgcgagcaccgagaaguccaacaucauccgcggcuggaucuucgggacgacccucgacagcaagacccagucccugcugaucgugaacaacgccaccaacguggucaucaaggugugcgaguuccaguucugcaacgaccccuuccucggcguguacuaccacaagaacaacaagagcuggauggaguccgaguuccgggucuacagcuccgccaacaacugcacguucgaguacgugagccagcccuuccugauggaccuggagggcaagcaggggaacuucaagaaccuccgcgaguucguguucaagaacaucgacggcuacuucaagaucuacuccaagcacaccccgaucaaccugguccgggaccugccccagggguucagcgcccucgagccccugguggaccugcccaucggcaucaacaucacccgcuucaagacccuccuggcccugcaccgguccuaccucacgccgggggacagcagcuccggcuggaccgcgggcgccgccgccuacuacgugggguaccugcagccccgcaccuuccugcucaaguacaacgagaacggcaccaucacggacgcggucgacugcgcccuggacccccugagcgagaccaagugcacccucaaguccuucaccguggagaaggggaucuaccagacgagcaacuuccgggugcagcccaccgaguccaucguccgcuucccgaacaucaccaaccugugccccuucggcgagguguucaacgccacccgguucgccagcgucuacgccuggaaccgcaagcggaucuccaacugcguggcggacuacagcgugcuguacaacuccgccagcuucuccacguucaagugcuacggcgucagccccaccaagcucaacgaccugugcuucaccaacguguacgccgacuccuucgugauccgcggggacgagguccggcagaucgcccccggccagaccgggaagaucgccgacuacaacuacaagcugccggacgacuucacgggcugcgugaucgcguggaacagcaacaaccucgacuccaaggucgggggcaacuacaacuaccuguaccgccuguuccgcaagagcaaccucaagcccuucgagcgggacaucuccaccgagaucuaccaggccggcagcacccccugcaacgggguggagggcuucaacugcuacuucccccugcaguccuacggguuccagccgaccaacggcgugggguaccagcccuaccggguggucgugcugagcuucgagcuccugcacgcccccgccacggugugcggccccaagaaguccaccaaccuggucaagaacaagugcgugaacuucaacuucaacggccucaccgggaccggcgugcugaccgagagcaacaagaaguuccugccguuccagcaguucgggcgcgacaucgccgacacgaccgacgcgguccgcgacccccagacccuggagauccucgacaucacccccugcagcuucggcgggguguccgugaucacgccgggcaccaacaccagcaaccaggucgccgugcuguaccagggcgugaacugcaccgagguccccguggccauccacgccgaccagcugacgcccaccuggcggguguacuccaccgggagcaacgucuuccagacccgcgccggcugccucaucggggcggagcacgugaacaacuccuacgagugcgacauccccaucggcgccggcaucugcgccagcuaccagacgcagaccaacuccccgcggcgcgcccggagcguggcgucccagagcaucaucgccuacaccaugucccugggggccgagaacagcgucgccuacuccaacaacagcaucgccauccccaccaacuucacgaucuccgugaccaccgagauccugcccgugagcaugaccaagacgagcgucgacugcaccauguacaucugcggcgacuccaccgagugcagcaaccuccugcugcaguacggguccuucugcacccagcucaaccgcgcgcugacgggcaucgccguggagcaggacaagaacacccaggagguguucgcccaggucaagcagaucuacaagacgcccccgaucaaggacuucgggggcuucaacuucagccagauccugcccgaccccuccaagcccagcaagcgguccuucaucgaggaccuccuguucaacaaggugacccuggccgacgccggcuucaucaagcaguacggggacugccucggcgacaucgcggcccgcgaccugaucugcgcccagaaguucaacgggcugaccgugcucccgccccugcugaccgacgagaugaucgcccaguacaccagcgcccuccuggcgggcaccaucacguccggguggaccuucggcgccggcgccgcccugcagauccccuucgcgaugcagauggccuaccgguucaacgggaucggcgucacccagaacgugcucuacgagaaccagaagcugaucgccaaccaguucaacagcgccaucgggaagauccaggacucccugagcuccaccgccagcgcgcucggcaagcugcaggacguggucaaccagaacgcccaggcccugaacacgcucgugaagcagcuguccagcaacuucggggccaucuccagcgugcugaacgacauccucucccgccuggacaaggucgaggccgaggugcagaucgaccggcugaucaccggccgccuccagagccugcagaccuacgugacccagcagcugauccgggcggccgagauccgcgccagcgccaaccucgccgcgaccaagauguccgagugcguccugggccagagcaagcggguggacuucugcgggaagggcuaccaccugauguccuucccccagagcgccccgcacgggguggucuuccuccacgugacguacguccccgcccaggagaagaacuucaccaccgcccccgcgaucugccacgacggcaaggcccacuucccccgcgaggggguguucguguccaacggcacccacugguucgucacgcagcggaacuucuacgagccgcagaucaucaccaccgacaacaccuucgugagcggcaacugcgacguggucaucgggaucgugaacaacacgguguacgacccccugcagcccgagcuggacuccuucaaggaggagcucgacaaguacuucaagaaccacaccagccccgacgucgaccugggcgacaucuccgggaucaacgccagcguggugaacauccagaaggagaucgaccgccugaacgaggucgccaagaaccucaacgagucccugaucgaccugcaggagcucggcaaguacgagcaguacaucaaguggccgugguacaucuggcugggcuucaucgccgggcugaucgcgaucgugauggugaccaucaugcucugcugcaugaccagcugcugcuccugccugaagggcugcugcagcugcggguccugcugcaaguucgacgaggacgacagcgagcccguccugaagggcgugaagcuccacuacacgugaggacuagucccuguucccagagcccacuuuuuuuucuuuuuuugaaauaaaauagccugucuuucagaucucaaaggcucuuuucagagccaccaaaaaaaaaaaaaaaaaaaaaaaaaaaaaaaaaaaaaaaaaaaaaaaaaaaaaaaaaaaaaaaaaaaaaaaaaaaaaaaaaaaaaaaaaaaaaaaaaaaaa

SEQ ID NO: 12304 - RNA, 4094 nt, Artificial Sequence
  SARS-CoV-2/Netherlands/ZuidHolland_2/2020__EPI_ISL_414556 spike protein mRNA gc (1-1273)
aggagagucccgcagucggcguccagcggcucugcuuguucgugugugugucguugcaggccuuauucaagcuuaccauguucguguuccugguccuccugccccuggugagcucccagugcgugaaccucaccacccgcacgcagcugccgcccgccuacaccaacagcuucacccggggcgucuacuaccccgacaagguguuccgcuccagcgugcugcacuccacccaggaccucuuccugcccuucuucagcaacgucacgugguuccacgccauccacguguccgggaccaacggcaccaagcgguucgacaacccggugcugcccuucaacgacggggucuacuucgcgagcaccgagaaguccaacaucauccgcggcuggaucuucgggacgacccucgacagcaagacccagucccugcugaucgugaacaacgccaccaacguggucaucaaggugugcgaguuccaguucugcaacgaccccuuccucggcguguacuaccacaagaacaacaagagcuggauggaguccgaguuccgggucuacagcuccgccaacaacugcacguucgaguacgugagccagcccuuccugauggaccuggagggcaagcaggggaacuucaagaaccuccgcgaguucguguucaagaacaucgacggcuacuucaagaucuacuccaagcacaccccgaucaaccugguccgggaccugccccagggguucagcgcccucgagccccugguggaccugcccaucggcaucaacaucacccgcuuccagacccuccuggcccugcaccgguccuaccucacgccgggggacagcagcuccggcuggaccgcgggcgccgccgccuacuacgugggguaccugcagccccgcaccuuccugcucaaguacaacgagaacggcaccaucacggacgcggucgacugcgcccuggacccccugagcgagaccaagugcacccucaaguccuucaccguggagaaggggaucuaccagacgagcaacuuccgggugcagcccaccgaguccaucguccgcuucccgaacaucaccaaccugugccccuucggcgagguguucaacgccacccgguucgccagcgucuacgccuggaaccgcaagcggaucuccaacugcguggcggacuacagcgugcuguacaacuccgccagcuucuccacguucaagugcuacggcgucagccccaccaagcucaacgaccugugcuucaccaacguguacgccgacuccuucgugauccgcggggacgagguccggcagaucgcccccggccagaccgggaagaucgccgacuacaacuacaagcugccggacgacuucacgggcugcgugaucgcguggaacagcaacaaccucgacuccaaggucgggggcaacuacaacuaccuguaccgccuguuccgcaagagcaaccucaagcccuucgagcgggacaucuccaccgagaucuaccaggccggcagcacccccugcaacgggguggagggcuucaacugcuacuucccccugcaguccuacggguuccagccgaccaacggcgugggguaccagcccuaccggguggucgugcugagcuucgagcuccugcacgcccccgccacggugugcggccccaagaaguccaccaaccuggucaagaacaagugcgugaacuucaacuucaacggccucaccgggaccggcgugcugaccgagagcaacaagaaguuccugccguuccagcaguucgggcgcgacaucgccgacacgaccgacgcgguccgcgacccccagacccuggagauccucgacaucacccccugcagcuucggcgggguguccgugaucacgccgggcaccaacaccagcaaccaggucgccgugcuguaccagggcgugaacugcaccgagguccccguggccauccacgccgaccagcugacgcccaccuggcggguguacuccaccgggagcaacgucuuccagacccgcgccggcugccucaucggggcggagcacgugaacaacuccuacgagugcgacauccccaucggcgccggcaucugcgccagcuaccagacgcagaccaacuccccgcggcgcgcccggagcguggcgucccagagcaucaucgccuacaccaugucccugggggccgagaacagcgucgccuacuccaacaacagcaucgccauccccaccaacuucacgaucuccgugaccaccgagauccugcccgugagcaugaccaagacgagcgucgacugcaccauguacaucugcggcgacuccaccgagugcagcaaccuccugcugcaguacggguccuucugcacccagcucaaccgcgcgcugacgggcaucgcccuggagcaggacaagaacacccaggagguguucgcccaggugaagcagaucuacaagacgcccccgaucaaggacuucgggggcuucaacuucagccagauccuccccgaccccuccaagcccagcaagcgguccuucaucgaggaccugcuguucaacaaggucacccucgccgacgccggcuucaucaagcaguacggggacugccugggcgacaucgcggcccgcgaccugaucugcgcccagaaguucaacgggcucaccgugcugccgccccugcucaccgacgagaugaucgcccaguacaccagcgcccugcuggcgggcaccaucacguccggguggaccuucggcgccggcgccgcccuccagauccccuucgcgaugcagauggccuaccgguucaacgggaucggcgugacccagaacguccuguacgagaaccagaagcugaucgccaaccaguucaacagcgccaucgggaagauccaggacucccucagcuccaccgccagcgcgcugggcaagcugcaggacguggugaaccagaacgcccaggcccucaacacgcuggucaagcagcuguccagcaacuucggggccaucuccagcgugcucaacgacauccugucccgccuggacaagguggaggccgagguccagaucgaccggcucaucaccggccgccugcagagccugcagaccuacgugacccagcagcucauccgggcggccgagauccgcgccagcgccaaccuggccgcgaccaagauguccgagugcgugcugggccagagcaagcgggucgacuucugcgggaagggcuaccaccucauguccuucccccagagcgccccgcacggggugguguuccugcacgucacguacgugcccgcccaggagaagaacuucaccaccgcccccgcgaucugccacgacggcaaggcccacuucccccgcgagggggucuucguguccaacggcacccacugguucgugacgcagcggaacuucuacgagccgcagaucaucaccaccgacaacaccuucgucagcggcaacugcgacguggugaucgggaucgucaacaacacgguguacgacccccugcagcccgagcucgacuccuucaaggaggagcuggacaaguacuucaagaaccacaccagccccgacguggaccugggcgacaucuccgggaucaacgccagcgucgugaacauccagaaggagaucgaccgccucaacgagguggccaagaaccugaacgagucccugaucgaccuccaggagcugggcaaguacgagcaguacaucaaguggccgugguacaucuggcugggcuucaucgccgggcucaucgcgaucgucauggugaccaucaugcugugcugcaugaccagcugcugcuccugccugaagggcugcugcagcugcggguccugcugcaaguucgacgaggacgacagcgagcccgugcucaagggcgucaagcugcacuacacgugaggacuagucccuguucccagagcccacuuuuuuuucuuuuuuugaaauaaaauagccugucuuucagaucucaaaggcucuuuucagagccaccaaaaaaaaaaaaaaaaaaaaaaaaaaaaaaaaaaaaaaaaaaaaaaaaaaaaaaaaaaaaaaaaaaaaaaaaaaaaaaaaaaaaaaaaaaaaaaaaaaaaa

SEQ ID NO: 12305 - RNA, 4094 nt, Artificial Sequence
  SARS-CoV-2/USA/WA-UW31/2020__EPI_ISL_414618 spike protein mRNA gc (1-1273)
aggagagucccgcagucggcguccagcggcucugcuuguucgugugugugucguugcaggccuuauucaagcuuaccauguucguguuccugguccuccugccccuggugagcucccagugcgugaaccucaccacccgcacgcagcugccgcccgccuacaccaacagcuucacccggggcgucuacuaccccgacaagguguuccgcuccagcgugcugcacuccacccaggaccucuuccugcccuucuucagcaacgucacgugguuccacgccauccacguguccgggaccaacggcaccaagcgguucgacaacccggugcugcccuucaacgacggggucuacuucgcgagcaccgagaaguccaacaucauccgcggcuggaucuucgggacgacccucgacagcaagacccagucccugcugaucgugaacaacgccaccaacguggucaucaaggugugcgaguuccaguucugcaacgaccccuuccucggcguguacuaccacaagaacaacaagagcuggauggaguccgaguuccgggucuacagcuccgccaacaacugcacguucgaguacgugagccagcccuuccugauggaccuggagggcaagcaggggaacuucaagaaccuccgcgaguucguguucaagaacaucgacggcuacuucaagaucuacuccaagcacaccccgaucaaccugguccgggaccugccccagggguucagcgcccucgagccccugguggaccugcccaucggcaucaacaucacccgcuuccagacccuccuggcccugcaccgguccuaccucacgccgggggacagcagcuccggcuggaccgcgggcgccgccgccuacuacgugggguaccugcagccccgcaccuuccugcucaaguacaacgagaacggcaccaucacggacgcggucgacugcgcccuggacccccugagcgagaccaagugcacccucaaguccuucaccguggagaaggggaucuaccagacgagcaacuuccgggugcagcccaccgaguccaucguccgcuucccgaacaucaccaaccugugccccuucggcgagguguucaacgccacccgguucgccagcgucuacgccuggaaccgcaagcggaucuccaacugcguggcggacuacagcgugcuguacaacuccgccagcuucuccacguucaagugcuacggcgucagccccaccaagcucaacgaccugugcuucaccaacguguacgccgacuccuucgugauccgcggggacgagguccggcagaucgcccccggccagaccgggaagaucgccgacuacaacuacaagcugccggacgacuucacgggcugcgugaucgcguggaacagcaacaaccucgacuccaaggucgggggcaacuacaacuaccuguaccgccuguuccgcaagagcaaccucaagcccuucgagcgggacaucuccaccgagaucuaccaggccggcagcacccccugcaacggggccgagggcuucaacugcuacuucccccugcaguccuacggguuccagccgaccaacggcgugggguaccagcccuaccggguggugguccugagcuucgagcuccugcacgcccccgccacggugugcggccccaagaaguccaccaaccuggugaagaacaagugcgucaacuucaacuucaacggccucaccgggaccggcgugcugaccgagagcaacaagaaguuccugccguuccagcaguucgggcgcgacaucgcggacacgaccgacgccgugcgcgacccccagacccuggagauccucgacaucacccccugcagcuucggcggggucuccgugaucacgccgggcaccaacaccagcaaccagguggccguccuguaccaggacgugaacugcaccgaggugcccgucgccauccacgccgaccagcugacgcccaccuggcggguguacuccaccggcagcaacguguuccagacccgcgcggggugccucaucggcgccgagcacgucaacaacuccuacgagugcgacauccccaucggggccggcaucugcgccagcuaccagacgcagaccaacuccccgcggcgcgcgcggagcguggccucccagagcaucaucgccuacaccaugucccugggcgccgagaacagcguggccuacuccaacaacagcaucgcgauccccaccaacuucacgaucuccgucaccaccgagauccugcccgugagcaugaccaagacgagcguggacugcaccauguacaucugcggggacuccaccgagugcagcaaccuccugcugcaguacggcuccuucugcacccagcucaaccgcgcccugacggggaucgccgucgagcaggacaagaacacccaggagguguucgcccaggugaagcagaucuacaagacgcccccgaucaaggacuucggcggguucaacuucagccagauccugcccgaccccuccaagcccagcaagcgguccuucaucgaggaccuccuguucaacaaggucacccuggccgacgcgggcuucaucaagcaguacggcgacugccucggggacaucgccgcccgcgaccugaucugcgcccagaaguucaacggccugaccgugcucccgccccugcugaccgacgagaugaucgcccaguacaccagcgcgcuccuggccgggaccaucacguccggcuggaccuucggggccggcgccgcgcugcagauccccuucgccaugcagauggccuaccgguucaacggcaucggggugacccagaacguccucuacgagaaccagaagcugaucgccaaccaguucaacagcgccaucggcaagauccaggacucccugagcuccaccgcgagcgcccucgggaagcugcaggacguggugaaccagaacgcccaggcccugaacacgcucgucaagcagcuguccagcaacuucggcgccaucuccagcgugcugaacgacauccucucccgccuggacaagguggaggcggagguccagaucgaccggcugaucaccgggcgccuccagagccugcagaccuacgugacccagcagcugauccgggccgccgagauccgcgccagcgccaaccucgcggccaccaagauguccgagugcgugcugggccagagcaagcgggucgacuucugcggcaagggguaccaccugauguccuucccccagagcgccccgcacggcgugguguuccuccacgucacguacgugcccgcccaggagaagaacuucaccaccgcgcccgccaucugccacgacgggaaggcccacuucccccgcgagggcgucuucguguccaacgggacccacugguucgugacgcagcggaacuucuacgagccgcagaucaucaccaccgacaacaccuucgucagcggcaacugcgacguggugaucggcaucgucaacaacacgguguacgacccccugcagcccgagcuggacuccuucaaggaggagcucgacaaguacuucaagaaccacaccagccccgacguggaccugggggacaucuccggcaucaacgccagcgucgugaacauccagaaggagaucgaccgccugaacgagguggccaagaaccucaacgagucccugaucgaccugcaggagcucgggaaguacgagcaguacaucaaguggccgugguacaucuggcugggcuucaucgcgggccugaucgccaucgucauggugaccaucaugcucugcugcaugaccagcugcugcuccugccugaaggggugcugcagcugcggcuccugcugcaaguucgacgaggacgacagcgagcccgugcugaagggggucaagcuccacuacacgugaggacuagucccuguucccagagcccacuuuuuuuucuuuuuuugaaauaaaauagccugucuuucagaucucaaaggcucuuuucagagccaccaaaaaaaaaaaaaaaaaaaaaaaaaaaaaaaaaaaaaaaaaaaaaaaaaaaaaaaaaaaaaaaaaaaaaaaaaaaaaaaaaaaaaaaaaaaaaaaaaaaaa

SEQ ID NO: 12306 - RNA, 4094 nt, Artificial Sequence
  SARS-CoV-2/South Korea/SNU01/2020__EPI_ISL_411929 spike protein mRNA gc (1-1273)
aggagagucccgcagucggcguccagcggcucugcuuguucgugugugugucguugcaggccuuauucaagcuuaccauguucguguuccugguccuccugccccuggugagcucccagugcgugaaccucaccacccgcacgcagcugccgcccgccuacaccaacagcuucacccggggcgucuacuaccccgacaagguguuccgcuccagcgugcugcacuccacccaggaccucuuccugcccuucuucagcaacgucacgugguuccacgccauccacguguccgggaccaacggcaccaagcgguucgacaacccggugcugcccuucaacgacggggucuacuucgcgagcaccgagaaguccaacaucauccgcggcuggaucuucgggacgacccucgacagcaagacccagucccugcugaucgugaacaacgccaccaacguggucaucaaggugugcgaguuccaguucugcaacgaccccuuccucggcguguacuaccacaagaacaacaagagcuggauggaguccgaguuccgggucuacagcuccgccaacaacugcacguucgaguacgugagccagcccuuccugauggaccuggagggcaagcaggggaacuucaagaaccuccgcgaguucguguucaagaacaucgacggcuacuucaagaucuacuccaagcacaccccgaucaaccugguccgggaccugccccagggguucugggcccucgagccccugguggaccugcccaucggcaucaacaucacccgcuuccagacccuccuggcccugcaccggagcuaccucacgccgggggacuccagcagcggcuggaccgcgggcgccgccgccuacuacgugggguaccugcagccccgcaccuuccugcucaaguacaacgagaacggcaccaucacggacgcggucgacugcgcccuggacccccuguccgagaccaagugcacccucaagagcuucaccguggagaaggggaucuaccagacguccaacuuccgggugcagcccaccgagagcaucguccgcuucccgaacaucaccaaccugugccccuucggcgagguguucaacgccacccgguucgccuccgucuacgccuggaaccgcaagcggaucagcaacugcguggcggacuacuccgugcuguacaacagcgccuccuucagcacguucaagugcuacggcgucucccccaccaagcucaacgaccugugcuucaccaacguguacgccgacagcuucgugauccgcggggacgagguccggcagaucgcccccggccagaccgggaagaucgccgacuacaacuacaagcugccggacgacuucacgggcugcgugaucgcguggaacuccaacaaccucgacagcaaggucgggggcaacuacaacuaccuguaccgccuguuccggaaguccaaccucaagcccuucgagcgcgacaucagcaccgagaucuaccaggccggcuccacccccugcaacgggguggagggcuucaacugcuacuucccccugcagagcuacggguuccagccgaccaacggcgugggguaccagcccuaccggguggucgugcuguccuucgagcuccugcacgcccccgccacggugugcggccccaagaaguccaccaaccuggucaagaacaagugcgugaacuucaacuucaacggccucaccgggaccggcgugcugaccgagagcaacaagaaguuccugccguuccagcaguucgggcgcgacaucgccgacacgaccgacgcgguccgcgacccccagacccuggagauccucgacaucacccccugcagcuucggcggggugagcgugaucacgccgggcaccaacaccuccaaccaggucgccgugcuguaccaggacgugaacugcaccgagguccccguggccauccacgccgaccagcugacgcccaccuggcggguguacagcaccggcuccaacgucuuccagacccgcgccgggugccucaucggcgcggagcacgugaacaacagcuacgagugcgacauccccaucggggccggcaucugcgccuccuaccagacgcagaccaacagcccgcggcgcgcccgguccguggcgagccaguccaucaucgccuacaccaugagccugggcgccgagaacuccgucgccuacagcaacaacuccaucgccauccccaccaacuucacgaucagcgugaccaccgagauccugcccguguccaugaccaagacgagcgucgacugcaccauguacaucugcggggacagcaccgagugcuccaaccuccugcugcaguacggcagcuucugcacccagcucaaccgcgcgcugacggggaucgccguggagcaggacaagaacacccaggagguguucgcccaggucaagcagaucuacaagacgcccccgaucaaggacuucggcggguucaacuucucccagauccugcccgaccccagcaagcccuccaagcggagcuucaucgaggaccuccuguucaacaaggugacccuggccgacgccggcuucaucaagcaguacggcgacugccucggggacaucgcggcccgcgaccugaucugcgcccagaaguucaacggccugaccgugcucccgccccugcugaccgacgagaugaucgcccaguacaccuccgcccuccuggcggggaccaucacgagcggcuggaccuucggggccggcgccgcccugcagauccccuucgcgaugcagauggccuaccgguucaacggcaucggggucacccagaacgugcucuacgagaaccagaagcugaucgccaaccaguucaacuccgccaucggcaagauccaggacagccuguccagcaccgccuccgcgcucgggaagcugcaggacguggucaaccagaacgcccaggcccugaacacgcucgugaagcagcugagcuccaacuucggcgccaucagcuccgugcugaacgacauccucagccgccuggacaaggucgaggccgaggugcagaucgaccggcugaucaccgggcgccuccagucccugcagaccuacgugacccagcagcugauccgggcggccgagauccgcgccagcgccaaccucgccgcgaccaagaugagcgagugcguccugggccaguccaagcggguggacuucugcggcaagggguaccaccugaugagcuucccccaguccgccccgcacggcguggucuuccuccacgugacguacguccccgcccaggagaagaacuucaccaccgcccccgcgaucugccacgacgggaaggcccacuucccccgcgagggcguguucgugagcaacgggacccacugguucgucacgcagcggaacuucuacgagccgcagaucaucaccaccgacaacaccuucguguccggcaacugcgacguggucaucggcaucgugaacaacacgguguacgacccccugcagcccgagcuggacagcuucaaggaggagcucgacaaguacuucaagaaccacaccucccccgacgucgaccugggggacaucagcggcaucaacgccuccguggugaacauccagaaggagaucgaccgccugaacgaggucgccaagaaccucaacgagagccugaucgaccugcaggagcucgggaaguacgagcaguacaucaaguggccgugguacaucuggcugggcuucaucgccggccugaucgcgaucgugauggugaccaucaugcucugcugcaugaccuccugcugcagcugccugaaggggugcugcuccugcggcagcugcugcaaguucgacgaggacgacuccgagcccguccugaagggggugaagcuccacuacacgugaggacuagucccuguucccagagcccacuuuuuuuucuuuuuuugaaauaaaauagccugucuuucagaucucaaaggcucuuuucagagccaccaaaaaaaaaaaaaaaaaaaaaaaaaaaaaaaaaaaaaaaaaaaaaaaaaaaaaaaaaaaaaaaaaaaaaaaaaaaaaaaaaaaaaaaaaaaaaaaaaaaaa

SEQ ID NO: 12307 - RNA, 4094 nt, Artificial Sequence
  SARS-CoV-2/China/WF0004/2020__EPI_ISL_413694 spike protein mRNA gc (1-1273)
aggagagucccgcagucggcguccagcggcucugcuuguucgugugugugucguugcaggccuuauucaagcuuaccauguucguguuccugguccuccugccccuggugagcucccagugcgugaaccucaccacccgcacgcagcugccgcccgccuacaccaacagcuucacccggggcgucuacuaccccgacaagguguuccgcuccagcgugcugcacuccacccaggaccucuuccugcccuucuucagcaacgucacgugguuccacgccauccacguguccgggaccaacggcaccaagcgguucgacaacccggugcugcccuucaacgacggggucuacuucgcgagcaccgagaaguccaacaucauccgcggcuggaucuucgggacgacccucgacagcaagacccagucccugcugaucgugaacaacgccaccaacguggucaucaaggugugcgaguuccaguucugcaacgaccccuuccucggcguguacuaccacaagaacaacaagagcuggacggaguccgaguuccgggucuacagcuccgccaacaacugcaccuucgaguacgugagccagcccuuccugauggaccuggagggcaagcaggggaacuucaagaaccuccgcgaguucguguucaagaacaucgacggcuacuucaagaucuacuccaagcacaccccgaucaaccugguccgggaccugccccagggguucagcgcccucgagccccugguggaccugcccaucggcaucaacaucacccgcuuccagacgcuccuggcccugcaccgguccuaccucaccccgggggacagcagcuccggcuggaccgcgggcgccgccgccuacuacgugggguaccugcagccccgcaccuuccugcucaaguacaacgagaacggcacgaucaccgacgcggucgacugcgcccuggacccccugagcgagaccaagugcacccucaaguccuucacgguggagaaggggaucuaccagaccagcaacuuccgggugcagcccaccgaguccaucguccgcuucccgaacaucaccaaccugugccccuucggcgagguguucaacgccacgcgguucgccagcgucuacgccuggaaccgcaagcggaucuccaacugcguggcggacuacagcgugcuguacaacuccgccagcuucuccaccuucaagugcuacggcgucagccccaccaagcucaacgaccugugcuucaccaacguguacgccgacuccuucgugauccgcggggacgagguccggcagaucgcccccggccagacggggaagaucgccgacuacaacuacaagcugccggacgacuucaccggcugcgugaucgcguggaacagcaacaaccucgacuccaaggucgggggcaacuacaacuaccuguaccgccuguuccgcaagagcaaccucaagcccuucgagcgggacaucuccaccgagaucuaccaggccggcagcacccccugcaacgggguggagggcuucaacugcuacuucccccugcaguccuacggguuccagccgacgaacggcgugggguaccagcccuaccggguggucgugcugagcuucgagcuccugcacgcccccgccaccgugugcggccccaagaaguccaccaaccuggucaagaacaagugcgugaacuucaacuucaacggccucaccgggaccggcgugcugacggagagcaacaagaaguuccugccguuccagcaguucgggcgcgacaucgccgacaccaccgacgcgguccgcgacccccagacccuggagauccucgacaucacgcccugcagcuucggcgggguguccgugaucaccccgggcaccaacaccagcaaccaggucgccgugcuguaccaggacgugaacugcacggagguccccguggccauccacgccgaccagcugacccccaccuggcggguguacuccaccggcagcaacgucuuccagacgcgcgccgggugccucaucggcgcggagcacgugaacaacuccuacgagugcgacauccccaucggggccggcaucugcgccagcuaccagacccagaccaacuccccgcggcgcgcccggagcguggcgucccagagcaucaucgccuacaccaugucccugggcgccgagaacagcgucgccuacuccaacaacagcaucgccauccccacgaacuucaccaucuccgugaccaccgagauccugcccgugagcaugacgaagaccagcgucgacugcaccauguacaucugcggggacuccaccgagugcagcaaccuccugcugcaguacggcuccuucugcacgcagcucaaccgcgcgcugaccgggaucgccguggagcaggacaagaacacccaggagguguucgcccaggucaagcagaucuacaagacgcccccgaucaaggacuucggcggguucaacuucagccagauccugcccgaccccuccaagcccagcaagcgguccuucaucgaggaccuccuguucaacaaggugacccuggccgacgccggcuucaucaagcaguacggcgacugccucggggacaucgcggcccgcgaccugaucugcgcccagaaguucaacggccugaccgugcucccgccccugcugaccgacgagaugaucgcccaguacaccagcgcccuccuggcggggacgaucaccuccggcuggaccuucggggccggcgccgcccugcagauccccuucgcgaugcagauggccuaccgguucaacggcaucggggucacccagaacgugcucuacgagaaccagaagcugaucgccaaccaguucaacagcgccaucggcaagauccaggacucccugagcuccacggccagcgcgcucgggaagcugcaggacguggucaaccagaacgcccaggcccugaacacccucgugaagcagcuguccagcaacuucggcgccaucuccagcgugcugaacgacauccucucccgccuggacaaggucgaggccgaggugcagaucgaccggcugaucaccgggcgccuccagagccugcagaccuacgugacccagcagcugauccgggcggccgagauccgcgccagcgccaaccucgccgcgacgaagauguccgagugcguccugggccagagcaagcgguucgacuucugcggcaagggguaccaccugauguccuucccccagagcgccccgcacggcgugguguuccuccacgucaccuacgugcccgcccaggagaagaacuucaccaccgcccccgcgaucugccacgacgggaaggcccacuucccccgcgagggcgucuucguguccaacgggacgcacugguucgugacccagcggaacuucuacgagccgcagaucaucaccaccgacaacacguucgucagcggcaacugcgacguggugaucggcaucgucaacaacaccguguacgacccccugcagcccgagcuggacuccuucaaggaggagcucgacaaguacuucaagaaccacaccagccccgacguggaccugggggacaucuccggcaucaacgccagcgucgugaacauccagaaggagaucgaccgccugaacgagguggccaagaaccucaacgagucccugaucgaccugcaggagcucgggaaguacgagcaguacaucaaguggccgugguacaucuggcugggcuucaucgccggccugaucgcgaucgucauggugaccaucaugcucugcugcaugacgagcugcugcuccugccugaaggggugcugcagcugcggcuccugcugcaaguucgacgaggacgacagcgagcccgugcugaagggggucaagcuccacuacaccugaggacuagucccuguucccagagcccacuuuuuuuucuuuuuuugaaauaaaauagccugucuuucagaucucaaaggcucuuuucagagccaccaaaaaaaaaaaaaaaaaaaaaaaaaaaaaaaaaaaaaaaaaaaaaaaaaaaaaaaaaaaaaaaaaaaaaaaaaaaaaaaaaaaaaaaaaaaaaaaaaaaaa

SEQ ID NO: 12308 - RNA, 4094 nt, Artificial Sequence
  SARS-CoV-2/China/WF0028/2020__EPI_ISL_413791 spike protein mRNA gc (1-1273)
aggagagucccgcagucggcguccagcggcucugcuuguucgugugugugucguugcaggccuuauucaagcuuaccauguucguguuccugguccuccugccccuggugagcucccagugcgugaaccucaccacccgcacgcagcugccgcccgccuacaccaacagcuucacccggggcgucuacuaccccgacaagguguuccgcuccagcgugcugcacuccacccaggaccucuuccugcccuucuucagcaacgucacgugguuccacgccauccacguguccgggaccaacggcaccaagcgguucgacaacccggugcugcccuucaacgacggggucuacuucgcgagcaccgagaaguccaacaucauccgcggcuggaucuucgggacgacccucgacagcaagacccagucccugcugaucgugaacaacgccaccaacguggucaucaaggugugcgaguuccaguucugcaacgaccccuuccucggcguguacuaccacaagaacaacaagagcuggauggaguccgaguuccgggucuacagcuccgccaacaacugcacguucgaguacgugagccagcccuuccugauggaccuggagggcaagcaggggaacuucaagaaccuccgcgaguucguguucaagaacaucgacggcuacuucaagaucuacuccaagcacaccccgaucaaccugguccgggaccugccccagggguucagcgcccucgagccccugguggaccugcccaucggcaucaacaucacccgcuuccagacccuccuggcccugcaccgguccuaccucacgccgggggacagcagcuccggcuggaccgcgggcgccgccgccuacuacgugggguaccugcagccccgcaccuuccugcucaaguacaacgagaacggcaccaucacggacgcggucgacugcgcccuggacccccugagcgagaccaagugcacccucaaguccuucaccguggagaaggggaucuaccagacgagcaacuuccgggugcagcccaccgaguccaucguccgcuucccgaacaucaccaaccugugccccuucggcgagguguucaacgccacccgguucgccagcgucuacgccuggaaccgcaagcggaucuccaacugcguggcggacuacagcgugcuguacaacuccgccagcuucuccacguucaagugcuacggcgucagccccaccaagcucaacgaccugugcuucaccaacguguacgccgacuccuucgugauccgcggggacgagguccggcagaucgcccccggccagaccgggaagaucgccgacuacaacuacaagcugccggacgacuucacgggcugcgugaucgcguggaacagcaacaaccucgacuccaaggucgggggcaacuacaacuaccuguaccgccuguuccgcaagagcaaccucaagcccuucgagcgggacaucuccaccgagaucuaccaggccggcagcacccccugcaacgggguggagggcuucaacugcuacuucccccugcaguccuacggguuccagccgaccaacggcgugggguaccagcccuaccggguggucgugcugagcuucgagcuccugcacgcccccgccacggugugcggccccaagaaguccaccaaccuggucaagaacaagugcgugaacuucaacuucaacggccucaccgggaccggcgugcugaccgagagcaacaagaaguuccugccguuccagcaguucgggcgcgacaucgccgacacgaccgacgcgguccgcgacccccagacccuggagauccucgacaucacccccugcagcuucggcgggguguccgugaucacgccgggcaccaacaccagcaaccaggucgccgugcuguaccaggacgugaacugcaccgagguccccguggccauccacgccgaccagcugacgcccaccuggcggguguacuccaccggcagcaacgucuuccagacccgcgccgggugccucaucggcgcggagcacgugaacaacuccuacgagugcgacauccccaucggggccggcaucugcgccagcuaccagacgcagaccaacuccccgcggcgcgcccggagcguggcgucccagagcaucaucgccuacaccaugucccugggcgccgagaacagcgucgccuacuccaacaacagcaucgccauccccaccaacuucacgaucuccgugaccaccgagauccugcccgugagcaugaccaagacgagcgucgacugcaccauguacaucugcggggacuccaccgagugcagcaaccuccugcugcaguacggcuccuucugcacccagcucaaccgcgcgcugacggggaucgccguggagcaggacaagaacacccaggagguguucgcccaggucaagcagaucuacaagacgcccccgaucaaggacuucggcggguucaacuucagccagauccugcccgaccccuccaagcccagcaagcgguccuucaucgaggaccuccuguucaacaaggugacccuggccgacgccggcuucaucaagcaguacggcgacugccucggggacaucgcggcccgcgaccugaucugcgcccagaaguucaacggccugaccgugcucccgccccugcugaccgacgagaugaucgcccaguacaccagcgcccuccuggcggggaccaucacguccggcuggaccuucggggccggcgccgcccugcagauccccuucgcgaugcagauggccuaccgguucaacggcaucggggucacccagaacgugcucuacgagaaccagaagcugaucgccaaccaguucaacagcgccaucggcaagauccaggacucccugagcuccaccgccagcgcgcucgggaagcugcaggacguggucaaccagaacgcccaggcccugaacacgcucgugaagcagcuguccagcaacuucggcgccaucuccagcgugcugaacgacauccucucccgccuggacaaggucgaggccgaggugcagaucgaccggcugaucaccgggcgccuccagagccugcagaccuacgugacccagcagcugauccgggcggccgagauccgcgccagcgccaaccucgccgcgaccaagauguccgagugcguccugggccagagcaagcggguggacuucugcggcaagggguaccaccugauguccuucccccagagcgccccgcacggcguggucuuccuccacgugacguacguccccgcccaggagaagaacuucaccaccgcccccgcgaucugccacgacgggaaggcccacuucccccgcgagggcguguucguguccaacgggacccacugguucgucacgcagcggaacuucuacgagccgcagaucaucaccaccgacaacaccuucgugagcggcaacugcgacguggucaucggcaucgugaacaacacgguguacgacccccugcagcccgagcuggaguccuucaaggaggagcucgacaaguacuucaagaaccacaccagccccgacgucgaccugggggacaucuccggcaucaacgccagcguggugaacauccagaaggagaucgaccgccugaacgaggucgccaagaaccucaacgagucccugaucgaccugcaggagcucgggaaguacgagcaguacaucaaguggccgugguacaucuggcugggcuucaucgccggccugaucgcgaucgugauggugaccaucaugcucugcugcaugaccagcugcugcuccugccugaaggggugcugcagcugcggcuccugcugcaaguucgacgaggacgacagcgagcccguccugaagggggugaagcuccacuacacgugaggacuagucccuguucccagagcccacuuuuuuuucuuuuuuugaaauaaaauagccugucuuucagaucucaaaggcucuuuucagagccaccaaaaaaaaaaaaaaaaaaaaaaaaaaaaaaaaaaaaaaaaaaaaaaaaaaaaaaaaaaaaaaaaaaaaaaaaaaaaaaaaaaaaaaaaaaaaaaaaaaaaa

SEQ ID NO: 12309 - RNA, 4094 nt, Artificial Sequence
  SARS-CoV-2/2019-nCoV/USA-CruiseA-18/2020__MT159716.1 spike protein mRNA gc (1-1273)
aggagagucccgcagucggcguccagcggcucugcuuguucgugugugugucguugcaggccuuauucaagcuuaccauguucguguuccugguccuccugccccuggugagcucccagugcgugaaccucaccacccgcacgcagcugccgcccgccuacaccaacagcuucacccggggcgucuacuaccccgacaagguguuccgcuccagcgugcugcacuccacccaggaccucuuccugcccuucuucagcaacgucacgugguuccacgccauccacguguccgggaccaacggcaccaagcgguucgacaacccggugcugcccuucaacgacggggucuacuucgcgagcaccgagaaguccaacaucauccgcggcuggaucuucgggacgacccucgacagcaagacccagucccugcugaucgugaacaacgccaccaacguggucaucaaggugugcgaguuccaguucugcaacgaccccuuccucggcguguacuaccacaagaacaacaagagcuggauggaguccgagcugcgggucuacagcuccgccaacaacugcacguucgaguacgugagccagcccuuccugauggaccucgagggcaagcaggggaacuucaagaaccugcgcgaguucguguucaagaacaucgacggcuacuucaagaucuacuccaagcacaccccgaucaaccugguccgggaccucccccagggguucagcgcccuggagccccugguggaccuccccaucggcaucaacaucacccgcuuccagacccugcuggcccuccaccgguccuaccugacgccgggggacagcagcuccggcuggaccgcgggcgccgccgccuacuacgugggguaccugcagccccgcaccuuccuccugaaguacaacgagaacggcaccaucacggacgcggucgacugcgcccuggacccccucagcgagaccaagugcacccugaaguccuucaccguggagaaggggaucuaccagacgagcaacuuccgggugcagcccaccgaguccaucguccgcuucccgaacaucaccaaccugugccccuucggcgagguguucaacgccacccgguucgccagcgucuacgccuggaaccgcaagcggaucuccaacugcguggcggacuacagcgugcucuacaacuccgccagcuucuccacguucaagugcuacggcgucagccccaccaagcugaacgaccugugcuucaccaacguguacgccgacuccuucgugauccgcggggacgagguccggcagaucgcccccggccagaccgggaagaucgccgacuacaacuacaagcucccggacgacuucacgggcugcgugaucgcguggaacagcaacaaccuggacuccaaggucgggggcaacuacaacuaccuguaccgccucuuccgcaagagcaaccugaagcccuucgagcgggacaucuccaccgagaucuaccaggccggcagcacccccugcaacgggguggagggcuucaacugcuacuucccccugcaguccuacggguuccagccgaccaacggcgugggguaccagcccuaccggguggucgugcucagcuucgagcugcugcacgcccccgccacggugugcggccccaagaaguccaccaaccucgucaagaacaagugcgugaacuucaacuucaacggccugaccgggaccggcgugcugaccgagagcaacaagaaguuccugccguuccagcaguucgggcgcgacaucgccgacacgaccgacgcgguccgcgacccccagacccucgagauccuggacaucacccccugcagcuucggcgggguguccgugaucacgccgggcaccaacaccagcaaccaggucgccgugcuguaccaggacgugaacugcaccgagguccccguggccauccacgccgaccagcucacgcccaccuggcggguguacuccaccggcagcaacgucuuccagacccgcgccgggugccugaucggcgcggagcacgugaacaacuccuacgagugcgacauccccaucggggccggcaucugcgccagcuaccagacgcagaccaacuccccgcggcgcgcccggagcguggcgucccagagcaucaucgccuacaccaugucccugggcgccgagaacagcgucgccuacuccaacaacagcaucgccauccccaccaacuucacgaucuccgugaccaccgagauccuccccgugagcaugaccaagacgagcgucgacugcaccauguacaucugcggggacuccaccgagugcagcaaccugcugcuccaguacggcuccuucugcacccagcugaaccgcgcgcugacggggaucgccguggagcaggacaagaacacccaggagguguucgcccaggucaagcagaucuacaagacgcccccgaucaaggacuucggcggguucaacuucagccagauccuccccgaccccuccaagcccagcaagcgguccuucaucgaggaccugcuguucaacaaggugacccucgccgacgccggcuucaucaagcaguacggcgacugccugggggacaucgcggcccgcgaccugaucugcgcccagaaguucaacggccucaccgugcugccgccccugcucaccgacgagaugaucgcccaguacaccagcgcccugcuggcggggaccaucacguccggcuggaccuucggggccggcgccgcccuccagauccccuucgcgaugcagauggccuaccgguucaacggcaucggggucacccagaacgugcuguacgagaaccagaagcugaucgccaaccaguucaacagcgccaucggcaagauccaggacucccucagcuccaccgccagcgcgcuggggaagcugcaggacguggucaaccagaacgcccaggcccucaacacgcuggugaagcagcuguccagcaacuucggcgccaucuccagcgugcucaacgacauccugucccgccuggacaaggucgaggccgaggugcagaucgaccggcucaucaccgggcgccugcagagccugcagaccuacgugacccagcagcucauccgggcggccgagauccgcgccagcgccaaccuggccgcgaccaagauguccgagugcguccugggccagagcaagcggguggacuucugcggcaagggguaccaccucauguccuucccccagagcgccccgcacggcguggucuuccugcacgugacguacguccccgcccaggagaagaacuucaccaccgcccccgcgaucugccacgacgggaaggcccacuucccccgcgagggcguguucguguccaacgggacccacugguucgucacgcagcggaacuucuacgagccgcagaucaucaccaccgacaacaccuucgugagcggcaacugcgacguggucaucggcaucgugaacaacacgguguacgacccccugcagcccgagcucgacuccuucaaggaggagcuggacaaguacuucaagaaccacaccagccccgacgucgaccugggggacaucuccggcaucaacgccagcguggugaacauccagaaggagaucgaccgccucaacgaggucgccaagaaccugaacgagucccugaucgaccuccaggagcuggggaaguacgagcaguacaucaaguggccgugguacaucuggcugggcuucaucgccggccucaucgcgaucgugauggugaccaucaugcugugcugcaugaccagcugcugcuccugccugaaggggugcugcagcugcggcuccugcugcaaguucgacgaggacgacagcgagcccguccucaagggggugaagcugcacuacacgugaggacuagucccuguucccagagcccacuuuuuuuucuuuuuuugaaauaaaauagccugucuuucagaucucaaaggcucuuuucagagccaccaaaaaaaaaaaaaaaaaaaaaaaaaaaaaaaaaaaaaaaaaaaaaaaaaaaaaaaaaaaaaaaaaaaaaaaaaaaaaaaaaaaaaaaaaaaaaaaaaaaaa

SEQ ID NO: 12310 - RNA, 4094 nt, Artificial Sequence
  SARS-CoV-2/SARS-CoV-2/Yunnan-01/human/2020/CHN__MT049951.1 spike protein mRNA gc (1-1273)
aggagagucccgcagucggcguccagcggcucugcuuguucgugugugugucguugcaggccuuauucaagcuuaccauguucguguuccugguccuccugccccuggugagcucccagugcgugaaccucaccacccgcacgcagcugccgcccgccaacaccaacagcuucacccggggcgucuacuaccccgacaagguguuccgcuccagcgugcugcacuccacccaggaccucuuccugcccuucuucagcaacgucacgugguuccacgccauccacguguccgggaccaacggcaccaagcgguucgacaacccggugcugcccuucaacgacggggucuacuucgcgagcaccgagaaguccaacaucauccgcggcuggaucuucgggacgacccucgacagcaagacccagucccugcugaucgugaacaacgccaccaacguggucaucaaggugugcgaguuccaguucugcaacgaccccuuccucggcguguacuaccacaagaacaacaagagcuggauggaguccgaguuccgggucuacagcuccgccaacaacugcacguucgaguacgugagccagcccuuccugauggaccuggagggcaagcaggggaacuucaagaaccuccgcgaguucguguucaagaacaucgacggcuacuucaagaucuacuccaagcacaccccgaucaaccugguccgggaccugccccagggguucagcgcccucgagccccugguggaccugcccaucggcaucaacaucacccgcuuccagacccuccuggcccugcaccgguccuaccucacgccgggggacagcagcuccggcuggaccgcgggcgccgccgccuacuacgugggguaccugcagccccgcaccuuccugcucaaguacaacgagaacggcaccaucacggacgcggucgacugcgcccuggacccccugagcgagaccaagugcacccucaaguccuucaccguggagaaggggaucuaccagacgagcaacuuccgggugcagcccaccgaguccaucguccgcuucccgaacaucaccaaccugugccccuucggcgagguguucaacgccacccgguucgccagcgucuacgccuggaaccgcaagcggaucuccaacugcguggcggacuacagcgugcuguacaacuccgccagcuucuccacguucaagugcuacggcgucagccccaccaagcucaacgaccugugcuucaccaacguguacgccgacuccuucgugauccgcggggacgagguccggcagaucgcccccggccagaccgggaagaucgccgacuacaacuacaagcugccggacgacuucacgggcugcgugaucgcguggaacagcaacaaccucgacuccaaggucgggggcaacuacaacuaccuguaccgccuguuccgcaagagcaaccucaagcccuucgagcgggacaucuccaccgagaucuaccaggccggcagcacccccugcaacgggguggagggcuucaacugcuacuucccccugcaguccuacggguuccagccgaccaacggcgugggguaccagcccuaccggguggucgugcugagcuucgagcuccugcacgcccccgccacggugugcggccccaagaaguccaccaaccuggucaagaacaagugcgugaacuucaacuucaacggccucaccgggaccggcgugcugaccgagagcaacaagaaguuccugccguuccagcaguucgggcgcgacaucgccgacacgaccgacgcgguccgcgacccccagacccuggagauccucgacaucacccccugcagcuucggcgggguguccgugaucacgccgggcaccaacaccagcaaccaggucgccgugcuguaccaggacgugaacugcaccgagguccccguggccauccacgccgaccagcugacgcccaccuggcggguguacuccaccggcagcaacgucuuccagacccgcgccgggugccucaucggcgcggagcacgugaacaacuccuacgagugcgacauccccaucggggccggcaucugcgccagcuaccagacgcagaccaacuccccgcggcgcgcccggagcguggcgucccagagcaucaucgccuacaccaugucccugggcgccgagaacagcgucgccuacuccaacaacagcaucgccauccccaccaacuucacgaucuccgugaccaccgagauccugcccgugagcaugaccaagacgagcgucgacugcaccauguacaucugcggggacuccaccgagugcagcaaccuccugcugcaguacggcuccuucugcacccagcucaaccgcgcgcugacggggaucgccguggagcaggacaagaacacccaggagguguucgcccaggucaagcagaucuacaagacgcccccgaucaaggacuucggcggguucaacuucagccagauccugcccgaccccuccaagcccagcaagcgguccuucaucgaggaccuccuguucaacaaggugacccuggccgacgccggcuucaucaagcaguacggcgacugccucggggacaucgcggcccgcgaccugaucugcgcccagaaguucaacggccugaccgugcucccgccccugcugaccgacgagaugaucgcccaguacaccagcgcccuccuggcggggaccaucacguccggcuggaccuucggggccggcgccgcccugcagauccccuucgcgaugcagauggccuaccgguucaacggcaucggggucacccagaacgugcucuacgagaaccagaagcugaucgccaaccaguucaacagcgccaucggcaagauccaggacucccugagcuccaccgccagcgcgcucgggaagcugcaggacguggucaaccagaacgcccaggcccugaacacgcucgugaagcagcuguccagcaacuucggcgccaucuccagcgugcugaacgacauccucucccgccuggacaaggucgaggccgaggugcagaucgaccggcugaucaccgggcgccuccagagccugcagaccuacgugacccagcagcugauccgggcggccgagauccgcgccagcgccaaccucgccgcgaccaagauguccgagugcguccugggccagagcaagcggguggacuucugcggcaagggguaccaccugauguccuucccccagagcgccccgcacggcguggucuuccuccacgugacguacguccccgcccaggagaagaacuucaccaccgcccccgcgaucugccacgacgggaaggcccacuucccccgcgagggcguguucguguccaacgggacccacugguucgucacgcagcggaacuucuacgagccgcagaucaucaccaccgacaacaccuucgugagcggcaacugcgacguggucaucggcaucgugaacaacacgguguacgacccccugcagcccgagcuggacuccuucaaggaggagcucgacaaguacuucaagaaccacaccagccccgacgucgaccugggggacaucuccggcaucaacgccagcguggugaacauccagaaggagaucgaccgccugaacgaggucgccaagaaccucaacgagucccugaucgaccugcaggagcucgggaaguacgagcaguacaucaaguggccgugguacaucuggcugggcuucaucgccggccugaucgcgaucgugauggugaccaucaugcucugcugcaugaccagcugcugcuccugccugaaggggugcugcagcugcggcuccugcugcaaguucgacgaggacgacagcgagcccguccugaagggggugaagcuccacuacacgugaggacuagucccuguucccagagcccacuuuuuuuucuuuuuuugaaauaaaauagccugucuuucagaucucaaaggcucuuuucagagccaccaaaaaaaaaaaaaaaaaaaaaaaaaaaaaaaaaaaaaaaaaaaaaaaaaaaaaaaaaaaaaaaaaaaaaaaaaaaaaaaaaaaaaaaaaaaaaaaaaaaaa

SEQ ID NO: 12311 - RNA, 4094 nt, Artificial Sequence
  SARS-CoV-2/USA/WA-UW292/2020__EPI_ISL_418077 spike protein mRNA gc (1-1273)
aggagagucccgcagucggcguccagcggcucugcuuguucgugugugugucguugcaggccuuauucaagcuuaccauguucguguuccugguccuccugccccuggugagcucccagugcgugaaccucaccacccgcacgcagcugccgcccgccuacaccaacagcuucacccggggcgucuacuaccccgacaagguguuccgcuccagcgugcugcacuccacccaggaccucuuccugcccuucuucagcaacgucacgugguuccacgccauccacguguccgggaccaacggcaccaagcgguucgacaacccggugcugcccuucaacgacggggucuacuucgcgagcaccgagaaguccaacaucauccgcggcuggaucuucgggacgacccucgacagcaagacccagucccugcugaucgugaacaacgccaccaacguggucaucaaggugugcgaguuccaguucugcaacgaccccuuccucggcguguacuaccacaagaacaacaagagcuggauggaguccgaguuccgggucuacagcuccgccaacaacugcacguucgaguacgugagccagcccuuccugauggaccuggagggcaagcaggggaacuucaagaaccuccgcgaguucguguucaagaacaucgacggcuacuucaagaucuacuccaagcacaccccgaucaaccugguccgggaccugccccagggguucagcgcccucgagccccugguggaccugcccaucggcaucaacaucacccgcuuccagacccuccuggcccugcaccgguccuaccucacgccgggggacagcagcuccggcuggaccgcgggcgccgccgccuacuacgugggguaccugcagccccgcaccuuccugcucaaguacaacgagaacggcaccaucacggacgcggucgacugcgcccuggacccccugagcgagaccaagugcacccucaaguccuucaccguggagaaggggaucuaccagacgagcaacuuccgggugcagcccaccgaguccaucguccgcuucccgaacaucaccaaccugugccccuucggcgagguguucaacgccacccgguucgccagcgucuacgccuggaaccgcaagcggaucuccaacugcguggcggacuacagcgugcuguacaacuccgccagcuucuccacguucaagugcuacggcgucagccccaccaagcucaacgaccugugcuucaccaacguguacgccgacuccuucgugauccgcggggacgagguccggcagaucgcccccggccagaccgggaagaucgccgacuacaacuacaagcugccggacgacuucacgggcugcgugaucgcguggaacagcaacaaccucgacuccaaggucgggggcaacuacaacuaccuguaccgccuguuccgcaagagcaaccucaagcccuucgagcgggacaucuccaccgagaucuaccaggccagcuccacccccugcaacggcguggagggguucaacugcuacuucccccugcagagcuacggcuuccagccgaccaacggggugggcuaccagcccuaccggguggucgugcugagcuucgagcuccugcacgcccccgccacggugugcgggcccaagaaguccaccaaccuggucaagaacaagugcgugaacuucaacuucaacggccucaccggcaccggggugcugaccgagagcaacaagaaguuccugccguuccagcaguucggccgcgacaucgccgacacgaccgacgcgguccgcgacccccagacccuggagauccucgacaucacccccugcuccuucgggggcgugagcgugaucacgccggggaccaacaccuccaaccaggucgccgugcuguaccaggacgugaacugcaccgagguccccguggccauccacgccgaccagcugacgcccaccuggcggguguacagcaccggcuccaacgucuuccagacccgcgccggcugccucaucggggcggagcacgugaacaacagcuacgagugcgacauccccaucggcgccgggaucugcgccuccuaccagacgcagaccaacagcccgcggcgcgcccgguccguggcgagccaguccaucaucgccuacaccaugagccugggcgccgagaacuccgucgccuacagcaacaacuccaucgccauccccaccaacuucacgaucagcgugaccaccgagauccugcccgugagcaugaccaagacguccgucgacugcaccauguacaucugcggcgacagcaccgagugcuccaaccuccugcugcaguacgggagcuucugcacccagcucaaccgcgcgcugacgggcaucgccguggagcaggacaagaacacccaggagguguucgcccaggucaagcagaucuacaagacgcccccgaucaaggacuucgggggcuucaacuucucccagauccugcccgaccccagcaagcccuccaagcggagcuucaucgaggaccuccuguucaacaaggugacccuggccgacgccggguucaucaagcaguacggcgacugccucggcgacaucgcggcccgcgaccugaucugcgcccagaaguucaacgggcugaccgugcucccgccccugcugaccgacgagaugaucgcccaguacaccuccgcccuccuggcgggcaccaucacgagcggguggaccuucggcgccggggccgcccugcagauccccuucgcgaugcagauggccuaccgguucaacggcaucggcgucacccagaacgugcucuacgagaaccagaagcugaucgccaaccaguucaacuccgccaucgggaagauccaggacagccuguccagcaccgccuccgcgcucggcaagcugcaggacguggucaaccagaacgcccaggcccugaacacgcucgugaagcagcugagcuccaacuucggggccaucagcuccgugcugaacgacauccucagccgccuggacaaggucgaggccgaggugcagaucgaccggcugaucaccggccgccuccagagccugcagaccuacgugacccagcagcugauccgggcggccgagauccgcgccuccgccaaccucgccgcgaccaagaugagcgagugcguccuggggcaguccaagcggguggacuucugcggcaagggcuaccaccugaugagcuucccccaguccgccccgcacgggguggucuuccuccacgugacguacguccccgcccaggagaagaacuucaccaccgcccccgcgaucugccacgacggcaaggcccacuucccccgcgaggggguguucgugagcaacggcacccacugguucgucacgcagcggaacuucuacgagccgcagaucaucaccaccgacaacaccuucguguccgggaacugcgacguggucaucggcaucgugaacaacacgguguacgacccccugcagcccgagcuggacagcuucaaggaggagcucgacaaguacuucaagaaccacaccucccccgacgucgaccugggcgacaucagcgggaucaacgccuccguggugaacauccagaaggagaucgaccgccugaacgaggucgccaagaaccucaacgagagccugaucgaccugcaggagcucggcaaguacgagcaguacaucaaguggccgugguacaucuggcugggguucaucgccggccugaucgcgaucgugauggugaccaucaugcucugcugcaugaccuccugcugcagcugccugaagggcugcugcuccugcgggagcugcugcaaguucgacgaggacgacuccgagcccguccugaagggcgugaagcuccacuacacgugaggacuagucccuguucccagagcccacuuuuuuuucuuuuuuugaaauaaaauagccugucuuucagaucucaaaggcucuuuucagagccaccaaaaaaaaaaaaaaaaaaaaaaaaaaaaaaaaaaaaaaaaaaaaaaaaaaaaaaaaaaaaaaaaaaaaaaaaaaaaaaaaaaaaaaaaaaaaaaaaaaaaa

SEQ ID NO: 12312 - RNA, 4094 nt, Artificial Sequence
  SARS-CoV-2/Iceland/192/2020__EPI_ISL_417819 spike protein mRNA gc (1-1273)
aggagagucccgcagucggcguccagcggcucugcuuguucgugugugugucguugcaggccuuauucaagcuuaccauguucguguucuucguccugcucccccuggugagcucccagugcgugaaccugaccacccgcacgcagcucccgcccgccuacaccaacagcuucacccggggcgucuacuaccccgacaagguguuccgcuccagcgugcugcacuccacccaggaccuguuccuccccuucuucagcaacgucacgugguuccacgccauccacguguccgggaccaacggcaccaagcgguucgacaacccggugcugcccuucaacgacggggucuacuucgcgagcaccgagaaguccaacaucauccgcggcuggaucuucgggacgacccuggacagcaagacccagucccuccugaucgugaacaacgccaccaacguggucaucaaggugugcgaguuccaguucugcaacgaccccuuccugggcguguacuaccacaagaacaacaagagcuggauggaguccgaguuccgggucuacagcuccgccaacaacugcacguucgaguacgugagccagcccuuccucauggaccuggagggcaagcaggggaacuucaagaaccugcgcgaguucguguucaagaacaucgacggcuacuucaagaucuacuccaagcacaccccgaucaaccucguccgggaccugccccagggguucagcgcccuggagccccucguggaccugcccaucggcaucaacaucacccgcuuccagacccugcucgcccugcaccgguccuaccugacgccgggggacagcagcuccggcuggaccgcgggcgccgccgccuacuacgugggguaccuccagccccgcaccuuccugcugaaguacaacgagaacggcaccaucacggacgcggucgacugcgcccucgacccccugagcgagaccaagugcacccugaaguccuucaccguggagaaggggaucuaccagacgagcaacuuccgggugcagcccaccgaguccaucguccgcuucccgaacaucaccaaccucugccccuucggcgagguguucaacgccacccgguucgccagcgucuacgccuggaaccgcaagcggaucuccaacugcguggcggacuacagcgugcuguacaacuccgccagcuucuccacguucaagugcuacggcgucagccccaccaagcugaacgaccucugcuucaccaacguguacgccgacuccuucgugauccgcggggacgagguccggcagaucgcccccggccagaccgggaagaucgccgacuacaacuacaagcugccggacgacuucacgggcugcgugaucgcguggaacagcaacaaccuggacuccaaggucgggggcaacuacaacuaccucuaccgccuguuccgcaagagcaaccugaagcccuucgagcgggacaucuccaccgagaucuaccaggccggcagcacccccugcaacgggguggagggcuucaacugcuacuucccccuccaguccuacggguuccagccgaccaacggcgugggguaccagcccuaccggguggucgugcugagcuucgagcugcuccacgcccccgccacggugugcggccccaagaaguccaccaaccuggucaagaacaagugcgugaacuucaacuucaacggccugaccgggaccggcgugcucaccgagagcaacaagaaguuccugccguuccagcaguucgggcgcgacaucgccgacacgaccgacgcgguccgcgacccccagacccuggagauccuggacaucacccccugcagcuucggcgggguguccgugaucacgccgggcaccaacaccagcaaccaggucgccgugcucuaccagggcgugaacugcaccgagguccccguggccauccacgccgaccagcugacgcccaccuggcggguguacuccaccgggagcaacgucuuccagacccgcgccggcugccugaucggggcggagcacgugaacaacuccuacgagugcgacauccccaucggcgccggcaucugcgccagcuaccagacgcagaccaacuccccgcggcgcgcccggagcguggcgucccagagcaucaucgccuacaccaugucccucggggccgagaacagcgucgccuacuccaacaacagcaucgccauccccaccaacuucacgaucuccgugaccaccgagauccugcccgugagcaugaccaagacgagcgucgacugcaccauguacaucugcggcgacuccaccgagugcagcaaccugcuccugcaguacggguccuucugcacccagcugaaccgcgcgcucacgggcaucgccguggagcaggacaagaacacccaggagguguucgcccaggucaagcagaucuacaagacgcccccgaucaaggacuucgggggcuucaacuucagccagauccugcccgaccccuccaagcccagcaagcgguccuucaucgaggaccuccuguucaacaaggugacccuggccgacgccggcuucaucaagcaguacggggacugccugggcgacaucgcggcccgcgaccucaucugcgcccagaaguucaacgggcugaccgugcugccgccccuccugaccgacgagaugaucgcccaguacaccagcgcccugcucgcgggcaccaucacguccggguggaccuucggcgccggcgccgcccugcagauccccuucgcgaugcagauggccuaccgguucaacgggaucggcgucacccagaacgugcuguacgagaaccagaagcucaucgccaaccaguucaacagcgccaucgggaagauccaggacucccugagcuccaccgccagcgcgcugggcaagcuccaggacguggucaaccagaacgcccaggcccugaacacgcuggugaagcagcucuccagcaacuucggggccaucuccagcgugcugaacgacauccugucccgccucgacaaggucgaggccgaggugcagaucgaccggcugaucaccggccgccugcagagccuccagaccuacgugacccagcagcugauccgggcggccgagauccgcgccagcgccaaccuggccgcgaccaagauguccgagugcguccucggccagagcaagcggguggacuucugcgggaagggcuaccaccugauguccuucccccagagcgccccgcacgggguggucuuccugcacgugacguacguccccgcccaggagaagaacuucaccaccgcccccgcgaucugccacgacggcaaggcccacuucccccgcgaggggguguucguguccaacggcacccacugguucgucacgcagcggaacuucuacgagccgcagaucaucaccaccgacaacaccuucgugagcggcaacugcgacguggucaucgggaucgugaacaacacgguguacgacccccuccagcccgagcuggacuccuucaaggaggagcuggacaaguacuucaagaaccacaccagccccgacgucgaccucggcgacaucuccgggaucaacgccagcguggugaacauccagaaggagaucgaccgccugaacgaggucgccaagaaccugaacgagucccucaucgaccugcaggagcugggcaaguacgagcaguacaucaaguggccgugguacaucuggcucggcuucaucgccgggcugaucgcgaucgugauggugaccaucaugcugugcugcaugaccagcugcugcuccugccucaagggcugcugcagcugcggguccugcugcaaguucgacgaggacgacagcgagcccguccugaagggcgugaagcugcacuacacgugaggacuagucccuguucccagagcccacuuuuuuuucuuuuuuugaaauaaaauagccugucuuucagaucucaaaggcucuuuucagagccaccaaaaaaaaaaaaaaaaaaaaaaaaaaaaaaaaaaaaaaaaaaaaaaaaaaaaaaaaaaaaaaaaaaaaaaaaaaaaaaaaaaaaaaaaaaaaaaaaaaaaa

SEQ ID NO: 12313 - RNA, 4094 nt, Artificial Sequence
  SARS-CoV-2/Belgium/ULG-6939/2020__EPI_ISL_417020 spike protein mRNA gc (1-1273)
aggagagucccgcagucggcguccagcggcucugcuuguucgugugugugucguugcaggccuuauucaagcuuaccauguucguguuccugguccuccugccccuggugagcucccagugcgugaaccucaccacccgcacgcagcugccgcccgccuacaccaacagcuucacccggggcgucuacuaccccgacaagguguuccgcuccagcgugcugcacuccacccaggaccucuuccugcccuucuucagcaacgucacgugguuccacgccauccacguguccgggaccaacggcaccaagcgguucgacaacccggugcugcccuucaacgacggggucuacuucgcgagcaccgagaaguccaacaucauccgcggcuggaucuucgggacgacccucgacagcaagacccagucccugcugaucgugaacaacgccaccaacguggucaucaaggugugcgaguuccaguucugcaacgaccccuuccucggcguguacuaccacaagaacaacaagagcuggauggaguccgaguuccgggucuacagcuccgccaacaacugcacguucgaguacgugagccagcccuuccugauggaccuggagggcaagcaggggaacuucaagaaccuccgcgaguucguguucaagaacaucgacggcuacuucaagaucuacuccaagcacaccccgaucaaccugguccgggaccugccccagggguucagcgcccucgagccccugguggaccugcccaucggcaucaacaucacccgcuuccagacccuccuggcccugcaccgguccuaccucacgccgggggacagcagcuccggcuggaccgcgggcgccgccgccuacuacgugggguaccugcagccccgcaccuuccugcucaaguacaacgagaacggcaccaucacggacgcggucgacugcgcccuggacccccugagcgagaccaagugcacccucaaguccuucaccguggagaaggggaucuaccagacgagcaacuuccgggugcagcccaccgaguccaucguccgcuucccgaacaucaccaaccugugccccuucggcgagguguucaacgccacccgguucgccagcgucuacgccuggaaccgcaagcggaucuccaacugcguggcggacuacagcgugcuguacaacuccgccagcuucuccacguucaagugcuacggcgucagccccaccaagcucaacgaccugugcuucaccaacguguacgccgacuccuucgugauccgcggggacgagguccggcagaucgcccccggccagaccgggaagaucgccgacuacaacuacaagcugccggacgacuucacgggcugcgugaucgcguggaacagcaacaaccucgacuccaaggucgggggcaacuacaacuaccuguaccgccuguuccgcaagagcaaccucaagcccuucgagcgggacaucuccaccgagaucuaccaggccggcagcacccccugcaacgggguggagggcuucaacugcuacuucccccugcaguccuacggguuccagccgaccaacggcgugggguaccagcccuaccggguggucgugcugagcuucgagcuccugcacgcccccgccacggugugcggccccaagaaguccaccaaccuggucaagaacaagugcgugaacuucaacuucaacggccucaccgggaccggcgugcugaccgagagcaacaagaaguuccugccguuccagcaguucgggcgcgacaucgccgacacgaccgacgcgguccgcgacccccagacccuggagauccucgacaucacccccugcagcuucggcgggguguccgugaucacgccgggcaccaacaccagcaaccaggucgccgugcuguaccagggcgugaacugcaccgagguccccguggccauccacgccgaccagcugacgcccaccuggcggguguacuccaccgggagcaacgucuuccagacccgcgccggcugccucaucggggcggagcacgugaacaacuccuacgagugcgacauccccaucggcgccggcaucugcgccagcuaccagacgcagaccaacuccccgcggcgcgcccggagcguggcgucccagagcaucaucgccuacaccaugucccugggggccgagaacagcgucguguacuccaacaacagcaucgccauccccaccaacuucacgaucuccgugaccaccgagauccugcccgucagcaugaccaagacgagcguggacugcaccauguacaucugcggcgacuccaccgagugcagcaaccuccugcugcaguacggguccuucugcacccagcucaaccgcgcccugacgggcaucgcgguggagcaggacaagaacacccaggaggucuucgcccaggugaagcagaucuacaagacgcccccgaucaaggacuucgggggcuucaacuucagccagauccugcccgaccccuccaagcccagcaagcgguccuucaucgaggaccuccuguucaacaaggugacccuggccgacgccggcuucaucaagcaguacggggacugccucggcgacaucgccgcgcgcgaccugaucugcgcccagaaguucaacgggcugaccguccucccgccccugcugaccgacgagaugaucgcccaguacaccagcgcccuccuggccggcaccaucacguccggguggaccuucggcgcgggcgccgcccugcagauccccuucgccaugcagauggcguaccgguucaacgggaucggcgugacccagaacgugcucuacgagaaccagaagcugaucgccaaccaguucaacagcgccaucgggaagauccaggacucccugagcuccaccgccagcgcccucggcaagcugcaggacgucgugaaccagaacgcgcaggcccugaacacgcucgugaagcagcuguccagcaacuucggggccaucuccagcguccugaacgacauccucucccgccuggacaagguggaggccgaggugcagaucgaccggcugaucaccggccgccuccagagccugcagaccuacgucacccagcagcugauccgggccgcggagauccgcgccagcgccaaccucgccgccaccaagauguccgagugcgugcugggccagagcaagcggguggacuucugcgggaagggcuaccaccugauguccuucccccagagcgcgccgcacggggucguguuccuccacgucacguacgugcccgcccaggagaagaacuucaccaccgcccccgccaucugccacgacggcaaggcgcacuucccccgcgaggggguguucgucuccaacggcacccacugguucgugacgcagcggaacuucuacgagccgcagaucaucaccaccgacaacaccuucgugagcggcaacugcgacgucgugaucgggaucgugaacaacacggucuacgacccccugcagcccgagcuggacuccuucaaggaggagcucgacaaguacuucaagaaccacaccagccccgacguggaccugggcgacaucuccgggaucaacgccagcguggucaacauccagaaggagaucgaccgccugaacgagguggccaagaaccucaacgagucccugaucgaccugcaggagcucggcaaguacgagcaguacaucaaguggccgugguacaucuggcugggcuucaucgccgggcugaucgccaucgugauggucaccaucaugcucugcugcaugaccagcugcugcuccugccugaagggcugcugcagcugcggguccugcugcaaguucgacgaggacgacagcgagcccgugcugaagggcgugaagcuccacuacacgugaggacuagucccuguucccagagcccacuuuuuuuucuuuuuuugaaauaaaauagccugucuuucagaucucaaaggcucuuuucagagccaccaaaaaaaaaaaaaaaaaaaaaaaaaaaaaaaaaaaaaaaaaaaaaaaaaaaaaaaaaaaaaaaaaaaaaaaaaaaaaaaaaaaaaaaaaaaaaaaaaaaaa

SEQ ID NO: 12314 - RNA, 4094 nt, Artificial Sequence
  SARS-CoV-2/France/HF2496/2020__EPI_ISL_418231 spike protein mRNA gc (1-1273)
aggagagucccgcagucggcguccagcggcucugcuuguucgugugugugucguugcaggccuuauucaagcuuaccauguucguguuccugguccuccugccccuggugagcucccagugcgugaaccucaccacccgcacgcagcugccgcccgccuacaccaacagcuucacccggggcgucuacuaccccgacaagguguuccgcuccagcgugcugcacuccacccaggaccucuuccugcccuucuucagcaacgucacgugguuccacgccauccacguguccgggaccaacggcaccaagcgguucgacaacccggugcugcccuucaacgacggggucuacuucgcgagcaccgagaaguccaacaucauccgcggcuggaucuucgggacgacccucgacagcaagacccagucccugcugaucgugaacaacgccaccaacguggucaucaaggugugcgaguuccaguucugcaacgaccccuuccucggcguguacuaccacaagaacaacaagagcuggauggaguccgaguuccgggucuacagcuccgccaacaacugcacguucgaguacgugagccagcccuuccugauggaccuggagggcaagcaggggaacuucaagaaccuccgcgaguucguguucaagaacaucgacggcuacuucaagaucuacuccaagcacaccccgaucaaccugguccgggaccugccccagggguucagcgcccucgagccccugguggaccugcccaucggcaucaacaucacccgcuuccagacccuccuggcccugcaccgguccuaccucacgccgggggacagcagcuccggcuggaccgcgggcgccgccgccuacuacgugggguaccugcagccccgcaccuuccugcucaaguacaacgagaacggcaccaucacggacgcggucgacugcgcccuggacccccugagcgagaccaagugcacccucaaguccuucaccguggagaaggggaucuaccagacgagcaacuuccgggugcagcccaccgaguccaucguccgcuucccgaacaucaccaaccugugccccuucggcgagguguucaacgccacccgguucgccagcgucuacgccuggaaccgcaagcggaucuccaacugcguggcggacuacagcgugcuguacaacuccgccagcuucuccacguucaagugcuacggcgucagccccaccaagcucaacgaccugugcuucaccaacguguacgccgacuccuucgugauccgcggggacgagguccggcagaucgcccccggccagaccgggaagaucgccgacuacaacuacaagcugccggacgacuucacgggcugcgugaucgcguggaacagcaacaaccucgacuccaaggucgggggcaacuacaacuaccuguaccgccuguuccgcaagagcaaccucaagcccuucgagcgggacaucuccaccgagaucuaccaggccggcagcacccccugcaacgggguggagggcuucaacugcuacuucccccugcaguccuacggguuccagccgaccaacggcgugggguaccagcccuaccggguggucgugcugagcuucgagcuccugcacgcccccgccacggugugcggccccaagaaguccaccaaccuggucaagaacaagugcgugaacuucaacuucaacggccucaccgggaccggcgugcugaccgagagcaacaagaaguuccugccguuccagcaguucgggcgcgacaucgccgacacgaccgacgcgguccgcgacccccagacccuggagauccucgacaucacccccugcagcuucggcgggguguccgugaucacgccgggcaccaacaccagcaaccaggucgccgugcuguaccagggcgugaacugcaccgagguccccguggccauccacgccgaccagcugacgcccaccuggcggguguacuccaccgggagcaacgucuuccagacccgcgccggcugccucaucggggcggagcacgugaacaacuccuacgagugcgacauccccaucggcgccggcaucugcgccagcuaccagacgcagaccaacuccccgcggcgcgcccggagcguggcgucccagagcaucaucgccuacaccaugucccugggggccgagaacagcgucgccuacuccaacaacagcaucgccauccccaccaacuucacgaucuccgugaccaccgagauccugcccgugagcaugaccaagacgagcgucgacugcaccauguacaucugcggcgacuccaccgagugcagcaaccuccugcugcaguacggguccuucugcacccagcucaaccgcgcgcugacgggcaucgccguggagcaggacaagaacacccaggagguguucgcccaggucaagcagaucuacaagacgcccccgaucaaggacuucgggggcuucaacuucagccagauccugcccgaccccuccaagcccagcaagcgguccuucaucgaggaccuccuguucaacaaggugacccuggccgacgccggcuucaucaagcaguacggggacugccucggcgacaucguggcgcgcgaccugaucugcgcccagaaguucaacgggcugaccguccucccgccccugcugaccgacgagaugaucgcccaguacaccagcgcccuccuggccggcaccaucacguccggguggaccuucggcgcgggcgccgcccugcagauccccuucgccaugcagauggcguaccgguucaacgggaucggcgugacccagaacgugcucuacgagaaccagaagcugaucgccaaccaguucaacagcgccaucgggaagauccaggacucccugagcuccaccgccagcgcccucggcaagcugcaggacgucgugaaccagaacgcgcaggcccugaacacgcucgugaagcagcuguccagcaacuucggggccaucuccagcguccugaacgacauccucucccgccuggacaagguggaggccgaggugcagaucgaccggcugaucaccggccgccuccagagccugcagaccuacgucacccagcagcugauccgggccgcggagauccgcgccagcgccaaccucgccgccaccaagauguccgagugcgugcugggccagagcaagcggguggacuucugcgggaagggcuaccaccugauguccuucccccagagcgcgccgcacggggucguguuccuccacgucacguacgugcccgcccaggagaagaacuucaccaccgcccccgccaucugccacgacggcaaggcgcacuucccccgcgaggggguguucgucuccaacggcacccacugguucgugacgcagcggaacuucuacgagccgcagaucaucaccaccgacaacaccuucgugagcggcaacugcgacgucgugaucgggaucgugaacaacacggucuacgacccccugcagcccgagcuggacuccuucaaggaggagcucgacaaguacuucaagaaccacaccagccccgacguggaccugggcgacaucuccgggaucaacgccagcguggucaacauccagaaggagaucgaccgccugaacgagguggccaagaaccucaacgagucccugaucgaccugcaggagcucggcaaguacgagcaguacaucaaguggccgugguacaucuggcugggcuucaucgccgggcugaucgccaucgugauggucaccaucaugcucugcugcaugaccagcugcugcuccugccugaagggcugcugcagcugcggguccugcugcaaguucgacgaggacgacagcgagcccgugcugaagggcgugaagcuccacuacacgugaggacuagucccuguucccagagcccacuuuuuuuucuuuuuuugaaauaaaauagccugucuuucagaucucaaaggcucuuuucagagccaccaaaaaaaaaaaaaaaaaaaaaaaaaaaaaaaaaaaaaaaaaaaaaaaaaaaaaaaaaaaaaaaaaaaaaaaaaaaaaaaaaaaaaaaaaaaaaaaaaaaaa

SEQ ID NO: 12315 - RNA, 4094 nt, Artificial Sequence
  SARS-CoV-2/USA/WA-UW291/2020__EPI_ISL_418076 spike protein mRNA gc (1-1273)
aggagagucccgcagucggcguccagcggcucugcuuguucgugugugugucguugcaggccuuauucaagcuuaccauguucguguuccugguccuccugccccuggugagcucccagugcgugaaccucaccacccgcacgcagcugccgcccgccuacaccaacagcuucacccggggcgucuacuaccccgacaagguguuccgcuccagcgugcugcacuccacccaggaccucuuccugcccuucuucagcaacgucacgugguuccacgccauccacguguccgggaccaacggcaccaagcgguucgacaacccggugcugcccuucaacgacggggucuacuucgcgagcaccgagaaguccaacaucauccgcggcuggaucuucgggacgacccucgacagcaagacccagucccugcugaucgugaacaacgccaccaacguggucaucaaggugugcgaguuccaguucugcaacgaccccuuccucggcguguacuaccacaagaacaacaagagcuggauggaguccgaguuccgggucuacagcuccgccaacaacugcacguucgaguacgugagccagcccuuccugauggaccuggagggcaagcaggggaacuucaagaaccuccgcgaguucguguucaagaacaucgacggcuacuucaagaucuacuccaagcacaccccgaucaaccugguccgggaccugccccagggguucagcgcccucgagccccugguggaccugcccaucggcaucaacaucacccgcuuccagacccuccuggcccugcaccgguccuaccucacgccgggggacagcagcuccggcuggaccgcgggcgccgccgccuacuacgugggguaccugcagccccgcaccuuccugcucaaguacaacgagaacggcaccaucacggacgcggucgacugcgcccuggacccccugagcgagaccaagugcacccucaaguccuucaccguggagaaggggaucuaccagacgagcaacuuccgggugcagcccaccgaguccaucguccgcuucccgaacaucaccaaccugugccccuucggcgagguguucaacgccacccgguucgccagcgucuacgccuggaaccgcaagcggaucuccaacugcguggcggacuacagcgugcuguacaacuccgccagcuucuccacguucaagugcuacggcgucagccccaccaagcucaacgaccugugcuucaccaacguguacgccgacuccuucgugauccgcggggacgagguccggcagaucgcccccggccagaccgggaagaucgccgacuacaacuacaagcugccggacgacuucacgggcugcgugaucgcguggaacagcaacaaccucgacuccaaggucgggggcaacuacaacuaccuguaccgccuguuccgcaagagcaaccucaagcccuucgagcgggacaucuccaccgagaucuaccaggccggcagcacccccugcaacgggguggagggcuucaacugcuacuucccccugcaguccuacggguuccagccgaccaacggcgugggguaccagcccuaccggguggucgugcugagcuucgagcuccugcacgcccccgccacggugugcggccccaagaaguccaccaaccuggucaagaacaagugcgugaacuucaacuucaacggccucaccgggaccggcgugcugaccgagagcaacaagaaguuccugccguuccagcaguucgggcgcgacaucgccgacacgaccgacgcgguccgcgacccccagacccuggagauccucgacaucacccccugcagcuucggcgggguguccgugaucacgccgggcaccaacaccagcaaccaggucgccgugcuguaccagggcgugaacugcaccgagguccccguggccauccacgccgaccagcugacgcccaccuggcggguguacuccaccgggagcaacgucuuccagacccgcgccggcugccucaucggggcggagcacgugaacaacuccuacgagugcgacauccccaucggcgccggcaucugcgccagcuaccagacgcagaccaacuccccgcggcgcgcccggagcguggcgucccagagcaucaucgccuacaccaugucccugggggccgagaacagcgucgccuacuccaacaacagcaucgccauccccaccaacuucacgaucuccgugaccaccgagauccugcccgugagcaugaccaagacgagcgucgacugcaccauguacaucugcggcgacuccaccgagugcagcaaccuccugcugcaguacggguccuucugcacccagcucaaccgcgcgcugacgggcaucgccguggagcaggacaagaacacccaggagguguucgcccaggucaagcagaucuacaagacgcccccgaucaaggacuucgggggcuucaacuucagccagauccugcccgaccccuccaagcccagcaagcgguccuucaucgaggaccuccuguucaacaaggugacccuggccgacgccggcuucaucaagcaguacggggacugccucggcgacaucgcggcccgcgaccugaucugcgcccagaaguucaacgggcugaccgugcucccgccccugcugaccgacgagaugaucgcccaguacaccagcgcccuccuggcgggcaccaucacguccggguggaccuucggcgccggcgccgcccugcagauccccuucgcgaugcagauggccuaccgguucaacgggaucggcgucacccagaacgugcucuacgagaaccagaagcugaucgccaaccaguucaacagcgccaucgggaagauccaguacucccugagcuccaccgccagcgcgcucggcaagcugcaggacguggucaaccagaacgcccaggcccugaacacgcucgugaagcagcuguccagcaacuucggggccaucuccagcgugcugaacgacauccucucccgccuggacaaggucgaggccgaggugcagaucgaccggcugaucaccggccgccuccagagccugcagaccuacgugacccagcagcugauccgggcggccgagauccgcgccagcgccaaccucgccgcgaccaagauguccgagugcguccugggccagagcaagcggguggacuucugcgggaagggcuaccaccugauguccuucccccagagcgccccgcacgggguggucuuccuccacgugacguacguccccgcccaggagaagaacuucaccaccgcccccgcgaucugccacgacggcaaggcccacuucccccgcgaggggguguucguguccaacggcacccacugguucgucacgcagcggaacuucuacgagccgcagaucaucaccaccgacaacaccuucgugagcggcaacugcgacguggucaucgggaucgugaacaacacgguguacgacccccugcagcccgagcuggacuccuucaaggaggagcucgacaaguacuucaagaaccacaccagccccgacgucgaccugggcgacaucuccgggaucaacgccagcguggugaacauccagaaggagaucgaccgccugaacgaggucgccaagaaccucaacgagucccugaucgaccugcaggagcucggcaaguacgagcaguacaucaaguggccgugguacaucuggcugggcuucaucgccgggcugaucgcgaucgugauggugaccaucaugcucugcugcaugaccagcugcugcuccugccugaagggcugcugcagcugcggguccugcugcaaguucgacgaggacgacagcgagcccguccugaagggcgugaagcuccacuacacgugaggacuagucccuguucccagagcccacuuuuuuuucuuuuuuugaaauaaaauagccugucuuucagaucucaaaggcucuuuucagagccaccaaaaaaaaaaaaaaaaaaaaaaaaaaaaaaaaaaaaaaaaaaaaaaaaaaaaaaaaaaaaaaaaaaaaaaaaaaaaaaaaaaaaaaaaaaaaaaaaaaaaa

SEQ ID NO: 12316 - RNA, 4094 nt, Artificial Sequence
  SARS-CoV-2/Portugal/PT0034/2020__EPI_ISL_418019 spike protein mRNA gc (1-1273)
aggagagucccgcagucggcguccagcggcucugcuuguucgugugugugucguugcaggccuuauucaagcuuaccauguucguguuccugguccuccugccccuggugagcucccagugcgugaaccucaccacccgcacgcagcugccgcccgccuacaccaacagcuucacccggggcgucuacuaccccgacaagguguuccgcuccagcgugcugcacuccacccaggaccucuuccugcccuucuucagcaacgucacgugguuccacgccauccacguguccgggaccaacggcaccaagcgguucgacaacccggugcugcccuucaacgacggggucuacuucgcgagcaccgagaaguccaacaucauccgcggcuggaucuucgggacgacccucgacagcaagacccagucccugcugaucgugaacaacgccaccaacguggucaucaaggugugcgaguuccaguucugcaacgaccccuuccucggcguguacuaccacaagaacaacaagagcuggauggaguccgaguuccgggucuacagcuccgccaacaacugcacguucgaguacgugagccagcccuuccugauggaccuggagggcaagcaggggaacuucaagaaccuccgcgaguucguguucaagaacaucgacggcuacuucaagaucuacuccaagcacaccccgaucaaccugguccgggaccugccccagggguucagcgcccucgagccccugguggaccugcccaucggcaucaacaucacccgcuuccagacccuccuggcccugcaccgguccuaccucacgccgggggacagcagcuccggcuggaccgcgggcgccgccgccuacuacgugggguaccugcagccccgcaccuuccugcucaaguacaacgagaacggcaccaucacggacgcggucgacugcgcccuggacccccugagcgagaccaagugcacccucaaguccuucaccguggagaaggggaucuaccagacgagcaacuuccgggugcagcccaccgaguccaucguccgcuucccgaacaucaccaaccugugccccuucggcgagguguucaacgccacccgguucgccagcgucuacgccuggaaccgcaagcggaucuccaacugcguggcggacuacagcgugcuguacaacuccgccagcuucuccacguucaagugcuacggcgucagccccaccaagcucaacgaccugugcuucaccaacguguacgccgacuccuucgugauccgcggggacgagguccggcagaucgcccccggccagaccgggaagaucgccgacuacaacuacaagcugccggacgacuucacgggcugcgugaucgcguggaacagcaacaaccucgacuccaaggucgggggcaacuacaacuaccuguaccgccuguuccgcaagagcaaccucaagcccuucgagcgggacaucuccaccgagaucuaccaggccggcagcacccccugcaacgggguggagggcuucaacugcuacuucccccugcaguccuacggguuccagccgaccaacggcgugggguaccagcccuaccggguggucgugcugagcuucgagcuccugcacgcccccgccacggugugcggccccaagaaguccaccaaccuggucaagaacaagugcgugaacuucaacuucaacggccucaccgggaccggcgugcugaccgagagcaacaagaaguuccugccguuccagcaguucgggcgcgacaucgccgacacgaccgacgcgguccgcgacccccagacccuggagauccucgacaucacccccugcagcuucggcgggguguccgugaucacgccgggcaccaacaccagcaaccaggucgccgugcuguaccagggcgugaacugcaccgagguccccguggccauccacgccgaccagcugacgcccaccuggcggguguacuccaccgggagcaacgucuuccagacccgcgccggcugccucaucggggcggagcacgugaacaacuccuacgagugcgacauccccaucggcgccggcaucugcgccagcuaccagacgcagaccaacuccccgcggcgcgcccggagcguggcgucccagagcaucaucgccuacaccaugucccugggggccgagaacagcgucgccuacuccaacaacagcaucgccauccccaccaacuucacgaucuccgugaccaccgagauccugcccgugagcaugaccaagacgagcgucgacugcaccauguacaucugcggcgacuccaccgagugcagcaaccuccugcugcaguacggguccuucugcacccagcucaaccgcgcgcugacgggcaucgccguggagcaggacaagaacacccaggagguguucgcccaggucaagcagaucuacaagacgcccccgaucaaggacuucgggggcuucaacuucagccagauccugcccgaccccuccaagcccagcaagcgguccuucaucgaggaccuccuguucaacaaggugacccuggccgacgccggcuucaucaagcaguacggggacugccucggcgacaucgcggcccgcgaccugaucugcgcccagaaguucaacgggcugaccgugcucccgccccugcugaccgacgagaugaucgcccaguacaccagcgcccuccuggcgggcaccaucacguccggguggaccuucggcgccggcgccgcccugcagauccccuucgcgaugcagauggccuaccgguucaacgggaucggcgucacccagaacgugcucuacgagaaccagaagcugaucgccaaccaguucaacagcgccaucgggaagauccaggacucccugagcuccaccgccagcgcgcucggcaagcugcaggacguggucaaccagaacgcccaggcccugaacacgcucgugaagcagcuguccagcaacuucggggccaucuccagcgugcugaacgacauccucucccgccuggacaaggucgaggccgaggugcagaucgaccggcugaucaccggccgccuccagagccugcagaccuacgugacccagcagcugauccgggcggccgagauccgcgccagcgccaaccucgccgcgaccaagauguccgagugcguccugggccagagcaagcggguggacuucugcgggaagggcuaccaccugauguccuucccccagagcgccccgcacgggguggucuuccuccacgugacguacguccccgcccaggagaagaacuucaccaccgcccccgcgaucugccacgacggcaaggcccacuucccccgcgaggggguguucguguccaacggcacccacugguucgucacgcagcggaacuucuacgagccgcagaucaucaccaccgacaacaccuucgugagcggcaacugcgacguggucaucgggaucgugaacaacacgguguacgacccccugcagcccgagcuggacuccuucaaggaggagcucgacaaguacuucaagaaccacaccagccccgacgucgaccugggcgacaucuccgggaucaacgccagcguggugaacauccagaaggagaucgaccgccugaacgaggucgccaagaaccucaacgagucccugaucgaccugcaggagcucggcaaguacgagcaguacaucaaguggccgugguacaucuggcugggcuucaucgccgggcugaucgcgaucgugauggugaccaucaugcucugcugcaucaccagcugcugcuccugccugaagggcugcugcagcugcggguccugcugcaaguucgacgaggacgacagcgagcccguccugaagggcgugaagcuccacuacacgugaggacuagucccuguucccagagcccacuuuuuuuucuuuuuuugaaauaaaauagccugucuuucagaucucaaaggcucuuuucagagccaccaaaaaaaaaaaaaaaaaaaaaaaaaaaaaaaaaaaaaaaaaaaaaaaaaaaaaaaaaaaaaaaaaaaaaaaaaaaaaaaaaaaaaaaaaaaaaaaaaaaaa

SEQ ID NO: 12317 - RNA, 4094 nt, Artificial Sequence
  SARS-CoV-2/Iceland/202/2020__EPI_ISL_417750 spike protein mRNA gc (1-1273)
aggagagucccgcagucggcguccagcggcucugcuuguucgugugugugucguugcaggccuuauucaagcuuaccauguucguguuccugguccuccugccccuggugagcucccagugcgugaaccucaccacccgcacgcagcugccgcccgccuacaccaacagcuucacccggggcgucuacuaccccgacaagguguuccgcuccagcgugcugcacuccacccaggaccucuuccugcccuucuucagcaacgucacgugguuccacgccauccacguguccgggaccaacggcaccaagcgguucgacaacccggugcugcccuucaacgacggggucuacuucgcgagcaccgagaaguccaacaucauccgcggcuggaucuucgggacgacccucgacagcaagacccagucccugcugaucgugaacaacgccaccaacguggucaucaaggugugcgaguuccaguucugcaacgaccccuuccucggcguguacuaccacaagaacaacaagagcuggauggaguccgaguuccgggucuacagcuccgccaacaacugcacguucgaguacgugagccagcccuuccugauggaccuggagggcaagcaggggaacuucaagaaccuccgcgaguucguguucaagaacaucgacggcuacuucaagaucuacuccaagcacaccccgaucaaccugguccgggaccugccccagggguucagcgcccucgagccccugguggaccugcccaucggcaucaacaucacccgcuuccagacccuccuggcccugcaccgguccuaccucacgccgggggacagcagcuccggcuggaccgcgggcgccgccgccuacuacgugggguaccugcagccccgcaccuuccugcucaaguacaacgagaacggcaccaucacggacgcggucgacugcgcccuggacccccugagcgagaccaagugcacccucaaguccuucaccguggagaaggggaucuaccagacgagcaacuuccgggugcagcccaccgaguccaucguccgcuucccgaacaucaccaaccugugccccuucggcgagguguucaacgccacccgguucgccagcgucuacgccuggaaccgcaagcggaucuccaacugcguggcggacuacagcgugcuguacaacuccgccagcuucuccacguucaagugcuacggcgucagccccaccaagcucaacgaccugugcuucaccaacguguacgccgacuccuucgugauccgcggggacgagguccggcagaucgcccccggccagaccgggaagaucgccgacuacaacuacaagcugccggacgacuucacgggcugcgugaucgcguggaacagcaacaaccucgacuccaaggucgggggcaacuacaacuaccuguaccgccuguuccgcaagagcaaccucaagcccuucgagcgggacaucuccaccgagaucuaccaggccggcagcacccccugcaacgggguggagggcuucaacugcuacuucccccugcaguccuacggguuccagccgaccaacggcgugggguaccagcccuaccggguggucgugcugagcuucgagcuccugcacgcccccgccacggugugcggccccaagaaguccaccaaccuggucaagaacaagugcgugaacuucaacuucaacggccucaccgggaccggcgugcugaccgagagcaacaagaaguuccugccguuccagcaguucgggcgcgacaucgccgacacgaccgacgcgguccgcgacccccagacccuggagauccucgacaucacccccugcagcuucggcgggguguccgugaucacgccgggcaccaacaccagcaaccaggucgccgugcuguaccaggacgugaacugcaccgagguccccguggccauccacgccgaccagcugacgcccaccuggcggguguacuccaccggcagcaacgucuuccagacccgcgccgggugccucaucggcgcggagcacgugaacaacuccuacgagugcgacauccccaucggggccggcaucugcgccagcuaccagacgcagaccaacuccccgcggcgcgcccggagcguggcgucccagagcaucaucgccuacaccaugucccugggcgccgagaacagcgucgccuacuccaacaacagcaucgccauccccaccaacuucacgaucuccgugaccaccgagauccugcccgugagcaugaccaagacgagcgucgacugcaccauguacaucugcggggacuccaccgagugcagcaaccuccugcugcaguacggcuccuucugcacccagcucaaccgcgcgcugacggggaucgccguggagcaggacaagaacacccaggagguguucgcccaggucaagcagaucuacaagacgcccccgaucaaggacuucggcggguucaacuucagccagauccugcccgaccccuccaagcccagcaagcgguccuucaucgaggaccuccuguucaacaaggugacccuggccgacgccggcuucaucaagcaguacggcgacugccucggggacaucgcggcccgcgaccugaucugcgcccagaaguucaacggccugaccgugcucccgccccugcugaccgacgagaugaucgcccaguacaccagcgcccuccuggcggggaccaucacguccggcuggaccuucggggccggcgccgcccugcagauccccuucgcgaugcagauggccuaccgguucaacggcaucggggucacccagaacgugcucuacgagaaccagaagcugaucgccaaccaguucaacagcgccaucggcaagauccaggacucccugagcuccaccgccagcgcgcucgggaagcugcaggacguggucaaccagaacgcccaggcccugaacacgcucgugaagcagcuguccagcaacuucggcgccaucuccagcgugcugaacgacauccucucccgccuggacaaggucgaggccgaggugcagaucgaccggcugaucaccgggcgccuccagagccugcagaccuacgugacccagcagcugauccgggcggccgagauccgcgccagcgccaaccucgccgcgaccaagauguccgagugcguccugggccagagcaagcggguggacuucugcggcaagggguaccaccugauguccuucccccagagcgccccgcacggcguggucuuccuccacgugacguacguccccgcccaggagaagaacuucaccaccgcccccgcgaucugccacgacgggaaggcccacuucccccgcgagggcguguucguguccaacgggacccacugguucgucacgcagcggaacuucuacgagccgcagaucaucaccaccgacaacaccuucgugagcggcaacugcgacguggucaucggcaucgugaacaacacgguguacgacccccugcagcccgagcuggacuccuucaaggaggagcucgacaaguacuucaagaaccacaccagccccgacgucgaccugggggacaucccgggcaucaacgccuccguggugaacauccagaaggagaucgaccgccugaacgaggucgccaagaaccucaacgagagccugaucgaccugcaggagcucgggaaguacgagcaguacaucaaguggcccugguacaucuggcugggcuucaucgccggccugaucgcgaucgugauggugaccaucaugcucugcugcaugaccuccugcugcagcugccugaaggggugcugcuccugcggcagcugcugcaaguucgacgaggacgacuccgagcccguccugaagggggugaagcuccacuacacgugaggacuagucccuguucccagagcccacuuuuuuuucuuuuuuugaaauaaaauagccugucuuucagaucucaaaggcucuuuucagagccaccaaaaaaaaaaaaaaaaaaaaaaaaaaaaaaaaaaaaaaaaaaaaaaaaaaaaaaaaaaaaaaaaaaaaaaaaaaaaaaaaaaaaaaaaaaaaaaaaaaaaa

SEQ ID NO: 12318 - RNA, 4094 nt, Artificial Sequence
  SARS-CoV-2/USA/WA-UW261/2020__EPI_ISL_418046 spike protein mRNA gc (1-1273)
aggagagucccgcagucggcguccagcggcucugcuuguucgugugugugucguugcaggccuuauucaagcuuaccauguucguguuccugguccuccugccccuggugagcucccagugcgugaaccucaccacccgcacgcagcugccgcccgccuacaccaacagcuucacccggggcgucuacuaccccgacaagguguuccgcuccagcgugcugcacuccacccaggaccucuuccugcccuucuucagcaacgucacgugguuccacgccauccacguguccgggaccaacggcaccaagcgguucgacaacccggugcugcccuucaacgacggggucuacuucgcgagcaccgagaaguccaacaucauccgcggcuggaucuucgggacgacccucgacagcaagacccagucccugcugaucgugaacaacgccaccaacguggucaucaaggugugcgaguuccaguucugcaacgaccccuuccucggcguguacuaccacaagaacaacaagagcuggauggaguccgaguuccgggucuacagcuccgccaacaacugcacguucgaguacgugagccagcccuuccugauggaccuggagggcaagcaggggaacuucaagaaccuccgcgaguucguguucaagaacaucgacggcuacuucaagaucuacuccaagcacaccccgaucaaccugguccgggaccugccccagggguucagcgcccucgagccccugguggaccugcccaucggcaucaacaucacccgcuuccagacccuccuggcccugcaccgguccuaccucacgccgggggacagcagcuccggcuggaccgcgggcgccgccgccuacuacgugggguaccugcagccccgcaccuuccugcucaaguacaacgagaacggcaccaucacggacgcggucgacugcgcccuggacccccugagcgagaccaagugcacccucaaguccuucaccguggagaaggggaucuaccagacgagcaacuuccgggugcagcccaccgaguccaucguccgcuucccgaacaucaccaaccugugccccuucggcgagguguucaacgccacccgguucacgagcgucuacgccuggaaccgcaagcggaucuccaacugcguggccgacuacagcgugcuguacaacuccgcgagcuucuccaccuucaagugcuacggcgucagccccaccaagcucaacgaccugugcuucaccaacguguacgccgacuccuucgugauccgcggggacgagguccggcagaucgcccccggccagacggggaagaucgccgacuacaacuacaagcugccggacgacuucaccggcugcgugaucgccuggaacagcaacaaccucgacuccaaggucgggggcaacuacaacuaccuguaccgccuguuccgcaagagcaaccucaagcccuucgagcgggacaucuccaccgagaucuaccaggcgggcagcacccccugcaacgggguggagggcuucaacugcuacuucccccugcaguccuacggguuccagccgacgaacggcgugggguaccagcccuaccggguggucgugcugagcuucgagcuccugcacgcccccgccaccgugugcggccccaagaaguccaccaaccuggucaagaacaagugcgugaacuucaacuucaacggccucaccgggaccggcgugcugacggagagcaacaagaaguuccugccguuccagcaguucgggcgcgacaucgccgacaccaccgacgccguccgcgacccccagacccuggagauccucgacaucacgcccugcagcuucggcgggguguccgugaucaccccgggcaccaacaccagcaaccaggucgcggugcuguaccaggacgugaacugcacggagguccccguggccauccacgccgaccagcugacccccaccuggcggguguacuccaccggcagcaacgucuuccagacgcgcgccgggugccucaucggcgccgagcacgugaacaacuccuacgagugcgacauccccaucggggcgggcaucugcgccagcuaccagacccagaccaacuccccgcggcgcgcccggagcguggccucccagagcaucaucgcguacaccaugucccugggcgccgagaacagcgucgccuacuccaacaacagcaucgccauccccacgaacuucaccaucuccgugaccaccgagauccugcccgugagcaugacgaagaccagcgucgacugcaccauguacaucugcggggacuccaccgagugcagcaaccuccugcugcaguacggcuccuucugcacgcagcucaaccgcgcccugaccgggaucgcgguggagcaggacaagaacacccaggagguguucgcccaggucaagcagaucuacaagacgcccccgaucaaggacuucggcggguucaacuucagccagauccugcccgaccccuccaagcccagcaagcgguccuucaucgaggaccuccuguucaacaaggugacccuggccgacgccggcuucaucaagcaguacggcgacugccucggggacaucgccgcgcgcgaccugaucugcgcccagaaguucaacggccugaccgugcucccgccccugcugaccgacgagaugaucgcccaguacaccagcgcccuccuggccgggacgaucaccuccggcuggaccuucggggcgggcgccgcccugcagauccccuucgccaugcagauggcguaccgguucaacggcaucggggucacccagaacgugcucuacgagaaccagaagcugaucgccaaccaguucaacagcgccaucggcaagauccaggacucccugagcuccacggccagcgcccucgggaagcugcaggacguggucaaccagaacgcgcaggcccugaacacccucgugaagcagcuguccagcaacuucggcgccaucuccagcgugcugaacgacauccucucccgccuggacaaggucgaggccgaggugcagaucgaccggcugaucaccgggcgccuccagagccugcagaccuacgugacccagcagcugauccgggccgcggagauccgcgccagcgccaaccucgccgccacgaagauguccgagugcguccugggccagagcaagcggguggacuucugcggcaagggguaccaccugauguccuucccccagagcgcgccgcacggcguggucuuccuccacgugaccuacguccccgcccaggagaagaacuucaccaccgcccccgccaucugccacgacgggaaggcgcacuucccccgcgagggcguguucguguccaacgggacgcacugguucgucacccagcggaacuucuacgagccgcagaucaucaccaccgacaacacguucgugagcggcaacugcgacguggucaucggcaucgugaacaacaccguguacgacccccugcagcccgagcuggacuccuucaaggaggagcucgacaaguacuucaagaaccacaccagccccgacgucgaccugggggacaucuccggcaucaacgccagcguggugaacauccagaaggagaucgaccgccugaacgaggucgccaagaaccucaacgagucccugaucgaccugcaggagcucgggaaguacgagcaguacaucaaguggccgugguacaucuggcugggcuucaucgccggccugaucgccaucgugauggugaccaucaugcucugcugcaugacgagcugcugcuccugccugaaggggugcugcagcugcggcuccugcugcaaguucgacgaggacgacagcgagcccguccugaagggggugaagcuccacuacaccugaggacuagucccuguucccagagcccacuuuuuuuucuuuuuuugaaauaaaauagccugucuuucagaucucaaaggcucuuuucagagccaccaaaaaaaaaaaaaaaaaaaaaaaaaaaaaaaaaaaaaaaaaaaaaaaaaaaaaaaaaaaaaaaaaaaaaaaaaaaaaaaaaaaaaaaaaaaaaaaaaaaaa

SEQ ID NO: 12319 - RNA, 4094 nt, Artificial Sequence
  SARS-CoV-2/Portugal/PT0035/2020__EPI_ISL_418020 spike protein mRNA gc (1-1273)
aggagagucccgcagucggcguccagcggcucugcuuguucgugugugugucguugcaggccuuauucaagcuuaccauguucguguuccugguccuccugccccuggugagcucccagugcgugaaccucaccacccgcacgcagcugccgcccgccuacaccaacagcuucacccggggcgucuacuaccccgacaagguguuccgcuccagcgugcugcacuccacccaggaccucuuccugcccuucuucagcaacgucacgugguuccacgccauccacguguccgggaccaacggcaccaagcgguucgacaacccggugcugcccuucaacgacggggucuacuucgcgagcaccgagaaguccaacaucauccgcggcuggaucuucgggacgacccucgacagcaagacccagucccugcugaucgugaacaacgccaccaacguggucaucaaggugugcgaguuccaguucugcaacgaccccuuccucggcguguacuaccacaagaacaacaagagcuggauggaguccgaguuccgggucuacagcuccgccaacaacugcacguucgaguacgugagccagcccuuccugauggaccuggagggcaagcaggggaacuucaagaaccuccgcgaguucguguucaagaacaucgacggcuacuucaagaucuacuccaagcacaccccgaucaaccugguccgggaccugccccagggguucagcgcccucgagccccugguggaccugcccaucggcaucaacaucacccgcuuccagacccuccuggcccugcaccgguccuaccucacgccgggggacagcagcuccggcuggaccgcgggcgccgccgccuacuacgugggguaccugcagccccgcaccuuccugcucaaguacaacgagaacggcaccaucacggacgcggucgacugcgcccuggacccccugagcgagaccaagugcacccucaaguccuucaccguggagaaggggaucuaccagacgagcaacuuccgggugcagcccaccgaguccaucguccgcuucccgaacaucaccaaccugugccccuucggcgagguguucaacgccacccgguucgccagcgucuacgccuggaaccgcaagcggaucuccaacugcguggcggacuacagcgugcuguacaacuccgccagcuucuccacguucaagugcuacggcgucagccccaccaagcucaacgaccugugcuucaccaacguguacgccgacuccuucgugauccgcggggacgagguccggcagaucgcccccggccagaccgggaagaucgccgacuacaacuacaagcugccggacgacuucacgggcugcgugaucgcguggaacagcaacaaccucgacuccaaggucgggggcaacuacaacuaccuguaccgccuguuccgcaagagcaaccucaagcccuucgagcgggacaucuccaccgagaucuaccaggccggcagcacccccugcaacgggguggagggcuucaacugcuacuucccccugcaguccuacggguuccagccgaccaacggcgugggguaccagcccuaccggguggucgugcugagcuucgagcuccugcacgcccccgccacggugugcggccccaagaaguccaccaaccuggucaagaacaagugcgugaacuucaacuucaacggccucaccgggaccggcgugcugaccgagagcaacaagaaguuccugccguuccagcaguucgggcgcgacaucgccgacacgaccgacgcgguccgcgacccccagacccuggagauccucgacaucacccccugcagcuucggcgggguguccgugaucacgccgggcaccaacaccagcaaccaggucgccgugcuguaccaggacgugaacugcaccgagguccccguggccauccacgccgaccagcugacgcccaccuggcggguguacuccaccggcagcaacgucuuccagacccgcgccgggugccucaucggcgcggagcacgugaacaacuccuacgagugcgacauccccaucggggccggcaucugcgccagcuaccagacgcagaccaacuccccgcggcgcgcccggagcguggcgucccagagcaucaucgccuacaccaugucccugggcgccgagaacagcgucgccuacuccaacaacagcaucgccauccccaccaacuucacgaucuccgugaccaccgagauccugcccgugagcaugaccaagacgagcgucgacugcaccauguacaucugcggggacuccaccgagugcagcaaccuccugcugcaguacggcuccuucugcacccagcucaaccgcgcgcugacggggaucgccguggagcaggacaagaacacccaggagguguucgcccaggucaagcagaucuacaagacgcccccgaucaaggacuucggcggguucaacuucagccagauccugcccgaccccuccaagcccagcaagcgguccuucaucgaggaccuccuguucaacaaggugacccuggccgacgccggcuucaucaagcaguacggcgacugccucggggacaucagcgcgcgcgaccugaucugcgcccagaaguucaacggccugaccgugcucccgccccugcugaccgacgagaugaucgcccaguacaccuccgcccuccuggccgggaccaucacgagcggcuggaccuucggggcgggcgccgcccugcagauccccuucgccaugcagauggcguaccgguucaacggcaucggggucacccagaacgugcucuacgagaaccagaagcugaucgccaaccaguucaacuccgccaucggcaagauccaggacagccuguccagcaccgccuccgcccucgggaagcugcaggacguggucaaccagaacgcgcaggcccugaacacgcucgugaagcagcugagcuccaacuucggcgccaucagcuccgugcugaacgacauccucagccgccuggacaaggucgaggccgaggugcagaucgaccggcugaucaccgggcgccuccagagccugcagaccuacgugacccagcagcugauccgggccgcggagauccgcgccuccgccaaccucgccgccaccaagaugagcgagugcguccugggccaguccaagcggguggacuucugcggcaagggguaccaccugaugagcuucccccaguccgcgccgcacggcguggucuuccuccacgugacguacguccccgcccaggagaagaacuucaccaccgcccccgccaucugccacgacgggaaggcgcacuucccccgcgagggcguguucgugagcaacgggacccacugguucgucacgcagcggaacuucuacgagccgcagaucaucaccaccgacaacaccuucguguccggcaacugcgacguggucaucggcaucgugaacaacacgguguacgacccccugcagcccgagcuggacagcuucaaggaggagcucgacaaguacuucaagaaccacaccucccccgacgucgaccugggggacaucagcggcaucaacgccuccguggugaacauccagaaggagaucgaccgccugaacgaggucgccaagaaccucaacgagagccugaucgaccugcaggagcucgggaaguacgagcaguacaucaaguggccgugguacaucuggcugggcuucaucgccggccugaucgccaucgugauggugaccaucaugcucugcugcaugaccuccugcugcagcugccugaaggggugcugcuccugcggcagcugcugcaaguucgacgaggacgacuccgagcccguccugaagggggugaagcuccacuacacgugaggacuagucccuguucccagagcccacuuuuuuuucuuuuuuugaaauaaaauagccugucuuucagaucucaaaggcucuuuucagagccaccaaaaaaaaaaaaaaaaaaaaaaaaaaaaaaaaaaaaaaaaaaaaaaaaaaaaaaaaaaaaaaaaaaaaaaaaaaaaaaaaaaaaaaaaaaaaaaaaaaaaa

SEQ ID NO: 12320 - RNA, 4094 nt, Artificial Sequence
  SARS-CoV-2/USA/NY-NYUMC7/2020__EPI_ISL_418192 spike protein mRNA gc (1-1273)
aggagagucccgcagucggcguccagcggcucugcuuguucgugugugugucguugcaggccuuauucaagcuuaccauguucguguuccugguccuccugccccuggugagcucccagugcgugaaccucaccacccgcacgcagcugccgcccgccuacaccaacagcuucacccggggcgucuacuaccccgacaagguguuccgcuccagcgugcugcacuccacccaggaccucuuccugcccuucuucagcaacgucacgugguuccacgccauccacguguccgggaccaacggcaccaagcgguucgacaacccggugcugcccuucaacgacggggucuacuucgcgagcaccgagaaguccaacaucauccgcggcuggaucuucgggacgacccucgacagcaagacccagucccugcugaucgugaacaacgccaccaacguggucaucaaggugugcgaguuccaguucugcaacgaccccuuccucggcguguaccaccacaagaacaacaagagcuggauggaguccgaguuccgggucuacagcuccgccaacaacugcacguucgaguacgugagccagcccuuccugauggaccuggagggcaagcaggggaacuucaagaaccuccgcgaguucguguucaagaacaucgacggcuacuucaagaucuacuccaagcacaccccgaucaaccugguccgggaccugccccagggguucagcgcccucgagccccugguggaccugcccaucggcaucaacaucacccgcuuccagacccuccuggcccugcaccgguccuaccucacgccgggggacagcagcuccggcuggaccgcgggcgccgccgccuacuacgugggguaccugcagccccgcaccuuccugcucaaguacaacgagaacggcaccaucacggacgcggucgacugcgcccuggacccccugagcgagaccaagugcacccucaaguccuucaccguggagaaggggaucuaccagacgagcaacuuccgggugcagcccaccgaguccaucguccgcuucccgaacaucaccaaccugugccccuucggcgagguguucaacgccacccgguucgccagcgucuacgccuggaaccgcaagcggaucuccaacugcguggcggacuacagcgugcuguacaacuccgccagcuucuccacguucaagugcuacggcgucagccccaccaagcucaacgaccugugcuucaccaacguguacgccgacuccuucgugauccgcggggacgagguccggcagaucgcccccggccagaccgggaagaucgccgacuacaacuacaagcugccggacgacuucacgggcugcgugaucgcguggaacagcaacaaccucgacuccaaggucgggggcaacuacaacuaccuguaccgccuguuccgcaagagcaaccucaagcccuucgagcgggacaucuccaccgagaucuaccaggccggcagcacccccugcaacgggguggagggcuucaacugcuacuucccccugcaguccuacggguuccagccgaccaacggcgugggguaccagcccuaccggguggucgugcugagcuucgagcuccugcacgcccccgccacggugugcggccccaagaaguccaccaaccuggucaagaacaagugcgugaacuucaacuucaacggccucaccgggaccggcgugcugaccgagagcaacaagaaguuccugccguuccagcaguucgggcgcgacaucgccgacacgaccgacgcgguccgcgacccccagacccuggagauccucgacaucacccccugcagcuucggcgggguguccgugaucacgccgggcaccaacaccagcaaccaggucgccgugcuguaccagggcgugaacugcaccgagguccccguggccauccacgccgaccagcugacgcccaccuggcggguguacuccaccgggagcaacgucuuccagacccgcgccggcugccucaucggggcggagcacgugaacaacuccuacgagugcgacauccccaucggcgccggcaucugcgccagcuaccagacgcagaccaacuccccgcggcgcgcccggagcguggcgucccagagcaucaucgccuacaccaugucccugggggccgagaacagcgucgccuacuccaacaacagcaucgccauccccaccaacuucacgaucuccgugaccaccgagauccugcccgugagcaugaccaagacgagcgucgacugcaccauguacaucugcggcgacuccaccgagugcagcaaccuccugcugcaguacggguccuucugcacccagcucaaccgcgcgcugacgggcaucgccguggagcaggacaagaacacccaggagguguucgcccaggucaagcagaucuacaagacgcccccgaucaaggacuucgggggcuucaacuucagccagauccugcccgaccccuccaagcccagcaagcgguccuucaucgaggaccuccuguucaacaaggugacccuggccgacgccggcuucaucaagcaguacggggacugccucggcgacaucgcggcccgcgaccugaucugcgcccagaaguucaacgggcugaccgugcucccgccccugcugaccgacgagaugaucgcccaguacaccagcgcccuccuggcgggcaccaucacguccggguggaccuucggcgccggcgccgcccugcagauccccuucgcgaugcagauggccuaccgguucaacgggaucggcgucacccagaacgugcucuacgagaaccagaagcugaucgccaaccaguucaacagcgccaucgggaagauccaggacucccugagcuccaccgccagcgcgcucggcaagcugcaggacguggucaaccagaacgcccaggcccugaacacgcucgugaagcagcuguccagcaacuucggggccaucuccagcgugcugaacgacauccucucccgccuggacaaggucgaggccgaggugcagaucgaccggcugaucaccggccgccuccagagccugcagaccuacgugacccagcagcugauccgggcggccgagauccgcgccagcgccaaccucgccgcgaccaagauguccgagugcguccugggccagagcaagcggguggacuucugcgggaagggcuaccaccugauguccuucccccagagcgccccgcacgggguggucuuccuccacgugacguacguccccgcccaggagaagaacuucaccaccgcccccgcgaucugccacgacggcaaggcccacuucccccgcgaggggguguucguguccaacggcacccacugguucgucacgcagcggaacuucuacgagccgcagaucaucaccaccgacaacaccuucgugagcggcaacugcgacguggucaucgggaucgugaacaacacgguguacgacccccugcagcccgagcuggacuccuucaaggaggagcucgacaaguacuucaagaaccacaccagccccgacgucgaccugggcgacaucuccgggaucaacgccagcguggugaacauccagaaggagaucgaccgccugaacgaggucgccaagaaccucaacgagucccugaucgaccugcaggagcucggcaaguacgagcaguacaucaaguggccgugguacaucuggcugggcuucaucgccgggcugaucgcgaucgugauggugaccaucaugcucugcugcaugaccagcugcugcuccugccugaagggcugcugcagcugcggguccugcugcaaguucgacgaggacgacagcgagcccguccugaagggcgugaagcuccacuacacgugaggacuagucccuguucccagagcccacuuuuuuuucuuuuuuugaaauaaaauagccugucuuucagaucucaaaggcucuuuucagagccaccaaaaaaaaaaaaaaaaaaaaaaaaaaaaaaaaaaaaaaaaaaaaaaaaaaaaaaaaaaaaaaaaaaaaaaaaaaaaaaaaaaaaaaaaaaaaaaaaaaaaa

SEQ ID NO: 12321 - RNA, 4094 nt, Artificial Sequence
  SARS-CoV-2/Iceland/189/2020__EPI_ISL_417709 spike protein mRNA gc (1-1273)
aggagagucccgcagucggcguccagcggcucugcuuguucgugugugugucguugcaggccuuauucaagcuuaccauguucguguuccugguccuccugccccuggugagcucccagugcgugaaccucaccacccgcacgcagcugccgcccgccuacaccaacagcuucacccggggcgucuacuaccccgacaagguguuccgcuccagcgugcugcacuccacccaggaccucuuccugcccuucuucagcaacgucacgugguuccacgccauccacguguccgggaccaacggcaccaagcgguucgacaacccggugcugcccuucaacgacggggucuacuucgcgagcaccgagaaguccaacaucauccgcggcuggaucuucgggacgacccucgacagcaagacccagucccugcugaucgugaacaacgccaccaacguggucaucaaggugugcgaguuccaguucugcaacgaccccuuccucggcguguacuaccacaagaacaacaagagcuggauggaguccgaguuccgggucuacagcuccgccaacaacugcacguucgaguacgugagccagcccuuccugauggaccuggagggcaagcaggggaacuucaagaaccuccgcgaguucguguucaagaacaucgacggcuacuucaagaucuacuccaagcacaccccgaucaaccugguccgggaccugccccagggguucagcgcccucgagccccugguggaccugcccaucggcaucaacaucacccgcuuccagacccuccuggcccugcaccgguccuaccucacgccgggggacagcagcuccggcuggaccgcgggcgccgccgccuacuacgugggguaccugcagccccgcaccuuccugcucaaguacaacgagaacggcaccaucacggacgcggucgacugcgcccuggacccccugagcgagaccaagugcacccucaaguccuucaccguggagaaggggaucuaccagacgagcaacuuccgggugcagcccaccgaguccaucguccgcuucccgaacaucaccaaccugugccccuucggcgagguguucaacgccacccgguucgccagcgucuacgccuggaaccgcaagcggaucuccaacugcguggcggacuacagcgugcuguacaacuccgccagcuucuccacguucaagugcuacggcgucagccccaccaagcucaacgaccugugcuucaccaacguguacgccgacuccuucgugauccgcggggacgagguccggcagaucgcccccggccagaccgggaagaucgccgacuacaacuacaagcugccggacgacuucacgggcugcgugaucgcguggaacagcaacaaccucgacuccaaggucgggggcaacuacaacuaccuguaccgccuguuccgcaagagcaaccucaagcccuucgagcgggacaucuccaccgagaucuaccaggccggcagcacccccugcaacgggguggagggcuucaacugcuacuucccccugcaguccuacggguuccagccgaccaacggcgugggguaccagcccuaccggguggucgugcugagcuucgagcuccugcacgcccccgccacggugugcggccccaagaaguccaccaaccuggucaagaacaagugcgugaacuucaacuucaacggccucaccgggaccggcgugcugaccgagagcaacaagaaguuccugccguuccagcaguucgggcgcgacaucgccgacacgaccgacgcgguccgcgacccccagacccuggagauccucgacaucacccccugcagcuucggcgggguguccgugaucacgccgggcaccaacaccagcaaccaggucgccgugcuguaccagggcgugaacugcaccgagguccccguggccauccacgccgaccagcugacgcccaccuggcggguguacuccaccgggagcaacgucuuccagacccgcgccggcugccucaucggggcggagcacgugaacaacuccuacgagugcgacauccccaucggcgccggcaucugcgccagcuaccagacgcagaccaacuccccgcggcgcgcccggagcguggcgucccagagcaucaucgccuacaccaugucccugggggccgagaacagcgucgccuacuccaacaacagcaucgccauccccaccaacuucacgaucuccgugaccaccgagauccugcccgugagcaugaccaagacgagcgucgacugcaccauguacaucugcggcgacuccaccgagugcagcaaccuccugcugcaguacggguccuucugcacccagcucaaccgcgcgcugacgggcaucgccguggagcaggacaagaacacccaggagguguucgcccaggucaagcagaucuacaagacgcccccgaucaaggacuucgggggcuucaacuucagccagauccugcccgaccccuccaagcccagcaagcgguccuucaucgaggaccuccuguucaacaaggugacccuggccgacgccggcuucaccaagcaguacggggacugccucggcgacaucgcggcccgcgaccugaucugcgcccagaaguucaacgggcugaccgugcucccgccccugcugaccgacgagaugaucgcccaguacaccagcgcccuccuggcgggcacgaucaccuccggguggaccuucggcgccggcgccgcccugcagauccccuucgcgaugcagauggccuaccgguucaacgggaucggcgucacccagaacgugcucuacgagaaccagaagcugaucgccaaccaguucaacagcgccaucgggaagauccaggacucccugagcuccacggccagcgcgcucggcaagcugcaggacguggucaaccagaacgcccaggcccugaacacccucgugaagcagcuguccagcaacuucggggccaucuccagcgugcugaacgacauccucucccgccuggacaaggucgaggccgaggugcagaucgaccggcugaucaccggccgccuccagagccugcagaccuacgugacccagcagcugauccgggcggccgagauccgcgccagcgccaaccucgccgcgacgaagauguccgagugcguccugggccagagcaagcggguggacuucugcgggaagggcuaccaccugauguccuucccccagagcgccccgcacgggguggucuuccuccacgugaccuacguccccgcccaggagaagaacuucaccaccgcccccgcgaucugccacgacggcaaggcccacuucccccgcgaggggguguucguguccaacggcacgcacugguucgucacccagcggaacuucuacgagccgcagaucaucaccaccgacaacacguucgugagcggcaacugcgacguggucaucgggaucgugaacaacaccguguacgacccccugcagcccgagcuggacuccuucaaggaggagcucgacaaguacuucaagaaccacaccagccccgacgucgaccugggcgacaucuccgggaucaacgccagcguggugaacauccagaaggagaucgaccgccugaacgaggucgccaagaaccucaacgagucccugaucgaccugcaggagcucggcaaguacgagcaguacaucaaguggccgugguacaucuggcugggcuucaucgccgggcugaucgcgaucgugauggugaccaucaugcucugcugcaugacgagcugcugcuccugccugaagggcugcugcagcugcggguccugcugcaaguucgacgaggacgacagcgagcccguccugaagggcgugaagcuccacuacaccugaggacuagucccuguucccagagcccacuuuuuuuucuuuuuuugaaauaaaauagccugucuuucagaucucaaaggcucuuuucagagccaccaaaaaaaaaaaaaaaaaaaaaaaaaaaaaaaaaaaaaaaaaaaaaaaaaaaaaaaaaaaaaaaaaaaaaaaaaaaaaaaaaaaaaaaaaaaaaaaaaaaaa

SEQ ID NO: 12322 - RNA, 4094 nt, Artificial Sequence
  SARS-CoV-2/Australia/NSW56/2020__EPI_ISL_417408 spike protein mRNA gc (1-1273)
aggagagucccgcagucggcguccagcggcucugcuuguucgugugugugucguugcaggccuuauucaagcuuaccauguucguguuccugguccuccugccccuggugagcucccagugcgugaaccucaccacccgcacgcagcugccgcccgccuacaccaacagcuucacccggggcgucuacuaccccgacaagguguuccgcuccagcgugcugcacuccacccaggaccucuuccugcccuucuucagcaacgucacgugguuccacgccauccacguguccgggaccaacggcaccaagcgguucgacaacccggugcugcccuucaacgacggggucuacuucgcgagcaccgagaaguccaacaucauccgcggcuggaucuucgggacgacccucgacagcaagacccagucccugcugaucgugaacaacgccaccaacguggucaucaaggugugcgaguuccaguucugcaacgaccccuuccucggcguguacuaccacaagaacaacaagagcuggauggaguccgaguuccgggucuacagcuccgccaacaacugcacguucgaguacgugagccagcccuuccugauggaccuggagggcaagcaggggaacuucaagaaccuccgcgaguucguguucaagaacaucgacggcuacuucaagaucuacuccaagcacaccccgaucaaccugguccgggaccugccccagggguucagcgcccucgagccccugguggaccugcccaucggcaucaacaucacccgcuuccagacccuccuggcccugcaccgguccuaccucacgccgggggacagcagcuccggcuggaccgcgggcgccgccgccuacuacgugggguaccugcagccccgcaccuuccugcucaaguacaacgagaacggcaccaucacggacgcggucgacugcgcccuggacccccugagcgagaccaagugcacccucaaguccuucaccguggagaaggggaucuaccagacgagcaacuuccgggugcagcccaccgaguccaucguccgcuucccgaacaucaccaaccugugccccuucggcgagguguucaacgccacccgguucgccagcgucuacgccuggaaccgcaagcggaucuccaacugcguggcggacuacagcgugcuguacaacuccgccagcuucuccacguucaagugcuacggcgucagccccaccaagcucaacgaccugugcuucaccaacguguacgccgacuccuucgugauccgcggggacgagguccggcagaucgcccccggccagaccgggaagaucgccgacuacaacuacaagcugccggacgacuucacgggcugcgugaucgcguggaacagcaacaaccucgacuccaaggucgggggcaacuacaacuaccuguaccgccuguuccgcaagagcaaccucaagcccuucgagcgggacaucuccaccgagaucuaccaggccggcagcacccccugcaacgggguggagggcuucaacugcuacuucccccugcaguccuacggguuccagccgaccaacggcgugggguaccagcccuaccggguggucgugcugagcuucgagcuccugcacgcccccgccacggugugcggccccaagaaguccaccaaccuggucaagaacaagugcgugaacuucaacuucaacggccucaccgggaccggcgugcugaccgagagcaacaagaaguuccugccguuccagcaguucgggcgcgacaucgccgacacgaccgacgcgguccgcgacccccagacccuggagauccucgacaucacccccugcagcuucggcgggguguccgugaucacgccgggcaccaacaccagcaaccaggucgccgugcuguaccaggacgugaacugcaccgagguccccguggccauccacgccgaccagcugacgcccaccuggcggguguacuccaccggcagcaacgucuuccagacccgcgccgggugccucaucggcgcggagcacgugaacaacuccuacgagugcgacauccccaucggggccggcaucugcgccagcuaccagacgcagaccaacuccccgcggcgcgcccggagcguggcgucccagagcaucaucgccuacaccaugucccugggcgccgagaacagcgucgccuacuccaacaacagcaucgccauccccaccaacuucacgaucuccgugaccaccgagauccugcccgugagcaugaccaagacgagcgucgacugcaccauguacaucugcggggacuccaccgagugcagcaaccuccugcugcaguacggcuccuucugcacccagcucaaccgcgcgcugacggggaucgccguggagcaggacaagaacacccaggagguguucgcccaggucaagcagaucuacaagacgcccccgaucaaggacuucggcggguucaacuucagccagauccugcccgacuccagcaagcccuccaagcggagcuucaucgaggaccuccuguucaacaaggugacccuggccgacgccggcuucaucaagcaguacggcgacugccucggggacaucgcggcccgcgaccugaucugcgcccagaaguucaacggccugaccgugcugcccccgcuccugaccgacgagaugaucgcccaguacaccuccgcccuccuggcggggaccaucacgagcggcuggaccuucggggccggcgccgcccugcagauccccuucgcgaugcagauggccuaccgguucaacggcaucggggucacccagaacgugcucuacgagaaccagaagcugaucgccaaccaguucaacuccgccaucggcaagauccaggacagccuguccagcaccgccuccgcgcucgggaagcugcaggacguggucaaccagaacgcccaggcccugaacacgcucgugaagcagcugagcuccaacuucggcgccaucagcuccgugcugaacgacauccucagccgccuggacaaggucgaggccgaggugcagaucgaccggcugaucaccgggcgccuccagagccugcagaccuacgugacccagcagcugauccgggcggccgagauccgcgccuccgccaaccucgccgcgaccaagaugagcgagugcguccugggccaguccaagcggguggacuucugcggcaagggguaccaccugaugagcuucccccaguccgcgccccacggcguggucuuccuccacgugacguacgucccggcccaggagaagaacuucaccaccgcccccgccaucugccacgacgggaaggcccacuucccccgcgagggcguguucgugagcaacgggacccacugguucgucacgcagcggaacuucuacgagccccagaucaucaccaccgacaacaccuucguguccggcaacugcgacguggucaucggcaucgugaacaacacgguguacgacccgcugcagcccgagcuggacagcuucaaggaggagcucgacaaguacuucaagaaccacaccucccccgacgucgaccugggggacaucagcggcaucaacgccuccguggugaacauccagaaggagaucgaccgccugaacgaggucgccaagaaccucaacgagagccugaucgaccugcaggagcucgggaaguacgagcaguacaucaaguggcccugguacaucuggcugggcuucaucgccggccugaucgcgaucgugauggugaccaucaugcucugcugcaugaccuccugcugcagcugccugaaggggugcugcuccugcggcagcugcugcaaguucgacgaggacgacuccgagccgguccugaagggggugaagcuccacuacacgugaggacuagucccuguucccagagcccacuuuuuuuucuuuuuuugaaauaaaauagccugucuuucagaucucaaaggcucuuuucagagccaccaaaaaaaaaaaaaaaaaaaaaaaaaaaaaaaaaaaaaaaaaaaaaaaaaaaaaaaaaaaaaaaaaaaaaaaaaaaaaaaaaaaaaaaaaaaaaaaaaaaaa

SEQ ID NO: 12323 - RNA, 4094 nt, Artificial Sequence
  SARS-CoV-2/Iceland/280/2020__EPI_ISL_417608 spike protein mRNA gc (1-1273)
aggagagucccgcagucggcguccagcggcucugcuuguucgugugugugucguugcaggccuuauucaagcuuaccauguucguguuccugguccuccugccccuggugagcucccagugcgugaaccucaccacccgcacgcagcugccgcccgccuacaccaacagcuucacccggggcgucuacuaccccgacaagguguuccgcuccagcgugcugcacuccacccaggaccucuuccugcccuucuucagcaacgucacgugguuccacgccauccacguguccgggaccaacggcaccaagcgguucgacaacccggugcugcccuucaacgacggggucuacuucgcgagcaccgagaaguccaacaucauccgcggcuggaucuucgggacgacccucgacagcaagacccagucccugcugaucgugaacaacgccaccaacguggucaucaaggugugcgaguuccaguucugcaacgaccccuuccucggcguguacuaccacaagaacaacaagagcuggauggaguccgaguuccgggucuacagcuccgccaacaacugcacguucgaguacgugagccagcccuuccugauggaccuggagggcaagcaggggaacuucaagaaccuccgcgaguucguguucaagaacaucgacggcuacuucaagaucuacuccaagcacaccccgaucaaccugguccgggaccugccccagggguucagcgcccucgagccccugguggaccugcccaucggcaucaacaucacccgcuuccagacccuccuggcccugcaccgguccuaccucacgccgggggacagcagcuccggcuggaccgcgggcgccgccgccuacuacgugggguaccugcagccccgcaccuuccugcucaaguacaacgagaacggcaccaucacggacgcggucgacugcgcccuggacccccugagcgagaccaagugcacccucaaguccuucaccguggagaaggggaucuaccagacgagcaacuuccgggugcagcccaccgaguccaucguccgcuucccgaacaucaccaaccugugccccuucggcgagguguucaacgccacccgguucgccagcgucuacgccuggaaccgcaagcggaucuccaacugcguggcggacuacagcgugcuguacaacuccgccagcuucuccacguucaagugcuacggcgucagccccaccaagcucaacgaccugugcuucaccaacguguacgccgacuccuucgugauccgcggggacgagguccggcagaucgcccccggccagaccgggaagaucgccgacuacaacuacaagcugccggacgacuucacgggcugcgugaucgcguggaacagcaacaaccucgacuccaaggucgggggcaacuacaacuaccuguaccgccuguuccgcaagagcaaccucaagcccuucgagcgggacaucuccaccgagaucuaccaggccggcagcacccccugcaacgggguggagggcuucaacugcuacuucccccugcaguccuacggguuccagccgaccaacggcgugggguaccagcccuaccggguggucgugcugagcuucgagcuccugcacgcccccgccacggugugcggccccaagaaguccaccaaccuggucaagaacaagugcgugaacuucaacuucaacggccucaccgggaccggcgugcugaccgagagcaacaagaaguuccugccguuccagcaguucgggcgcgacaucgccgacacgaccgacgcgguccgcgacccccagacccuggagauccucgacaucacccccugcagcuucggcgggguguccgugaucacgccgggcaccaacaccagcaaccaggucgccgugcuguaccagggcgugaacugcaccgagguccccguggccauccacgccgaccagcugacgcccaccuggcggguguacuccaccgggagcaacgucuuccagacccgcgccggcugccucaucggggcggagcacgugaacaacuccuacgagugcgacauccccaucggcgccggcaucugcgccagcuaccacacgcagaccaacuccccgcggcgcgcccggagcguggcgucccagagcaucaucgccuacaccaugucccugggggccgagaacagcgucgccuacuccaacaacagcaucgccauccccaccaacuucacgaucuccgugaccaccgagauccugcccgugagcaugaccaagacgagcgucgacugcaccauguacaucugcggcgacuccaccgagugcagcaaccuccugcugcaguacggguccuucugcacccagcucaaccgcgcgcugacgggcaucgccguggagcaggacaagaacacccaggagguguucgcccaggucaagcagaucuacaagacgcccccgaucaaggacuucgggggcuucaacuucagccagauccugcccgaccccuccaagcccagcaagcgguccuucaucgaggaccuccuguucaacaaggugacccuggccgacgccggcuucaucaagcaguacggggacugccucggcgacaucgcggcccgcgaccugaucugcgcccagaaguucaacgggcugaccgugcucccgccccugcugaccgacgagaugaucgcccaguacaccagcgcccuccuggcgggcaccaucacguccggguggaccuucggcgccggcgccgcccugcagauccccuucgcgaugcagauggccuaccgguucaacgggaucggcgucacccagaacgugcucuacgagaaccagaagcugaucgccaaccaguucaacagcgccaucgggaagauccaggacucccugagcuccaccgccagcgcgcucggcaagcugcaggacguggucaaccagaacgcccaggcccugaacacgcucgugaagcagcuguccagcaacuucggggccaucuccagcgugcugaacgacauccucucccgccuggacaaggucgaggccgaggugcagaucgaccggcugaucaccggccgccuccagagccugcagaccuacgugacccagcagcugauccgggcggccgagauccgcgccagcgccaaccucgccgcgaccaagauguccgagugcguccugggccagagcaagcggguggacuucugcgggaagggcuaccaccugauguccuucccccagagcgccccgcacgggguggucuuccuccacgugacguacguccccgcccaggagaagaacuucaccaccgcccccgcgaucugccacgacggcaaggcccacuucccccgcgaggggguguucguguccaacggcacccacugguucgucacgcagcggaacuucuacgagccgcagaucaucaccaccgacaacaccuucgugagcggcaacugcgacguggucaucgggaucgugaacaacacgguguacgacccccugcagcccgagcuggacuccuucaaggaggagcucgacaaguacuucaagaaccacaccagccccgacgucgaccugggcgacaucuccgggaucaacgccagcguggugaacauccagaaggagaucgaccgccugaacgaggucgccaagaaccucaacgagucccugaucgaccugcaggagcucggcaaguacgagcaguacaucaaguggccgugguacaucuggcugggcuucaucgccgggcugaucgcgaucgugauggugaccaucaugcucugcugcaugaccagcugcugcuccugccugaagggcugcugcagcugcggguccugcugcaaguucgacgaggacgacagcgagcccguccugaagggcgugaagcuccacuacacgugaggacuagucccuguucccagagcccacuuuuuuuucuuuuuuugaaauaaaauagccugucuuucagaucucaaaggcucuuuucagagccaccaaaaaaaaaaaaaaaaaaaaaaaaaaaaaaaaaaaaaaaaaaaaaaaaaaaaaaaaaaaaaaaaaaaaaaaaaaaaaaaaaaaaaaaaaaaaaaaaaaaaa

SEQ ID NO: 12324 - RNA, 4094 nt, Artificial Sequence
  SARS-CoV-2/Iceland/247/2020__EPI_ISL_417575 spike protein mRNA gc (1-1273)
aggagagucccgcagucggcguccagcggcucugcuuguucgugugugugucguugcaggccuuauucaagcuuaccauguucguguuccugguccuccugccccuggugagcucccagugcgugaaccucaccacccgcacgcagcugccgcccgccuacaccaacagcuucacccggggcgucuacuaccccgacaagguguuccgcuccagcgugcugcacuccacccaggaccucuuccugcccuucuucagcaacgucacgugguuccacgccauccacguguccgggaccaacggcaccaagcgguucgacaacccggugcugcccuucaacgacggggucuacuucgcgagcaccgagaaguccaacaucauccgcggcuggaucuucgggacgacccucgacagcaagacccagucccugcugaucgugaacaacgccaccaacguggucaucaaggugugcgaguuccaguucugcaacgaccccuuccucggcguguacuaccacaagaacaacaagagcuggauggaguccgaguuccgggucuacagcuccgccaacaacugcacguucgaguacgugagccagcccuuccugauggaccuggagggcaagcaggggaacuucaagaaccuccgcgaguucguguucaagaacaucgacggcuacuucaagaucuacuccaagcacaccccgaucaaccugguccgggaccugccccagggguucagcgcccucgagccccugguggaccugcccaucggcaucaacaucacccgcuuccagacccuccuggcccugcaccgguccuaccucacgccgggggacagcagcuccggcuggaccgcgggcgccgccgccuacuacgugggguaccugcagccccgcaccuuccugcucaaguacaacgagaacggcaccaucacggacgcggucgacugcgcccuggacccccugagcgagaccaagugcacccucaaguccuucaccguggagaaggggaucuaccagacgagcaacuuccgggugcagcccaccgaguccaucguccgcuucccgaacaucaccaaccugugccccuucggcgagguguucaacgccacccgguucgccagcgucuacgccuggaaccgcaagcggaucuccaacugcguggcggacuacagcgugcuguacaacuccgccagcuucuccacguucaagugcuacggcgucagccccaccaagcucaacgaccugugcuucaccaacguguacgccgacuccuucgugauccgcggggacgagguccggcagaucgcccccggccagaccgggaagaucgccgacuacaacuacaagcugccggacgacuucacgggcugcgugaucgcguggaacagcaacaaccucgacuccaaggucgggggcaacuacaacuaccuguaccgccuguuccgcaagagcaaccucaagcccuucgagcgggacaucuccaccgagaucuaccaggccggcagcacccccugcaacgggguggagggcuucaacugcuacuucccccugcaguccuacggguuccagccgaccaacggcgugggguaccagcccuaccggguggucgugcugagcuucgagcuccugcacgcccccgccacggugugcggccccaagaaguccaccaaccuggucaagaacaagugcgugaacuucaacuucaacggccucaccgggaccggcgugcugaccgagagcaacaagaaguuccugccguuccagcaguucgggcgcgacaucgccgacacgaccgacgcgguccgcgacccccagacccuggagauccucgacaucacccccugcagcuucggcgggguguccgugaucacgccgggcaccaacaccagcaaccaggucgccgugcuguaccagggcgugaacugcaccgagguccccguggccauccacgccgaccagcugacgcccaccuggcggguguacuccaccgggagcaacgucuuccagacccgcgccggcugccucaucggggcggagcacgugaacaacuccuacgagugcgacauccccaucggcgccggcaucugcgccagcuaccagacgcagaccaacuccccgcggcgcgcccggagcguggcgucccagagcaucaucgccuacaccaugucccugggggccgagaacagcgucgccuacuccaacaacagcaucgccauccccaccaacuucacgaucuccgugaccaccgagauccugcccgugagcaugaccaagacgagcgucgacugcaccauguacaucugcggcgacuccaccgagugcagcaaccuccugcugcaguacggguccuucugcacccagcucaaccgcgcgcugacgggcaucgccguggagcaggacaagaacacccaggagguguucgcccaggucaagcagaucuacaagacgcccccgaucaaggacuucgggggcuucaacuucagccagauccugcccgaccccuccaagcccagcaagcgguccuucaucgaggaccuccuguucaacaaggugacccuggccgacgccggcuucaucaagcaguacggggacugccucggcgacaucgcggcccgcgaccugaucugcgcccagaaguucaacgggcugaccgugcucccgccccugcugaccgacgagaugaucgcccaguacaccagcgcccuccuggcgggcaccaucacguccggguggaccuucggcgccggcgccgcccugcagauccccuucgcgaugcagauggccuaccgguucaacgggaucggcgucacccagaacgugcucuacgagaaccagaagcugaucgccaaccaguucaacagcgccaucgggaagauccaggacucccugagcuccaccgccagcgcgcucggcaagcugcaggacguggucaaccagaacgcccaggcccugaacacgcucgugaagcagcuguccagcaacuucggggccaucuccagcgugcugaacgacauccucucccgccuggacaaggucgaggccgaggugcagaucgaccggcugaucaccggccgccuccagagccugcagaccuacgugacccagcagcugauccgggcggccgagauccgcgccagcgccaaccucgccgcgaccaagauguccgagugcguccugggccagagcaagcggguggacuucugcgggaagggcuaccaccugauguccuucccccagagcgccccgcacgggguggucuuccuccacgugacguacguccccgcccaggagaagaacuucaccaccgcccccgcgaucugccacgacggcaaggcccacuucccccgcgaggggguguucguguccaacggcacccacugguucgucacgcagcggaacuucuacgagccgcagaucaucaccaccgacaacaccuucgugagcggcaacugcgacguggucaucgggaucgugaacaacacgguguacgacccccugcagcccgagcuggacuccuucaaggaggagcucgacaaguacuucaagaaccacaccagccccgacgucgaccugggcgacaucuccgggaucaacgccagcguggugaacauccagaaggagaucgaccgccugaacgaggucgccaagaaccucaacgagucccugaucgaccugcaggagcucggcaaguacgagcaguacaucaaguggccgugguacaucuggcugggcuucaucgccgggcugaucgcgaucgugaucgugaccaucaugcucugcugcaugaccagcugcugcuccugccugaagggcugcugcagcugcggguccugcugcaaguucgacgaggacgacagcgagcccguccugaagggcgugaagcuccacuacacgugaggacuagucccuguucccagagcccacuuuuuuuucuuuuuuugaaauaaaauagccugucuuucagaucucaaaggcucuuuucagagccaccaaaaaaaaaaaaaaaaaaaaaaaaaaaaaaaaaaaaaaaaaaaaaaaaaaaaaaaaaaaaaaaaaaaaaaaaaaaaaaaaaaaaaaaaaaaaaaaaaaaaa

SEQ ID NO: 12325 - RNA, 4094 nt, Artificial Sequence
  SARS-CoV-2/Iceland/238/2020__EPI_ISL_417566 spike protein mRNA gc (1-1273)
aggagagucccgcagucggcguccagcggcucugcuuguucgugugugugucguugcaggccuuauucaagcuuaccauguucguguuccugguccuccugccccuggugagcucccagugcgugaaccucaccacccgcacgcagcugccgcccgccuacaccaacagcuucacccggggcgucuacuaccccgacaagguguuccgcuccagcgugcugcacuccacccaggaccucuuccugcccuucuucagcaacgucacgugguuccacgccauccacguguccgggaccaacggcaccaagcgguucgacaacccggugcugcccuucaacgacggggucuacuucgcgagcaccgagaaguccaacaucauccgcggcuggaucuucgggacgacccucgacagcaagacccagucccugcugaucgugaacaacgccaccaacguggucaucaaggugugcgaguuccaguucugcaacgaccccuuccucggcguguacuaccacaagaacaacaagagcuggauggaguccgaguuccgggucuacagcuccgccaacaacugcacguucgaguacgugagccagcccuuccugauggaccuggagggcaagcaggggaacuucaagaaccuccgcgaguucguguucaagaacaucgacggcuacuucaagaucuacuccaagcacaccccgaucaaccugguccgggaccugccccagggguucagcgcccucgagccccugguggaccugcccaucggcaucaacaucacccgcuuccagacccuccuggcccugcaccgguccuaccucacgccgggggacagcagcuccggcuggaccgcgggcgccgccgccuacuacgugggguaccugcagccccgcaccuuccugcucaaguacaacgagaacggcaccaucacggacgcggucgacugcgcccuggacccccugagcgagaccaagugcacccucaaguccuucaccguggagaaggggaucuaccagacgagcaacuuccgggugcagcccaccgaguccaucguccgcuucccgaacaucaccaaccugugccccuucggcgagguguucaacgccacccgguucgccagcgucuacgccuggaaccgcaagcggaucuccaacugcguggcggacuacagcgugcuguacaacuccgccagcuucuccacguucaagugcuacggcgucagccccaccaagcucaacgaccugugcuucaccaacguguacgccgacuccuucgugauccgcggggacgagguccggcagaucgcccccggccagaccgggaagaucgccgacuacaacuacaagcugccggacgacuucacgggcugcgugaucgcguggaacagcaacaaccucgacuccaaggucgggggcaacuacaacuaccuguaccgccuguuccgcaagagcaaccucaagcccuucgagcgggacaucuccaccgagaucuaccaggccggcagcacccccugcaacgggguggagggcuucaacugcuacuucccccugcaguccuacggguuccagccgaccaacggcgugggguaccagcccuaccggguggucgugcugagcuucgagcuccugcacgcccccgccacggugugcggccccaagaaguccaccaaccuggucaagaacaagugcgugaacuucaacuucaacggccucaccgggaccggcgugcugaccgagagcaacaagaaguuccugccguuccagcaguucgggcgcgacaucgccgacacgaccgacgcgguccgcgacccccagacccuggagauccucgacaucacccccugcagcuucggcgggguguccgugaucacgccgggcaccaacaccagcaaccaggucgccgugcuguaccagggcgugaacugcaccgagguccccguggccauccacgccgaccagcugacgcccaccuggcggguguacuccaccgggagcaacgucuuccagacccgcgccggcugccucaucggggcggagcacgugaacaacuccuacgagugcgacauccccaucggcgccggcaucugcgccagcuaccagacgcagaccaacuccccgcggcgcgcccggagcguggcgucccagagcaucaucgccuacaccaugucccugggggccgagaacagcgucgccuacuccaacaacagcaucgccauccccaccaacuucacgaucuccgugaccaccgagauccugcccgugagcaugaccaagacgagcgucgacugcaccauguacaucugcggcgacuccaccgagugcagcaaccuccugcugcaguacggguccuucugcacccagcucaaccgcgcgcugacgggcaucgccguggagcaggacaagaacacccaggagguguucgcccaggucaagcagaucuacaagacgcccccgaucaaggacuucgggggcuucaacuucagccagauccugcccgaccccuccaagcccagcaagcgguccuucaucgaggaccuccuguucaacaaggugacccuggccgacgugggcuucaucaagcaguacggggacugccucggcgacaucgccgcgcgcgaccugaucugcgcccagaaguucaacgggcugaccguccucccgccccugcugaccgacgagaugaucgcccaguacaccagcgcccuccuggccggcaccaucacguccggguggaccuucggcgcgggcgccgcccugcagauccccuucgccaugcagauggcguaccgguucaacgggaucggcgugacccagaacgugcucuacgagaaccagaagcugaucgccaaccaguucaacagcgccaucgggaagauccaggacucccugagcuccaccgccagcgcccucggcaagcugcaggacgucgugaaccagaacgcgcaggcccugaacacgcucgugaagcagcuguccagcaacuucggggccaucuccagcguccugaacgacauccucucccgccuggacaagguggaggccgaggugcagaucgaccggcugaucaccggccgccuccagagccugcagaccuacgucacccagcagcugauccgggccgcggagauccgcgccagcgccaaccucgccgccaccaagauguccgagugcgugcugggccagagcaagcggguggacuucugcgggaagggcuaccaccugauguccuucccccagagcgcgccgcacggggucguguuccuccacgucacguacgugcccgcccaggagaagaacuucaccaccgcccccgccaucugccacgacggcaaggcgcacuucccccgcgaggggguguucgucuccaacggcacccacugguucgugacgcagcggaacuucuacgagccgcagaucaucaccaccgacaacaccuucgugagcggcaacugcgacgucgugaucgggaucgugaacaacacggucuacgacccccugcagcccgagcuggacuccuucaaggaggagcucgacaaguacuucaagaaccacaccagccccgacguggaccugggcgacaucuccgggaucaacgccagcguggucaacauccagaaggagaucgaccgccugaacgagguggccaagaaccucaacgagucccugaucgaccugcaggagcucggcaaguacgagcaguacaucaaguggccgugguacaucuggcugggcuucaucgccgggcugaucgccaucgugauggucaccaucaugcucugcugcaugaccagcugcugcuccugccugaagggcugcugcagcugcggguccugcugcaaguucgacgaggacgacagcgagcccgugcugaagggcgugaagcuccacuacacgugaggacuagucccuguucccagagcccacuuuuuuuucuuuuuuugaaauaaaauagccugucuuucagaucucaaaggcucuuuucagagccaccaaaaaaaaaaaaaaaaaaaaaaaaaaaaaaaaaaaaaaaaaaaaaaaaaaaaaaaaaaaaaaaaaaaaaaaaaaaaaaaaaaaaaaaaaaaaaaaaaaaaa

SEQ ID NO: 12326 - RNA, 4094 nt, Artificial Sequence
  SARS-CoV-2/Greece/16/2020__EPI_ISL_418265 spike protein mRNA gc (1-1273)
aggagagucccgcagucggcguccagcggcucugcuuguucgugugugugucguugcaggccuuauucaagcuuaccauguucguguuccugguccuccugccccuggugagcucccagugcgugaaccucaccacccgcacgcagcugccgcccgccuacaccaacagcuucacccggggcgucuacuaccccgacaagguguuccgcuccagcgugcugcacuccacccaggaccucuuccugcccuucuucagcaacgucacgugguuccacgccauccacguguccgggaccaacggcaccaagcgguucgacaacccggugcugcccuucaacgacggggucuacuucgcgagcaccgagaaguccaacaucauccgcggcuggaucuucgggacgacccucgacagcaagacccagucccugcugaucgugaacaacgccaccaacguggucaucaaggugugcgaguuccaguucugcaacgaccccuuccucggcguguacuaccacaagaacaacaagagcuggauggaguccgaguuccgggucuacagcuccgccaacaacugcacguucgaguacgugagccagcccuuccugauggaccuggagggcaagcaggggaacuucaagaaccuccgcgaguucguguucaagaacgucgacggcuacuucaagaucuacuccaagcacaccccgaucaaccuggugcgggaccugccccagggguucagcgcccucgagccccugguggaccugcccaucggcaucaacaucacccgcuuccagacccuccuggcccugcaccgguccuaccucacgccgggggacagcagcuccggcuggaccgcgggcgccgccgccuacuacgucggguaccugcagccccgcaccuuccugcucaaguacaacgagaacggcaccaucacggacgcgguggacugcgcccuggacccccugagcgagaccaagugcacccucaaguccuucaccguggagaaggggaucuaccagacgagcaacuuccggguccagcccaccgaguccaucgugcgcuucccgaacaucaccaaccugugccccuucggcgaggucuucaacgccacccgguucgccagcguguacgccuggaaccgcaagcggaucuccaacugcguggcggacuacagcguccuguacaacuccgccagcuucuccacguucaagugcuacggcgugagccccaccaagcucaacgaccugugcuucaccaacguguacgccgacuccuucgucauccgcggggacgaggugcggcagaucgcccccggccagaccgggaagaucgccgacuacaacuacaagcugccggacgacuucacgggcugcgugaucgcguggaacagcaacaaccucgacuccaaggucgggggcaacuacaacuaccuguaccgccuguuccgcaagagcaaccucaagcccuucgagcgggacaucuccaccgagaucuaccaggccggcagcacccccugcaacgggguggagggcuucaacugcuacuucccccugcaguccuacggguuccagccgaccaacggcgugggguaccagcccuaccgggucguggugcugagcuucgagcuccugcacgcccccgccacggucugcggccccaagaaguccaccaaccuggugaagaacaagugcgugaacuucaacuucaacggccucaccgggaccggcguccugaccgagagcaacaagaaguuccugccguuccagcaguucgggcgcgacaucgccgacacgaccgacgcggugcgcgacccccagacccuggagauccucgacaucacccccugcagcuucggcgggguguccgucaucacgccgggcaccaacaccagcaaccagguggccgugcuguaccaggacgucaacugcaccgaggugcccguggccauccacgccgaccagcugacgcccaccuggcgggucuacuccaccggcagcaacguguuccagacccgcgccgggugccucaucggcgcggagcacgugaacaacuccuacgagugcgacauccccaucggggccggcaucugcgccagcuaccagacgcagaccaacuccccgcggcgcgcccggagcgucgcgucccagagcaucaucgccuacaccaugucccugggcgccgagaacagcguggccuacuccaacaacagcaucgccauccccaccaacuucacgaucuccgugaccaccgagauccugcccgucagcaugaccaagacgagcguggacugcaccauguacaucugcggggacuccaccgagugcagcaaccuccugcugcaguacggcuccuucugcacccagcucaaccgcgcgcugacggggaucgccguggagcaggacaagaacacccaggaggucuucgcccaggugaagcagaucuacaagacgcccccgaucaaggacuucggcggguucaacuucagccagauccugcccgaccccuccaagcccagcaagcgguccuucaucgaggaccuccuguucaacaaggugacccuggccgacgccggcuucaucaagcaguacggcgacugccucggggacaucgcggcccgcgaccugaucugcgcccagaaguucaacggccugaccguccucccgccccugcugaccgacgagaugaucgcccaguacaccagcgcccuccuggcggggaccaucacguccggcuggaccuucggggccggcgccgcccugcagauccccuucgcgaugcagauggccuaccgguucaacggcaucggggugacccagaacgugcucuacgagaaccagaagcugaucgccaaccaguucaacagcgccaucggcaagauccaggacucccugagcuccaccgccagcgcgcucgggaagcugcaggacgucgugaaccagaacgcccaggcccugaacacgcucgugaagcagcuguccagcaacuucggcgccaucuccagcguccugaacgacauccucucccgccuggacaagguggaggccgaggugcagaucgaccggcugaucaccgggcgccuccagagccugcagaccuacgucacccagcagcugauccgggcggccgagauccgcgccagcgccaaccucgccgcgaccaagauguccgagugcgugcugggccagagcaagcggguggacuucugcggcaagggguaccaccugauguccuucccccagagcgccccgcacggcgucguguuccuccacgucacguacgugcccgcccaggagaagaacuucaccaccgcccccgcgaucugccacgacgggaaggcccacuucccccgcgagggcguguucgucuccaacgggacccacugguucgugacgcagcggaacuucuacgagccgcagaucaucaccaccgacaacaccuucgugagcggcaacugcgacgucgugaucggcaucgugaacaacacggucuacgacccccugcagcccgagcuggacuccuucaaggaggagcucgacaaguacuucaagaaccacaccagccccgacguggaccugggggacaucuccggcaucaacgccagcguggucaacauccagaaggagaucgaccgccugaacgagguggccaagaaccucaacgagucccugaucgaccugcaggagcucgggaaguacgagcaguacaucaaguggccgugguacaucuggcugggcuucaucgccggccugaucgcgaucgugauggucaccaucaugcucugcugcaugaccagcugcugcuccugccugaaggggugcugcagcugcggcuccugcugcaaguucgacgaggacgacagcgagcccgugcugaagggggugaagcuccacuacacgugaggacuagucccuguucccagagcccacuuuuuuuucuuuuuuugaaauaaaauagccugucuuucagaucucaaaggcucuuuucagagccaccaaaaaaaaaaaaaaaaaaaaaaaaaaaaaaaaaaaaaaaaaaaaaaaaaaaaaaaaaaaaaaaaaaaaaaaaaaaaaaaaaaaaaaaaaaaaaaaaaaaaa

SEQ ID NO: 12327 - RNA, 4094 nt, Artificial Sequence
  SARS-CoV-2/Iceland/319/2020__EPI_ISL_417648 spike protein mRNA gc (1-1273)
aggagagucccgcagucggcguccagcggcucugcuuguucgugugugugucguugcaggccuuauucaagcuuaccauguucguguuccugguccuccugccccuggugagcucccagugcgugaaccucaccacccgcacgcagcugccgcccgccuacaccaacagcuucacccggggcgucuacuaccccgacaagguguuccgcuccagcgugcugcacuccacccaggaccucuuccugcccuucuucagcaacgucacgugguuccacgccauccacguguccgggaccaacggcaccaagcgguucgacaacccggugcugcccuucaacgacggggucuacuucgcgagcaccgagaaguccaacaucauccgcggcuggaucuucgggacgacccucgacagcaagacccagucccugcugaucgugaacaacgccaccaacguggucaucaaggugugcgaguuccaguucugcaacgaccccuuccucggcguguacuaccacaagaacaacaagagcuggauggaguccgaguuccgggucuacagcuccgccaacaacugcacguucgaguacgugagccagcccuuccugaucgaccuggagggcaagcaggggaacuucaagaaccuccgcgaguucguguucaagaacaucgacggcuacuucaagaucuacuccaagcacaccccgaucaaccugguccgggaccugccccagggguucagcgcccucgagccccugguggaccugcccaucggcaucaacaucacccgcuuccagacccuccuggcccugcaccgguccuaccucacgccgggggacagcagcuccggcuggaccgcgggcgccgccgccuacuacgugggguaccugcagccccgcaccuuccugcucaaguacaacgagaacggcaccaucacggacgcggucgacugcgcccuggacccccugagcgagaccaagugcacccucaaguccuucaccguggagaaggggaucuaccagacgagcaacuuccgggugcagcccaccgaguccaucguccgcuucccgaacaucaccaaccugugccccuucggcgagguguucaacgccacccgguucgccagcgucuacgccuggaaccgcaagcggaucuccaacugcguggcggacuacagcgugcuguacaacuccgccagcuucuccacguucaagugcuacggcgucagccccaccaagcucaacgaccugugcuucaccaacguguacgccgacuccuucgugauccgcggggacgagguccggcagaucgcccccggccagaccgggaagaucgccgacuacaacuacaagcugccggacgacuucacgggcugcgugaucgcguggaacagcaacaaccucgacuccaaggucgggggcaacuacaacuaccuguaccgccuguuccgcaagagcaaccucaagcccuucgagcgggacaucuccaccgagaucuaccaggccggcagcacccccugcaacgggguggagggcuucaacugcuacuucccccugcaguccuacggguuccagccgaccaacggcgugggguaccagcccuaccggguggucgugcugagcuucgagcuccugcacgcccccgccacggugugcggccccaagaaguccaccaaccuggucaagaacaagugcgugaacuucaacuucaacggccucaccgggaccggcgugcugaccgagagcaacaagaaguuccugccguuccagcaguucgggcgcgacaucgccgacacgaccgacgcgguccgcgacccccagacccuggagauccucgacaucacccccugcagcuucggcgggguguccgugaucacgccgggcaccaacaccagcaaccaggucgccgugcuguaccagggcgugaacugcaccgagguccccguggccauccacgccgaccagcugacgcccaccuggcggguguacuccaccgggagcaacgucuuccagacccgcgccggcugccucaucggggcggagcacgugaacaacuccuacgagugcgacauccccaucggcgccggcaucugcgccagcuaccagacgcagaccaacuccccgcggcgcgcccggagcguggcgucccagagcaucaucgccuacaccaugucccugggggccgagaacagcgucgccuacuccaacaacagcaucgccauccccaccaacuucacgaucuccgugaccaccgagauccugcccgugagcaugaccaagacgagcgucgacugcaccauguacaucugcggcgacuccaccgagugcagcaaccuccugcugcaguacggguccuucugcacccagcucaaccgcgcgcugacgggcaucgccguggagcaggacaagaacacccaggagguguucgcccaggucaagcagaucuacaagacgcccccgaucaaggacuucgggggcuucaacuucagccagauccugcccgaccccuccaagcccagcaagcgguccuucaucgaggaccuccuguucaacaaggugacccuggccgacgccggcuucaucaagcaguacggggacugccucggcgacaucgcggcccgcgaccugaucugcgcccagaaguucaacgggcugaccgugcucccgccccugcugaccgacgagaugaucgcccaguacaccagcgcccuccuggcgggcaccaucacguccggguggaccuucggcgccggcgccgcccugcagauccccuucgcgaugcagauggccuaccgguucaacgggaucggcgucacccagaacgugcucuacgagaaccagaagcugaucgccaaccaguucaacagcgccaucgggaagauccaggacucccugagcuccaccgccagcgcgcucggcaagcugcaggacguggucaaccagaacgcccaggcccugaacacgcucgugaagcagcuguccagcaacuucggggccaucuccagcgugcugaacgacauccucucccgccuggacaaggucgaggccgaggugcagaucgaccggcugaucaccggccgccuccagagccugcagaccuacgugacccagcagcugauccgggcggccgagauccgcgccagcgccaaccucgccgcgaccaagauguccgagugcguccugggccagagcaagcggguggacuucugcgggaagggcuaccaccugauguccuucccccagagcgccccgcacgggguggucuuccuccacgugacguacguccccgcccaggagaagaacuucaccaccgcccccgcgaucugccacgacggcaaggcccacuucccccgcgaggggguguucguguccaacggcacccacugguucgucacgcagcggaacuucuacgagccgcagaucaucaccaccgacaacaccuucgugagcggcaacugcgacguggucaucgggaucgugaacaacacgguguacgacccccugcagcccgagcuggacuccuucaaggaggagcucgacaaguacuucaagaaccacaccagccccgacgucgaccugggcgacaucuccgggaucaacgccagcguggugaacauccagaaggagaucgaccgccugaacgaggucgccaagaaccucaacgagucccugaucgaccugcaggagcucggcaaguacgagcaguacaucaaguggccgugguacaucuggcugggcuucaucgccgggcugaucgcgaucgugauggugaccaucaugcucugcugcaugaccagcugcugcuccugccugaagggcugcugcagcugcggguccugcugcaaguucgacgaggacgacagcgagcccguccugaagggcgugaagcuccacuacacgugaggacuagucccuguucccagagcccacuuuuuuuucuuuuuuugaaauaaaauagccugucuuucagaucucaaaggcucuuuucagagccaccaaaaaaaaaaaaaaaaaaaaaaaaaaaaaaaaaaaaaaaaaaaaaaaaaaaaaaaaaaaaaaaaaaaaaaaaaaaaaaaaaaaaaaaaaaaaaaaaaaaaa

SEQ ID NO: 12328 - RNA, 4094 nt, Artificial Sequence
  SARS-CoV-2/Congo/94/2020__EPI_ISL_417947 spike protein mRNA gc (1-1273)
aggagagucccgcagucggcguccagcggcucugcuuguucgugugugugucguugcaggccuuauucaagcuuaccauguucguguuccugguccuccugccccuggugagcucccagugcgugaaccucaccacccgcacgcagcugccgcccgccuacaccaacagcuucacccggggcgucuacuaccccgacaagguguuccgcuccagcgugcugcacuccacccaggaccucuuccugcccuucuucagcaacgucacgugguuccacgccauccacguguccgggaccaacggcaccaagcgguucgacaacccggugcugcccuucaacgacggggucuacuucgcgagcaccgagaaguccaacaucauccgcggcuggaucuucgggacgacccucgacagcaagacccagucccugcugaucgugaacaacgccaccaacguggucaucaaggugugcgaguuccaguucugcaacgaccccuuccucggcguguacuaccacaagaacaacaagagcuggauggaguccgaguuccgggucuacagcuccgccaacaacugcacguucgaguacgugagccagcccuuccugauggaccuggagggcaagcaggggaacuucaagaaccuccgcgaguucguguucaagaacaucgacggcuacuucaagaucuacuccaagcacaccccgaucaaccugguccgggaccugccccagggguucagcgcccucgagccccugguggaccugcccaucggcaucaacaucacccgcuuccagacccuccuggcccugcaccgguccuaccucacgccgggggacagcagcuccggcuggaccgcgggcgccgccgccuacuacgugggguaccugcagccccgcaccuuccugcucaaguacaacgagaacggcaccaucacggacgcggucgacugcgcccuggacccccugagcgagaccaagugcacccucaaguccuucaccguggagaaggggaucuaccagacgagcaacuuccgggugcagcccaccgaguccaucguccgcuucccgaacaucaccaaccugugccccuucggcgagguguucaacgccacccgguucgccagcgucuacgccuggaaccgcaagcggaucuccaacugcguggcggacuacagcgugcuguacaacuccgccagcuucuccacguucaagugcuacggcgucagccccaccaagcucaacgaccugugcuucaccaacguguacgccgacuccuucgugauccgcggggacgagguccggcagaucgcccccggccagaccgggaagaucgccgacuacaacuacaagcugccggacgacuucacgggcugcgugaucgcguggaacagcaacaaccucgacuccaaggucgggggcaacuacaacuaccuguaccgccuguuccgcaagagcaaccucaagcccuucgagcgggacaucuccaccgagaucuaccaggccggcagcacccccugcaacgggguggagggcuucaacugcuacuucccccugcaguccuacggguuccagccgaccaacggcgugggguaccagcccuaccggguggucgugcugagcuucgagcuccugcacgcccccgccacggugugcggccccaagaaguccaccaaccuggucaagaacaagugcgugaacuucaacuucaacggccucaccgggaccggcgugcugaccgagagcaacaagaaguuccugccguuccagcaguucgggcgcgacaucgccgacacgaccgacgcgguccgcgacccccagacccuggagauccucgacaucacccccugcagcuucggcgggguguccgugaucacgccgggcaccaacaccagcaaccaggucgccgugcuguaccagggcgugaacugcaccgagguccccguggccauccacgccgaccagcugacgcccaccuggcggguguacuccaccgggagcaacgucuuccagacccgcgccggcugccucaucggggcggagcacgugaacaacuccuacgagugcgacauccccaucggcgccggcaucugcgccagcuaccagacgcagaccaacuccccgcggcgcgcccggagcguggcgucccagagcaucaucgccuacaccaugucccugggggccgagaacagcgucgccuacuccaacaacagcaucgccauccccaccaacuucacgaucuccgugaccaccgagauccugcccgugagcaugaccaagacgagcgucgacugcaccauguacaucugcggcgacuccaccgagugcagcaaccuccugcugcaguacggguccuucugcacccagcucaaccgcgcgcugacgggcaucgccguggagcaggacaagaacacccaggagguguucgcccaggucaagcagaucuacaagacgcccccgaucaaggacuucgggggcuucaacuucagccagauccugcccgaccccuccaagcccagcaagcgguccuucaucgaggacauccucuucaacaaggugacccuggccgacgccggcuucaucaagcaguacggggacugccugggcgacaucgcggcccgcgaccucaucugcgcccagaaguucaacgggcugaccgugcugccgccccuccugaccgacgagaugaucgcccaguacaccagcgcccugcucgcgggcaccaucacguccggguggaccuucggcgccggcgccgcccugcagauccccuucgcgaugcagauggccuaccgguucaacgggaucggcgucacccagaacgugcuguacgagaaccagaagcucaucgccaaccaguucaacagcgccaucgggaagauccaggacucccugagcuccaccgccagcgcgcugggcaagcuccaggacguggucaaccagaacgcccaggcccugaacacgcuggugaagcagcucuccagcaacuucggggccaucuccagcgugcugaacgacauccugucccgccucgacaaggucgaggccgaggugcagaucgaccggcugaucaccggccgccugcagagccuccagaccuacgugacccagcagcugauccgggcggccgagauccgcgccagcgccaaccuggccgcgaccaagauguccgagugcguccucggccagagcaagcggguggacuucugcgggaagggcuaccaccugauguccuucccccagagcgccccgcacgggguggucuuccugcacgugacguacguccccgcccaggagaagaacuucaccaccgcccccgcgaucugccacgacggcaaggcccacuucccccgcgaggggguguucguguccaacggcacccacugguucgucacgcagcggaacuucuacgagccgcagaucaucaccaccgacaacaccuucgugagcggcaacugcgacguggucaucgggaucgugaacaacacgguguacgacccccuccagcccgagcuggacuccuucaaggaggagcuggacaaguacuucaagaaccacaccagccccgacgucgaccucggcgacaucuccgggaucaacgccagcguggugaacauccagaaggagaucgaccgccugaacgaggucgccaagaaccugaacgagucccucaucgaccugcaggagcugggcaaguacgagcaguacaucaaguggccgugguacaucuggcucggcuucaucgccgggcugaucgcgaucgugauggugaccaucaugcugugcugcaugaccagcugcugcuccugccucaagggcugcugcagcugcggguccugcugcaaguucgacgaggacgacagcgagcccguccugaagggcgugaagcugcacuacacgugaggacuagucccuguucccagagcccacuuuuuuuucuuuuuuugaaauaaaauagccugucuuucagaucucaaaggcucuuuucagagccaccaaaaaaaaaaaaaaaaaaaaaaaaaaaaaaaaaaaaaaaaaaaaaaaaaaaaaaaaaaaaaaaaaaaaaaaaaaaaaaaaaaaaaaaaaaaaaaaaaaaaa

SEQ ID NO: 12329 - RNA, 4094 nt, Artificial Sequence
  SARS-CoV-2/Congo/158/2020__EPI_ISL_417950 spike protein mRNA gc (1-1273)
aggagagucccgcagucggcguccagcggcucugcuuguucgugugugugucguugcaggccuuauucaagcuuaccauguucguguuccugguccuccugccccuggugagcucccagugcgugaaccucaccacccgcacgcagcugccgcccgccuacaccaacagcuucacccggggcgucuacuaccccgacaagguguuccgcuccagcgugcugcacuccacccaggaccucuuccugcccuucuucagcaacgucacgugguuccacgccauccacguguccgggaccaacggcaccaagcgguucgacaacccggugcugcccuucaacgacggggucuacuucgcgagcaccgagaaguccaacaucauccgcggcuggaucuucgggacgacccucgacagcaagacccagucccugcugaucgugaacaacgccaccaacguggucaucaaggugugcgaguuccaguucugcaacgaccccuuccucggcguguacuaccacaagaacaacaagagcuggauggaguccgaguuccgggucuacagcuccgccaacaacugcacguucgaguacgugagccagcccuuccugauggaccuggagggcaagcaggggaacuucaagaaccuccgcgaguucguguucaagaacaucgacggcuacuucaagaucuacuccaagcacaccccgaucaaccugguccgggaccugccccagggguucagcgcccucgagccccugguggaccugcccaucggcaucaacaucacccgcuuccagacccuccuggcccugcaccgguccuaccucacgccgggggacagcagcuccggcuggaccgcgggcgccgccgccuacuacgugggguaccugcagccccgcaccuuccugcucaaguacaacgagaacggcaccaucacggacgcggucgacugcgcccuggacccccugagcgagaccaagugcacccucaaguccuucaccguggagaaggggaucuaccagacgagcaacuuccgggugcagcccaccgaguccaucguccgcuucccgaacaucaccaaccugugccccuucggcgagguguucaacgccacccgguucgccagcgucuacgccuggaaccgcaagcggaucuccaacugcguggcggacuacagcgugcuguacaacuccgccagcuucuccacguucaagugcuacggcgucagccccaccaagcucaacgaccugugcuucaccaacguguacgccgacuccuucgugauccgcggggacgagguccggcagaucgcccccggccagaccgggaagaucgccgacuacaacuacaagcugccggacgacuucacgggcugcgugaucgcguggaacagcaacaaccucgacuccaaggucgggggcaacuacaacuaccuguaccgccuguuccgcaagagcaaccucaagcccuucgagcgggacaucuccaccgagaucuaccaggccggcagcacccccugcaacgggguggagggcuucaacugcuacuucccccugcaguccuacggguuccagccgaccaacggcgugggguaccagcccuaccggguggucgugcugagcuucgagcuccugcacgcccccgccacggugugcggccccaagaaguccaccaaccuggucaagaacaagugcgugaacuucaacuucaacggccucaccgggaccggcgugcugaccgagagcaacaagaaguuccugccguuccagcaguucgggcgcgacaucgccgacacgaccgacgcgguccgcgacccccagacccuggagauccucgacaucacccccugcagcuucggcgggguguccgugaucacgccgggcaccaacaccagcaaccaggucgccgugcuguaccaggacgugaacugcaccgagguccccguggccauccacgccgaccagcugacgcccaccuggcggguguacuccaccggcagcaacgucuuccagacccgcgccgggugccucaucggcgcggagcacgugaacaacuccuacgagugcgacauccccaucggggccggcaucugcgccagcuaccagacgcagaccaacuccccgcggcgcgcccggagcguggcgucccagagcaucaucgccuacaccaugucccugggcgccgagaacagcgucgccuacuccaacaacagcaucgccauccccaccaacuucacgaucuccgugaccaccgagauccugcccgugagcaugaccaagacgagcgucgacugcaccauguacaucugcggggacuccaccgagugcagcaaccuccugcugcaguacggcuccuucugcacccagcucaaccgcgcgcugacggggaucgccguggagcaggacaagaacacccaggagguguucgcccaggucaagcagaucuacaagacgcccccgaucaaggacuucggcggguucaacuucagccagauccugcccgaccccuccaagcccagcaagcgguccuucaucgaggaccuccuguucaacaaggugacccuggccgacgccggcuucaucaagcaguacggcgacugccucggggacaucgcggcccgcgaccugaucugcgcccagaaguucaacggccugaccgugcucccgccccugcugaccgacgagaugaucgcccaguacaccagcgcccuccuggcggggaccaucacguccggcuggaccuucggggccggcgccgcccugcagauccccuucgcgaugcagauggccuaccgguucaacggcaucggggucacccagaacgugcucuacgagaaccagaagcugaucgccaaccaguucaacagcgccaucggcaagauccaggacucccugagcuccaccgccagcgcgcucgggaagcugcaggacguggucaaccagaacgcccaggcccugaacacgcucgugaagcagcuguccagcaacuucggcgccaucuccagcgugcugaacgacauccucucccgccuggacaaggucgaggccgaggugcagaucgaccggcugaucaccgggcgccuccagagccugcagaccuacgugacccagcagcugauccgggcggccgagauccgcgccagcgccaaccucgccgcgaccaagauguccgagugcguccugggccagagcaagcggguggacuucugcggcaagggguaccaccugauguccuucccccagagcgccccgcacggcguggucuuccuccacgugacguacguccccgcccaggagaagaacuucaccaccgcccccgcgaucugccacgacgggaaggcccacuucccccgcgagggcguguucguguccaacgggacccacugguucgucacgcagcggaacuucuacgagccgcagaucaucaccaccgacaacaccuuccugagcggcaacugcgacguggugaucggcaucgucaacaacacgguguacgacccccugcagcccgagcucgacuccuucaaggaggagcuggacaaguacuucaagaaccacaccagccccgacguggaccugggggacaucuccggcaucaacgccagcgucgugaacauccagaaggagaucgaccgccucaacgagguggccaagaaccugaacgagucccugaucgaccuccaggagcuggggaaguacgagcaguacaucaaguggccgugguacaucuggcugggcuucaucgccggccucaucgcgaucgucauggugaccaucaugcugugcugcaugaccagcugcugcuccugccugaaggggugcugcagcugcggcuccugcugcaaguucgacgaggacgacagcgagcccgugcucaagggggucaagcugcacuacacgugaggacuagucccuguucccagagcccacuuuuuuuucuuuuuuugaaauaaaauagccugucuuucagaucucaaaggcucuuuucagagccaccaaaaaaaaaaaaaaaaaaaaaaaaaaaaaaaaaaaaaaaaaaaaaaaaaaaaaaaaaaaaaaaaaaaaaaaaaaaaaaaaaaaaaaaaaaaaaaaaaaaaa

SEQ ID NO: 12330 - RNA, 4094 nt, Artificial Sequence
  SARS-CoV-2/USA/UT-00034/2020__EPI_ISL_417977 spike protein mRNA gc (1-1273)
aggagagucccgcagucggcguccagcggcucugcuuguucgugugugugucguugcaggccuuauucaagcuuaccauguucguguuccugguccuccugccccuggugagcucccagugcgugaaccucaccacccgcacgcagcugccgcccgccuacaccaacagcuucacccggggcgucuacuaccccgacaagguguuccgcuccagcgugcugcacuccacccaggaccucuuccugcccuucuucagcaacgucacgugguuccacgccauccacguguccgggaccaacggcaccaagcgguucgacaacccggugcugcccuucaacgacggggucuacuucgcgagcaccgagaaguccaacaucauccgcggcuggaucuucgggacgacccucgacagcaagacccagucccugcugaucgugaacaacgccaccaacguggucaucaaggugugcgaguuccaguucugcaacgaccccuuccucggcguguacuacuacaagaacaacaagagcuggauggaguccgaguuccgggucuacagcuccgccaacaacugcacguucgaguacgugagccagcccuuccugauggaccuggagggcaagcaggggaacuucaagaaccuccgcgaguucguguucaagaacaucgacggcuacuucaagaucuacuccaagcacaccccgaucaaccugguccgggaccugccccagggguucagcgcccucgagccccugguggaccugcccaucggcaucaacaucacccgcuuccagacccuccuggcccugcaccgguccuaccucacgccgggggacagcagcuccggcuggaccgcgggcgccgccgccuacuacgugggguaccugcagccccgcaccuuccugcucaaguacaacgagaacggcaccaucacggacgcggucgacugcgcccuggacccccugagcgagaccaagugcacccucaaguccuucaccguggagaaggggaucuaccagacgagcaacuuccgggugcagcccaccgaguccaucguccgcuucccgaacaucaccaaccugugccccuucggcgagguguucaacgccacccgguucgccagcgucuacgccuggaaccgcaagcggaucuccaacugcguggcggacuacagcgugcuguacaacuccgccagcuucuccacguucaagugcuacggcgucagccccaccaagcucaacgaccugugcuucaccaacguguacgccgacuccuucgugauccgcggggacgagguccggcagaucgcccccggccagaccgggaagaucgccgacuacaacuacaagcugccggacgacuucacgggcugcgugaucgcguggaacagcaacaaccucgacuccaaggucgggggcaacuacaacuaccuguaccgccuguuccgcaagagcaaccucaagcccuucgagcgggacaucuccaccgagaucuaccaggccggcagcacccccugcaacgggguggagggcuucaacugcuacuucccccugcaguccuacggguuccagccgaccaacggcgugggguaccagcccuaccggguggucgugcugagcuucgagcuccugcacgcccccgccacggugugcggccccaagaaguccaccaaccuggucaagaacaagugcgugaacuucaacuucaacggccucaccgggaccggcgugcugaccgagagcaacaagaaguuccugccguuccagcaguucgggcgcgacaucgccgacacgaccgacgcgguccgcgacccccagacccuggagauccucgacaucacccccugcagcuucggcgggguguccgugaucacgccgggcaccaacaccagcaaccaggucgccgugcuguaccagggcgugaacugcaccgagguccccguggccauccacgccgaccagcugacgcccaccuggcggguguacuccaccgggagcaacgucuuccagacccgcgccggcugccucaucggggcggagcacgugaacaacuccuacgagugcgacauccccaucggcgccggcaucugcgccagcuaccagacgcagaccaacuccccgcggcgcgcccggagcguggcgucccagagcaucaucgccuacaccaugucccugggggccgagaacagcgucgccuacuccaacaacagcaucgccauccccaccaacuucacgaucuccgugaccaccgagauccugcccgugagcaugaccaagacgagcgucgacugcaccauguacaucugcggcgacuccaccgagugcagcaaccuccugcugcaguacggguccuucugcacccagcucaaccgcgcgcugacgggcaucgccguggagcaggacaagaacacccaggagguguucgcccaggucaagcagaucuacaagacgcccccgaucaaggacuucgggggcuucaacuucagccagauccugcccgaccccuccaagcccagcaagcgguccuucaucgaggaccuccuguucaacaaggugacccuggccgacgccggcuucaucaagcaguacggggacugccucggcgacaucgcggcccgcgaccugaucugcgcccagaaguucaacgggcugaccgugcucccgccccugcugaccgacgagaugaucgcccaguacaccagcgcccuccuggcgggcaccaucacguccggguggaccuucggcgccggcgccgcccugcagauccccuucgcgaugcagauggccuaccgguucaacgggaucggcgucacccagaacgugcucuacgagaaccagaagcugaucgccaaccaguucaacagcgccaucgggaagauccaggacucccugagcuccaccgccagcgcgcucggcaagcugcaggacguggucaaccagaacgcccaggcccugaacacgcucgugaagcagcuguccagcaacuucggggccaucuccagcgugcugaacgacauccucucccgccuggacaaggucgaggccgaggugcagaucgaccggcugaucaccggccgccuccagagccugcagaccuacgugacccagcagcugauccgggcggccgagauccgcgccagcgccaaccucgccgcgaccaagauguccgagugcguccugggccagagcaagcggguggacuucugcgggaagggcuaccaccugauguccuucccccagagcgccccgcacgggguggucuuccuccacgugacguacguccccgcccaggagaagaacuucaccaccgcccccgcgaucugccacgacggcaaggcccacuucccccgcgaggggguguucguguccaacggcacccacugguucgucacgcagcggaacuucuacgagccgcagaucaucaccaccgacaacaccuucgugagcggcaacugcgacguggucaucgggaucgugaacaacacgguguacgacccccugcagcccgagcuggacuccuucaaggaggagcucgacaaguacuucaagaaccacaccagccccgacgucgaccugggcgacaucuccgggaucaacgccagcguggugaacauccagaaggagaucgaccgccugaacgaggucgccaagaaccucaacgagucccugaucgaccugcaggagcucggcaaguacgagcaguacaucaaguggccgugguacaucuggcugggcuucaucgccgggcugaucgcgaucgugauggugaccaucaugcucugcugcaugaccagcugcugcuccugccugaagggcugcugcagcugcggguccugcugcaaguucgacgaggacgacagcgagcccguccugaagggcgugaagcuccacuacacgugaggacuagucccuguucccagagcccacuuuuuuuucuuuuuuugaaauaaaauagccugucuuucagaucucaaaggcucuuuucagagccaccaaaaaaaaaaaaaaaaaaaaaaaaaaaaaaaaaaaaaaaaaaaaaaaaaaaaaaaaaaaaaaaaaaaaaaaaaaaaaaaaaaaaaaaaaaaaaaaaaaaaa

SEQ ID NO: 12331 - RNA, 4094 nt, Artificial Sequence
  SARS-CoV-2/USA/UT-00033/2020__EPI_ISL_417976 spike protein mRNA gc (1-1273)
aggagagucccgcagucggcguccagcggcucugcuuguucgugugugugucguugcaggccuuauucaagcuuaccauguucguguuccugguccuccugccccuggugagcucccagugcgugaaccucaccacccgcacgcagcugccgcccgccuacaccaacagcuucacccggggcgucuacuaccccgacaagguguuccgcuccagcgugcugcacuccacccaggaccucuuccugcccuucuucagcaacgucacgugguuccacgccauccacguguccgggaccaacggcaccaagcgguucgacaacccggugcugcccuucaacgacggggucuacuucgcgagcaccgagaaguccaacaucauccgcggcuggaucuucgggacgacccucgacagcaagacccagucccugcugaucgugaacaacgccaccaacguggucaucaaggugugcgaguuccaguucugcaacgaccccuuccucggcguguacuaccacaagaacaacaagagcuggauggaguccgaguuccgggucuacagcuccgccaacaacugcacguucgaguacgugagccagcccuuccugauggaccuggagggcaagcaggggaacuucaagaaccuccgcgaguucguguucaagaacaucgacggcuacuucaagaucuacuccaagcacaccccgaucaaccugguccgggaccugccccagggguucagcgcccucgagccccugguggaccugcccaucggcaucaacaucacccgcuuccagacccuccuggcccugcaccgguccuaccucacgccgggggacagcagcuccggccugaccgcgggcgccgccgccuacuacgugggguaccugcagccccgcaccuuccuccugaaguacaacgagaacggcaccaucacggacgcggucgacugcgcccuggacccccucagcgagaccaagugcacccugaaguccuucaccguggagaaggggaucuaccagacgagcaacuuccgggugcagcccaccgaguccaucguccgcuucccgaacaucaccaaccugugccccuucggcgagguguucaacgccacccgguucgccagcgucuacgccuggaaccgcaagcggaucuccaacugcguggcggacuacagcgugcucuacaacuccgccagcuucuccacguucaagugcuacggcgucagccccaccaagcugaacgaccugugcuucaccaacguguacgccgacuccuucgugauccgcggggacgagguccggcagaucgcccccggccagaccgggaagaucgccgacuacaacuacaagcucccggacgacuucacgggcugcgugaucgcguggaacagcaacaaccuggacuccaaggucgggggcaacuacaacuaccuguaccgccucuuccgcaagagcaaccugaagcccuucgagcgggacaucuccaccgagaucuaccaggccggcagcacccccugcaacgggguggagggcuucaacugcuacuucccccugcaguccuacggguuccagccgaccaacggcgugggguaccagcccuaccggguggucgugcucagcuucgagcugcugcacgcccccgccacggugugcggccccaagaaguccaccaaccucgucaagaacaagugcgugaacuucaacuucaacggccugaccgggaccggcgugcugaccgagagcaacaagaaguuccugccguuccagcaguucgggcgcgacaucgccgacacgaccgacgcgguccgcgacccccagacccucgagauccuggacaucacccccugcagcuucggcgggguguccgugaucacgccgggcaccaacaccagcaaccaggucgccgugcuguaccagggcgugaacugcaccgagguccccguggccauccacgccgaccagcucacgcccaccuggcggguguacuccaccgggagcaacgucuuccagacccgcgccggcugccugaucggggcggagcacgugaacaacuccuacgagugcgacauccccaucggcgccggcaucugcgccagcuaccagacgcagaccaacuccccgcggcgcgcccggagcguggcgucccagagcaucaucgccuacaccaugucccugggggccgagaacagcgucgccuacuccaacaacagcaucgccauccccaccaacuucacgaucuccgugaccaccgagauccuccccgugagcaugaccaagacgagcgucgacugcaccauguacaucugcggcgacuccaccgagugcagcaaccugcugcuccaguacggguccuucugcacccagcugaaccgcgcgcugacgggcaucgccguggagcaggacaagaacacccaggagguguucgcccaggucaagcagaucuacaagacgcccccgaucaaggacuucgggggcuucaacuucagccagauccuccccgaccccuccaagcccagcaagcgguccuucaucgaggaccugcuguucaacaaggugacccucgccgacgccggcuucaucaagcaguacggggacugccugggcgacaucgcggcccgcgaccugaucugcgcccagaaguucaacgggcucaccgugcugccgccccugcucaccgacgagaugaucgcccaguacaccagcgcccugcuggcgggcaccaucacguccggguggaccuucggcgccggcgccgcccuccagauccccuucgcgaugcagauggccuaccgguucaacgggaucggcgucacccagaacgugcuguacgagaaccagaagcugaucgccaaccaguucaacagcgccaucgggaagauccaggacucccucagcuccaccgccagcgcgcugggcaagcugcaggacguggucaaccagaacgcccaggcccucaacacgcuggugaagcagcuguccagcaacuucggggccaucuccagcgugcucaacgacauccugucccgccuggacaaggucgaggccgaggugcagaucgaccggcucaucaccggccgccugcagagccugcagaccuacgugacccagcagcucauccgggcggccgagauccgcgccagcgccaaccuggccgcgaccaagauguccgagugcguccugggccagagcaagcggguggacuucugcgggaagggcuaccaccucauguccuucccccagagcgccccgcacgggguggucuuccugcacgugacguacguccccgcccaggagaagaacuucaccaccgcccccgcgaucugccacgacggcaaggcccacuucccccgcgaggggguguucguguccaacggcacccacugguucgucacgcagcggaacuucuacgagccgcagaucaucaccaccgacaacaccuucgugagcggcaacugcgacguggucaucgggaucgugaacaacacgguguacgacccccugcagcccgagcucgacuccuucaaggaggagcuggacaaguacuucaagaaccacaccagccccgacgucgaccugggcgacaucuccgggaucaacgccagcguggugaacauccagaaggagaucgaccgccucaacgaggucgccaagaaccugaacgagucccugaucgaccuccaggagcugggcaaguacgagcaguacaucaaguggccgugguacaucuggcugggcuucaucgccgggcucaucgcgaucgugauggugaccaucaugcugugcugcaugaccagcugcugcuccugccugaagggcugcugcagcugcggguccugcugcaaguucgacgaggacgacagcgagcccguccucaagggcgugaagcugcacuacacgugaggacuagucccuguucccagagcccacuuuuuuuucuuuuuuugaaauaaaauagccugucuuucagaucucaaaggcucuuuucagagccaccaaaaaaaaaaaaaaaaaaaaaaaaaaaaaaaaaaaaaaaaaaaaaaaaaaaaaaaaaaaaaaaaaaaaaaaaaaaaaaaaaaaaaaaaaaaaaaaaaaaaa

SEQ ID NO: 12332 - RNA, 4094 nt, Artificial Sequence
  SARS-CoV-2/USA/WI-13/2020__EPI_ISL_417516 spike protein mRNA gc (1-1273)
aggagagucccgcagucggcguccagcggcucugcuuguucgugugugugucguugcaggccuuauucaagcuuaccauguucguguuccugguccuccugccccuggugagcucccagugcgugaaccucaccacccgcacgcagcugccgcccgccuacaccaacagcuucacccggggcgucuacuaccccgacaagguguuccgcuccagcgugcugcacuccacccaggaccucuuccugcccuucuucagcaacgucacgugguuccacgccauccacguguccgggaccaacggcaccaagcgguucgacaacccggugcugcccuucaacgacggggucuacuucgcgagcaccgagaaguccaacaucauccgcggcuggaucuucgggacgacccucgacagcaagacccagucccugcugaucgugaacaacgccaccaacguggucaucaaggugugcgaguuccaguucugcaacgaccccuuccucggcguguacuaccacaagaacaacaagagcuggauggaguccgaguuccgggucuacagcuccgccaacaacugcacguucgaguacgugagccagcccuuccugauggaccuggagggcaagcaggggaacuucaagaaccuccgcgaguucguguucaagaacaucgacggcuacuucaagaucuacuccaagcacaccccgaucaaccugguccgggaccugccccagggguucagcgcccucgagccccugguggaccugcccaucggcaucaacaucacccgcuuccagacccuccuggcccugcaccgguccuaccucacgccgggggacagcagcuccggcuggaccgcgggcgccgccgccuacuacgugggguaccugcagccccgcaccuuccugcucaaguacaacgagaacggcaccaucacggacgcggucgacugcgcccuggacccccugagcgagaccaagugcacccucaaguccuucaccguggagaaggggaucuaccagacgagcaacuuccgggugcugcccaccgaguccaucguccgcuucccgaacaucaccaaccugugccccuucggcgagguguucaacgccacccgguucgccagcgucuacgccuggaaccgcaagcggaucuccaacugcguggcggacuacagcgugcucuacaacuccgccagcuucuccacguucaagugcuacggcgucagccccaccaagcugaacgaccugugcuucaccaacguguacgccgacuccuucgugauccgcggggacgagguccggcagaucgcccccggccagaccgggaagaucgccgacuacaacuacaagcucccggacgacuucacgggcugcgugaucgcguggaacagcaacaaccuggacuccaaggucgggggcaacuacaacuaccuguaccgccucuuccgcaagagcaaccugaagcccuucgagcgggacaucuccaccgagaucuaccaggccggcagcacccccugcaacgggguggagggcuucaacugcuacuucccccugcaguccuacggguuccagccgaccaacggcgugggguaccagcccuaccggguggucgugcucagcuucgagcugcugcacgcccccgccacggugugcggccccaagaaguccaccaaccucgucaagaacaagugcgugaacuucaacuucaacggccugaccgggaccggcgugcugaccgagagcaacaagaaguuccugccguuccagcaguucgggcgcgacaucgccgacacgaccgacgcgguccgcgacccccagacccucgagauccuggacaucacccccugcagcuucggcgggguguccgugaucacgccgggcaccaacaccagcaaccaggucgccgugcuguaccagggcgugaacugcaccgagguccccguggccauccacgccgaccagcucacgcccaccuggcggguguacuccaccgggagcaacgucuuccagacccgcgccggcugccugaucggggcggagcacgugaacaacuccuacgagugcgacauccccaucggcgccggcaucugcgccagcuaccagacgcagaccaacuccccgcggcgcgcccggagcguggcgucccagagcaucaucgccuacaccaugucccugggggccgagaacagcgucgccuacuccaacaacagcaucgccauccccaccaacuucacgaucuccgugaccaccgagauccuccccgugagcaugaccaagacgagcgucgacugcaccauguacaucugcggcgacuccaccgagugcagcaaccugcugcuccaguacggguccuucugcacccagcugaaccgcgcgcugacgggcaucgccguggagcaggacaagaacacccaggagguguucgcccaggucaagcagaucuacaagacgcccccgaucaaggacuucgggggcuucaacuucagccagauccuccccgaccccuccaagcccagcaagcgguccuucaucgaggaccugcuguucaacaaggugacccucgccgacgccggcuucaucaagcaguacggggacugccugggcgacaucgcggcccgcgaccugaucugcgcccagaaguucaacgggcucaccgugcugccgccccugcucaccgacgagaugaucgcccaguacaccagcgcccugcuggcgggcaccaucacguccggguggaccuucggcgccggcgccgcccuccagauccccuucgcgaugcagauggccuaccgguucaacgggaucggcgucacccagaacgugcuguacgagaaccagaagcugaucgccaaccaguucaacagcgccaucgggaagauccaggacucccucagcuccaccgccagcgcgcugggcaagcugcaggacguggucaaccagaacgcccaggcccucaacacgcuggugaagcagcuguccagcaacuucggggccaucuccagcgugcucaacgacauccugucccgccuggacaaggucgaggccgaggugcagaucgaccggcucaucaccggccgccugcagagccugcagaccuacgugacccagcagcucauccgggcggccgagauccgcgccagcgccaaccuggccgcgaccaagauguccgagugcguccugggccagagcaagcggguggacuucugcgggaagggcuaccaccucauguccuucccccagagcgccccgcacgggguggucuuccugcacgugacguacguccccgcccaggagaagaacuucaccaccgcccccgcgaucugccacgacggcaaggcccacuucccccgcgaggggguguucguguccaacggcacccacugguucgucacgcagcggaacuucuacgagccgcagaucaucaccaccgacaacaccuucgugagcggcaacugcgacguggucaucgggaucgugaacaacacgguguacgacccccugcagcccgagcucgacuccuucaaggaggagcuggacaaguacuucaagaaccacaccagccccgacgucgaccugggcgacaucuccgggaucaacgccagcguggugaacauccagaaggagaucgaccgccucaacgaggucgccaagaaccugaacgagucccugaucgaccuccaggagcugggcaaguacgagcaguacaucaaguggccgugguacaucuggcugggcuucaucgccgggcucaucgcgaucgugauggugaccaucaugcugugcugcaugaccagcugcugcuccugccugaagggcugcugcagcugcggguccugcugcaaguucgacgaggacgacagcgagcccguccucaagggcgugaagcugcacuacacgugaggacuagucccuguucccagagcccacuuuuuuuucuuuuuuugaaauaaaauagccugucuuucagaucucaaaggcucuuuucagagccaccaaaaaaaaaaaaaaaaaaaaaaaaaaaaaaaaaaaaaaaaaaaaaaaaaaaaaaaaaaaaaaaaaaaaaaaaaaaaaaaaaaaaaaaaaaaaaaaaaaaaa

SEQ ID NO: 12333 - RNA, 4091 nt, Artificial Sequence
  SARS-CoV-2/India/1-27/2020__EPI_ISL_413522 spike protein mRNA gc (1-1272)
aggagagucccgcagucggcguccagcggcucugcuuguucgugugugugucguugcaggccuuauucaagcuuaccauguucguguuccugguccuccugccccuggugagcucccagugcgugaaccucaccacccgcacgcagcugccgcccgccuacaccaacagcuucacccggggcgucuacuaccccgacaagguguuccgcuccagcgugcugcacuccacccaggaccucuuccugcccuucuucagcaacgucacgugguuccacgccauccacguguccgggaccaacggcaccaagcgguucgacaacccggugcugcccuucaacgacggggucuacuucgcgagcaccgagaaguccaacaucauccgcggcuggaucuucgggacgacccucgacagcaagacccagucccugcugaucgugaacaacgccaccaacguggucaucaaggugugcgaguuccaguucugcaacgaccccuuccucggcguguaccacaagaacaacaagagcuggauggaguccgaguuccgggucuacagcuccgccaacaacugcacguucgaguacgugagccagcccuuccugauggaccuggagggcaagcaggggaacuucaagaaccuccgcgaguucguguucaagaacaucgacggcuacuucaagaucuacuccaagcacaccccgaucaaccugguccgggaccugccccagggguucagcgcccucgagccccugguggaccugcccaucggcaucaacaucacccgcuuccagacccuccuggcccugcaccgguccuaccucacgccgggggacagcagcuccggcuggaccgcgggcgccgccgccuacuacgugggguaccugcagccccgcaccuuccugcucaaguacaacgagaacggcaccaucacggacgcggucgacugcgcccuggacccccugagcgagaccaagugcacccucaaguccuucaccguggagaaggggaucuaccagacgagcaacuuccgggugcagcccaccgaguccaucguccgcuucccgaacaucaccaaccugugccccuucggcgagguguucaacgccacccgguucgccagcgucuacgccuggaaccgcaagcggaucuccaacugcguggcggacuacagcgugcuguacaacuccgccagcuucuccacguucaagugcuacggcgucagccccaccaagcucaacgaccugugcuucaccaacguguacgccgacuccuucgugauccgcggggacgaggucauccagaucgcccccggccagaccgggaagaucgccgacuacaacuacaagcugccggacgacuucacgggcugcgugaucgcguggaacagcaacaaccucgacuccaaggucgggggcaacuacaacuaccuguaccggcuguuccgcaagagcaaccucaagcccuucgagcgggacaucuccaccgagaucuaccaggccggcagcacccccugcaacgggguggagggcuucaacugcuacuucccccugcaguccuacggguuccagccgaccaacggcgugggguaccagcccuaccgcguggucgugcugagcuucgagcuccugcacgcccccgccacggugugcggccccaagaaguccaccaaccuggucaagaacaagugcgugaacuucaacuucaacggccucaccgggaccggcgugcugaccgagagcaacaagaaguuccugccguuccagcaguucgggcgggacaucgccgacacgaccgacgcgguccgcgacccccagacccuggagauccucgacaucacccccugcagcuucggcgggguguccgugaucacgccgggcaccaacaccagcaaccaggucgccgugcuguaccaggacgugaacugcaccgagguccccguggccauccacgccgaccagcugacgcccaccuggcgcguguacuccaccggcagcaacgucuuccagacccgggccgggugccucaucggcgcggagcacgugaacaacuccuacgagugcgacauccccaucggggccggcaucugcgccagcuaccagacgcagaccaacuccccgcgccgggcccgcagcguggcgucccagagcaucaucgccuacaccaugucccugggcgccgagaacagcgucgccuacuccaacaacagcaucgccauccccaccaacuucacgaucuccgugaccaccgagauccugcccgugagcaugaccaagacgagcgucgacugcaccauguacaucugcggggacuccaccgagugcagcaaccuccugcugcaguacggcuccuucugcacccagcucaaccgggcgcugacggggaucgccguggagcaggacaagaacacccaggagguguucgcccaggucaagcagaucuacaagacgcccccgaucaaggacuucggcggguucaacuucagccagauccugcccgaccccuccaagcccagcaagcgcuccuucaucgaggaccuccuguucaacaaggugacccuggccgacgccggcuucaucaagcaguacggcgacugccucggggacaucgcggcccgggaccugaucugcgcccagaaguucaacggccugaccgugcucccgccccugcugaccgacgagaugaucgcccaguacaccagcgcccuccuggcggggaccaucacguccggcuggaccuucggggccggcgccgcccugcagauccccuucgcgaugcagauggccuaccgcuucaacggcaucggggucacccagaacgugcucuacgagaaccagaagcugaucgccaaccaguucaacagcgccaucggcaagauccaggacucccugagcuccaccgccagcgcgcucgggaagcugcaggacguggucaaccagaacgcccaggcccugaacacgcucgugaagcagcuguccagcaacuucggcgccaucuccagcgugcugaacgacauccucucccggcuggacaaggucgaggccgaggugcagaucgaccgccugaucaccgggcggcuccagagccugcagaccuacgugacccagcagcugauccgcgcggccgagauccgggccagcgccaaccucgccgcgaccaagauguccgagugcguccugggccagagcaagcgcguggacuucugcggcaagggguaccaccugauguccuucccccagagcgccccgcacggcguggucuuccuccacgugacguacguccccgcccaggagaagaacuucaccaccgcccccgcgaucugccacgacgggaaggcccacuucccccgggagggcguguucguguccaacgggacccacugguucgucacgcagcgcaacuucuacgagccgcagaucaucaccaccgacaacaccuucgugagcggcaacugcgacguggucaucggcaucgugaacaacacgguguacgacccccugcagcccgagcuggacuccuucaaggaggagcucgacaaguacuucaagaaccacaccagccccgacgucgaccugggggacaucuccggcaucaacgccagcguggugaacauccagaaggagaucgaccggcugaacgaggucgccaagaaccucaacgagucccugaucgaccugcaggagcucgggaaguacgagcaguacaucaaguggccgugguacaucuggcugggcuucaucgccggccugaucgcgaucgugauggugaccaucaugcucugcugcaugaccagcugcugcuccugccugaaggggugcugcagcugcggcuccugcugcaaguucgacgaggacgacagcgagcccguccugaagggggugaagcuccacuacacgugaggacuagucccuguucccagagcccacuuuuuuuucuuuuuuugaaauaaaauagccugucuuucagaucucaaaggcucuuuucagagccaccaaaaaaaaaaaaaaaaaaaaaaaaaaaaaaaaaaaaaaaaaaaaaaaaaaaaaaaaaaaaaaaaaaaaaaaaaaaaaaaaaaaaaaaaaaaaaaaaaaaaa

SEQ ID NO: 12334 - RNA, 4076 nt, Artificial Sequence
  SARS-CoV-2/pangolin/Guangxi/P4L/2017__EPI_ISL_410538 spike protein mRNA gc (1-1267)
aggagagucccgcagucggcguccagcggcucugcuuguucgugugugugucguugcaggccuuauucaagcuuaccauguucguguuccuguucguccucccccuggugagcucccagugcgugaaccugaccacccgcacgggcaucccgcccggguacaccaacagcuccacccggggcgucuacuaccccgacaagguguuccgcagcuccauccuccaccugacccaggaccuguuccuccccuucuucagcaacgugacgugguucaacaccaucaacuaccagggcggguucaagaaguucgacaacccgguccugcccuucaacgacgggguguacuucgccuccaccgagaaguccaacaucauccggggcuggaucuucggcaccacgcuggacgcccgcacccagagccuccugaucgugaacaacgcgaccaacgucgugaucaaggugugcgaguuccaguucugcaccgaccccuuccugggggucuacuaccacaacaacaacaagacguggguggagaacgaguuccggguguacagcuccgccaacaacugcaccuucgaguacaucagccagcccuuccucauggaccuggagggcaagcaggggaacuucaagaaccugcgcgaguucgucuucaagaacguggacggcuacuucaagaucuacuccaagcacaccccgaucgaccucgugcgggaccugccccgcggguucgccgcccuggagccccucgucgaccugcccaucggcaucaacaucacccgguuccagacgcugcucgcccugcaccgcagcuaccugaccccgggcaaccucgaguccggguggaccaccggcgcggccgccuacuacgugggguaccugcagcagcggacguuccugcucagcuacaaccagaacggcaccaucaccgacgccguggacugcucccuggacccccugagcgagaccaagugcacgcucaagucccugaccgucgagaagggcaucuaccagaccagcaacuuccgcgugcagcccaccaucagcaucgugcgguuccccaacaucacgaaccugugcccguucggggaggucuucaacgcguccaaguucgccagcguguacgccuggaaccgcaagcggaucuccaacugcgucgccgacuacagcgugcucuacaacuccaccagcuucuccaccuucaagugcuacggcgugagccccaccaagcugaacgaccugugcuucacgaacgucuacgccgacuccuucguggugaagggggacgagguccgccagaucgcgcccggccagaccggggugaucgccgacuacaacuacaagcuccccgacgacuucaccggcugcgugaucgccuggaacagcgucaagcaggacgcccugaccggcgggaacuacggcuaccuguaccgccucuuccggaaguccaagcugaagccguucgagcgggacaucagcacggagaucuaccaggccggguccacccccugcaacggccagguggggcugaacugcuacuacccccucgagcgcuacggcuuccaccccaccaccggcgugaacuaccagccguuccgggucguggugcugagcuucgagcugcucaacgggcccgcgaccgucugcggccccaagcuguccacgacccuggugaaggacaagugcgugaacuucaacuucaacgggcugaccggcaccgggguccucacgaccagcaagaagcaguuccugcccuuccagcaguucggccgcgacaucuccgacaccaccgacgccgugcgcgacccgcagacgcuggagauccucgacaucacccccugcagcuucggcgggguguccgucaucacccccggcaccaacacgagcaaccagguggccgugcuguaccaggacgucaacugcaccgaggugccgauggccauccacgccgagcagcugacccccgcguggcggguguacagcgccggggccaacgucuuccagacccgcgccggcugccucgugggcgccgagcacgugaacaacuccuacgagugcgacauccccgucggggcgggcaucugcgccagcuaccacuccaugagcucccugcggagcgugaaccagcgcuccaucaucgccuacacgaugagccugggggccgagaacuccguggcguacagcaacaacuccaucgccauccccaccaacuucaccaucagcgucaccacggagauccucccgguguccaugaccaagaccagcguggacugcaccauguacaucugcggcgacuccaucgagugcagcaaccugcugcuccaguacggguccuucugcacgcagcugaaccgggcccugaccggcaucgccgucgagcaggacaagaacacccaggagguguucgcccaggugaagcagaucuacaagaccccgcccaucaaggacuucggcggguucaacuucagccagauccuccccgaccccagcaagcccuccaagcgcagcuucaucgaggaccugcuguucaacaaggucacgcucgcggacgccggcuucaucaagcaguacggggacugccugggcgacaucgccgcccgggaccugaucugcgcccagaaguucaacgggcucaccgugcugccgccccugcucaccgacgagaugaucgcgcaguacaccuccgcccugcuggccggcacgaucaccagcggcuggaccuucggggccggcgccgcgcuccagauccccuucgccaugcagauggccuaccgcuucaacgggaucggcgugacccagaacguccuguacgagaaccagaagcugaucgccaaccaguucaacuccgcgaucgggaagauccaggacagccucuccagcacggccuccgcccugggcaagcugcaggacguggugaaccagaacgcccaggcccucaacacccuggucaagcagcugagcuccaacuucggcgcgaucagcuccgugcucaacgacauccugagccggcuggacaagguggaggccgagguccagaucgaccgccucaucaccgggcggcugcagucccugcagaccuacgugacccagcagcucauccgcgccgccgagauccgggccagcgcgaaccuggccgccacgaagauguccgagugcgugcugggccagagcaagcgcgucgacuucugcgggaagggcuaccaccucauguccuucccccagagcgcgccccacgggguggucuuccugcacgugaccuacgugcccgcccaggagaagaacuucaccaccgccccggccaucugccacgagggcaaggcccacuucccccgggagggcgucuucgugagcaacgggacgcacugguucaucacccagcgcaacuucuacgagccccagaucaucaccaccgacaacacguucguguccggcagcugcgacgucgugaucgggaucgugaacaacaccgucuacgacccccugcagccggagcucgacuccuucaaggaggagcuggacaaguacuucaagaaccacaccagccccgacguggaccugggcgacaucuccggcaucaacgccagcguggucaacauccagaaggagaucgaccggcucaacgagguggcgaagaaccugaacgagucccccaucgaccugcaggagcucgggaaguacgagcaguacaucaaguggcccugguacaucuggcugggcuucaucgccgggcugaucgccaucaucauggugaccaucaugcucugcugcaugacgagcugcugcuccugccugaagggcugcugcagcugcggguccugcugcaaguucgacgaggacgacagcgagccgguccugaagggcgugaagcuccacuacaccugaggacuagucccuguucccagagcccacuuuuuuuucuuuuuuugaaauaaaauagccugucuuucagaucucaaaggcucuuuucagagccaccaaaaaaaaaaaaaaaaaaaaaaaaaaaaaaaaaaaaaaaaaaaaaaaaaaaaaaaaaaaaaaaaaaaaaaaaaaaaaaaaaaaaaaaaaaaaaaaaaaaaa

SEQ ID NO: 12335 - RNA, 4076 nt, Artificial Sequence
  SARS-CoV-2/pangolin/Guangxi/P5L/2017__EPI_ISL_410540 spike protein mRNA gc (1-1267)
aggagagucccgcagucggcguccagcggcucugcuuguucgugugugugucguugcaggccuuauucaagcuuaccauguucguguuccuguucguccucccccuggugagcucccagugcgugaaccugaccacccgcacgggcaucccgcccggguacaccaacagcuccacccggggcgucuacuaccccgacaagguguuccgcagcuccauccuccaccugacccaggaccuguuccuccccuucuucagcaacgugacgugguucaacaccaucaacuaccagggcggguucaagaaguucgacaacccgguccugcccuucaacgacgggguguacuucgccuccaccgagaaguccaacaucauccggggcuggaucuucggcaccacgcuggacgcccgcacccagagccuccugaucgugaacaacgcgaccaacgucgugaucaaggugugcgaguuccaguucugcaccgaccccuuccugggggucuacuaccacaacaacaacaagacguggguggagaacgaguuccggguguacagcuccgccaacaacugcaccuucgaguacaucagccagcccuuccucauggaccuggagggcaagcaggggaacuucaagaaccugcgcgaguucgucuucaagaacguggacggcuacuucaagaucuacuccaagcacaccccgaucgaccucgugcgggaccugccccgcggguucgccgcccuggagccccucgucgaccugcccaucggcaucaacaucacccgguuccagacgcugcucgcccugcaccgcagcuaccugaccccgggcaagcucgaguccggguggaccaccggcgcggccgccuacuacgugggguaccugcagcagcggacguuccugcucagcuacaaccagaacggcaccaucaccgacgccguggacugcucccuggacccccugagcgagaccaagugcacgcucaagucccugaccgucgagaagggcaucuaccagaccagcaacuuccgcgugcagcccaccaucagcaucgugcgguuccccaacaucacgaaccugugcccguucggggaggucuucaacgcguccaaguucgccagcguguacgccuggaaccgcaagcggaucuccaacugcgucgccgacuacagcgugcucuacaacuccaccagcuucuccaccuucaagugcuacggcgugagccccaccaagcugaacgaccugugcuucacgaacgucuacgccgacuccuucguggugaagggggacgagguccgccagaucgcgcccggccagaccggggugaucgccgacuacaacuacaagcuccccgacgacuucaccggcugcgugaucgccuggaacagcgucaagcaggacgcccugaccggcgggaacuacggcuaccuguaccgccucuuccggaaguccaagcugaagccguucgagcgggacaucagcacggagaucuaccaggccggguccacccccugcaacggccagguggggcugaacugcuacuacccccucgagcgcuacggcuuccaccccaccaccggcgugaacuaccagccguuccgggucguggugcugagcuucgagcugcucaacgggcccgcgaccgucugcggccccaagcuguccacgacccuggugaaggacaagugcgugaacuucaacuucaacgggcugaccggcaccgggguccucacgaccagcaagaagcaguuccugcccuuccagcaguucggccgcgacaucuccgacaccaccgacgccgugcgcgacccgcagacgcuggagauccucgacaucacccccugcagcuucggcgggguguccgucaucacccccggcaccaacacgagcaaccagguggccgugcuguaccaggacgucaacugcaccgaggugccgauggccauccacgccgagcagcugacccccgcguggcggguguacagcgccggggccaacgucuuccagacccgcgccggcugccucgugggcgccgagcacgugaacaacuccuacgagugcgacauccccgucggggcgggcaucugcgccagcuaccacuccaugagcuccuuccggagcgugaaccagcgcuccaucaucgccuacacgaugagccugggggccgagaacuccguggcguacagcaacaacuccaucgccauccccaccaacuucaccaucagcgucaccacggagauccugccgguguccaugaccaagaccagcguggacugcaccauguacaucugcggcgacuccaucgagugcagcaaccuccugcugcaguacggguccuucugcacgcagcucaaccgggcccugaccggcaucgccgucgagcaggacaagaacacccaggagguguucgcccaggugaagcagaucuacaagaccccgcccaucaaggacuucggcggguucaacuucagccagauccugcccgaccccagcaagcccuccaagcgcagcuucaucgaggaccuccuguucaacaaggucacgcuggcggacgccggcuucaucaagcaguacggggacugccucggcgacaucgccgcccgggaccugaucugcgcccagaaguucaacgggcugaccgugcucccgccccugcugaccgacgagaugaucgcgcaguacaccuccgcccuccuggccggcacgaucaccagcggcuggaccuucggggccggcgccgcgcugcagauccccuucgccaugcagauggccuaccgcuucaacgggaucggcgugacccagaacguccucuacgagaaccagaagcugaucgccaaccaguucaacuccgcgaucgggaagauccaggacagccuguccagcacggccuccgcccucggcaagcugcaggacguggugaaccagaacgcccaggcccugaacacccucgucaagcagcugagcuccaacuucggcgcgaucagcuccgugcugaacgacauccucagccggcuggacaagguggaggccgagguccagaucgaccgccugaucaccgggcggcuccagucccugcagaccuacgugacccagcagcugauccgcgccgccgagauccgggccagcgcgaaccucgccgccacgaagauguccgagugcgugcugggccagagcaagcgcgucgacuucugcgggaagggcuaccaccugauguccuucccccagagcgcgccccacgggguggucuuccuccacgugaccuacgugcccgcccaggagaagaacuucaccaccgccccggccaucugccacgagggcaaggcccacuucccccgggagggcgucuucgugagcaacgggacgcacugguucaucacccagcgcaacuucuacgagccccagaucaucaccaccgacaacacguucguguccggcagcugcgacgucgugaucgggaucgugaacaacaccgucuacgacccccugcagccggagcuggacuccuucaaggaggagcucgacaaguacuucaagaaccacaccagccccgacguggaccugggcgacaucuccggcaucaacgccagcguggucaacauccagaaggagaucgaccggcugaacgagguggcgaagaaccucaacgagucccugaucgaccugcaggagcucgggaaguacgagcaguacaucaaguggcccugguacaucuggcugggcuucaucgccgggcugaucgccaucaucauggugaccaucaugcucugcugcaugacgagcugcugcuccugccugaagggcugcugcagcugcggguccugcugcaaguucgacgaggacgacagcgagcccguccugaagggcgugaagcuccacuacaccugaggacuagucccuguucccagagcccacuuuuuuuucuuuuuuugaaauaaaauagccugucuuucagaucucaaaggcucuuuucagagccaccaaaaaaaaaaaaaaaaaaaaaaaaaaaaaaaaaaaaaaaaaaaaaaaaaaaaaaaaaaaaaaaaaaaaaaaaaaaaaaaaaaaaaaaaaaaaaaaaaaaaa

SEQ ID NO: 12336 - RNA, 4076 nt, Artificial Sequence
  SARS-CoV-2/pangolin/Guangxi/P5E/2017__EPI_ISL_410541 spike protein mRNA gc (1-1267)
aggagagucccgcagucggcguccagcggcucugcuuguucgugugugugucguugcaggccuuauucaagcuuaccauguucguguuccuguucguccucccccuggugagcucccagugcgugaaccugaccacccgcacgggcaucccgcccggguacaccaacagcuccacccggggcgucuacuaccccgacaagguguuccgcagcuccauccuccaccugacccaggaccuguuccuccccuucuucagcaacgugacgugguucaacaccaucaccuaccagggcggguccaagaaguucgacaacccgguccugcccuucaacgacgggguguacuucgccagcaccgagaaguccaacaucauccggggcuggaucuucggcacgacccuggacgcccgcacccagagccuccugaucgugaacaacgcgaccaacgucgugaucaaggugugcgaguuccaguucugcacggaccccuuccugggggucuacuaccacaacaacaacaagaccuggguggagaacgaguuccggguguacuccagcgccaacaacugcaccuucgaguacaucucccagcccuuccucauggaccuggagggcaagcaggggaacuucaagaaccugcgcgaguucgucuucaagaacguggacggcuacuucaagaucuacagcaagcacaccccgaucgaccucgugcgggaccugccccgcggguucgccgcccuggagccccucgucgaccugcccaucggcaucaacaucacgcgguuccagacccugcucgcccugcaccgcuccuaccugaccccgggcaagcucgagagcggguggaccacgggcgcggccgccuacuacgugggguaccugcagcagcggaccuuccugcucuccuacaaccagaacggcaccaucaccgacgccguggacugcagccuggacccccuguccgagacgaagugcacccucaagagccugaccgucgagaagggcaucuaccagaccagcaacuuccgcgugcagcccacgaucuccaucgugcgguuccccaacaucaccaaccugugcccguucggggaggucuucaacgcgagcaaguucgccuccguguacgccuggaaccgcaagcggaucagcaacugcgucgccgacuacuccgugcucuacaacagcaccuccuucagcaccuucaagugcuacggcgugucccccacgaagcugaacgaccugugcuucaccaacgucuacgccgacagcuucguggugaagggggacgagguccgccagaucgcgcccggccagaccggggugaucgccgacuacaacuacaagcuccccgacgacuucaccggcugcgugaucgccuggaacuccgucaagcaggacgcccugacgggcgacaacuacggguaccuguaccggcuguuccgcaagagcaagcucaagccguucgagcgggacaucuccaccgagaucuaccaggccggcagcacccccugcaacggccagguggggcugaacugcuacuacccccucgagcgcuacggguuccaccccaccaccggcgugaacuaccagccguuccgggucguggugcuguccuucgagcugcucaacggccccgcgacggucugcgggcccaagcugagcaccacccuggugaaggacaagugcgugaacuucaacuucaacggccugaccgggacgggcguccucaccaccuccaagaagcaguuccugcccuuccagcaguucgggcgcgacaucagcgacaccacggacgccgugcgcgacccgcagacccuggagauccucgacaucacccccugcuccuucggcggcgugagcgucaucacccccgggacgaacaccagcaaccagguggccgugcuguaccaggacgucaacugcaccgaggugccgauggccauccacgccgagcagcugacccccgcguggcggguguacuccgccggcgccaacgucuuccagacgcgcgccgggugccucgugggcgccgagcacgugaacaacagcuacgagugcgacauccccgucggcgcggggaucugcgccuccuaccacagcauguccagcuuccgguccgugaaccagcgcagcaucaucgccuacaccaugucccugggcgccgagaacagcguggcguacuccaacaacagcaucgccauccccaccaacuucaccaucuccgucacgaccgagauccugccggugagcaugaccaagaccuccguggacugcacgauguacaucugcggggacagcaucgagugcuccaaccuccugcugcaguacggcagcuucugcacccagcucaaccgggcccugaccgggaucgccgucgagcaggacaagaacacccaggagguguucgcccaggugaagcagaucuacaagacgccgcccaucaaggacuucggcggcuucaacuucagccagauccugcccgaccccuccaagcccagcaagcgcuccuucaucgaggaccuccuguucaacaaggucacccuggcggacgccggguucaucaagcaguacggcgacugccucggggacaucgccgcccgggaccugaucugcgcccagaaguucaacggccugaccgugcucccgccccugcugaccgacgagaugaucgcgcaguacacgagcgcccuccuggccgggaccaucaccuccggcuggaccuucggcgccggggccgcgcugcagauccccuucgccaugcagauggccuaccgcuucaacggcaucggggugacgcagaacguccucuacgagaaccagaagcugaucgccaaccaguucaacagcgcgaucggcaagauccaggacucccugagcuccaccgccagcgcccucgggaagcugcaggacguggugaaccagaacgcccaggcccugaacacccucgucaagcagcuguccagcaacuucggcgcgaucuccagcgugcugaacgacauccucucccggcuggacaagguggaggccgagguccagaucgaccgccugaucaccggccggcuccagagccugcagaccuacgugacgcagcagcugauccgcgccgccgagauccgggccuccgcgaaccucgccgccaccaagaugagcgagugcgugcuggggcaguccaagcgcgucgacuucugcggcaagggguaccaccugaugagcuucccccagagcgcgccccacggcguggucuuccuccacgugaccuacgugcccgcccaggagaagaacuucaccacggccccggccaucugccacgaggggaaggcccacuucccccgggagggcgucuucguguccaacggcacccacugguucaucacccagcgcaacuucuacgagccccagaucaucaccacggacaacaccuucgugagcggguccugcgacgucgugaucggcaucgugaacaacaccgucuacgacccccugcagccggagcuggacagcuucaaggaggagcucgacaaguacuucaagaaccacaccucccccgacguggaccugggggacaucagcggcaucaacgccuccguggucaacauccagaaggagaucgaccggcugaacgagguggcgaagaaccucaacgagagccugaucgaccugcaggagcucggcaaguacgagcaguacaucaaguggcccugguacaucuggcugggguucaucgccggccugaucgccaucaucauggugacgaucaugcucugcugcaugaccuccugcugcagcugccugaaggggugcugcuccugcggcagcugcugcaaguucgacgaggacgacuccgagcccguccugaagggggugaagcuccacuacaccugaggacuagucccuguucccagagcccacuuuuuuuucuuuuuuugaaauaaaauagccugucuuucagaucucaaaggcucuuuucagagccaccaaaaaaaaaaaaaaaaaaaaaaaaaaaaaaaaaaaaaaaaaaaaaaaaaaaaaaaaaaaaaaaaaaaaaaaaaaaaaaaaaaaaaaaaaaaaaaaaaaaaa

SEQ ID NO: 12337 - RNA, 4070 nt, Artificial Sequence
  SARS-CoV-2/pangolin/Guangxi/P1E/2017__EPI_ISL_410539 spike protein mRNA gc (1-1265)
aggagagucccgcagucggcguccagcggcucugcuuguucgugugugugucguugcaggccuuauucaagcuuaccauguucguguuccuguucguccucccccuggugagcucccagugcgugaaccugaccacccgcacgggcauccagccgggguacaccaacagcuccacccggggcgucuacuaccccgacaagguguuccgcagcuccauccuccaccugacccaggaccuguuccuccccuucuucagcaacgugacgugguucaacaccaucaacuaccagggcggguucaagaaguucgacaaccccguccugccguucaacgacgggguguacuucgccuccaccgagaaguccaacaucauccggggcuggaucuucggcaccacgcuggacgcccgcacccagagccuccugaucgugaacaacgcgaccaacgucgugaucaaggugugcgaguuccaguucugcaccgaccccuuccugggggucuacuaccacaacaacaacaagacguggguggagaacgaguuccggguguacagcuccgccaacaacugcaccuucgaguacaucagccagcccuuccucauggaccuggagggcaagcaggggaacuucaagaaccugcgcgaguucgucuucaagaacguggacggcuacuucaagaucuacuccaagcacacccccaucgaccucgugcgggaccugccgcgcggguucgccgcccuggagccccucgucgaccugcccaucggcaucaacaucacccgguuccagacgcugcucgcccugcaccgcagcuaccugacccccggcaagcucgaguccggguggaccaccggcgcggccgccuacuacgugggguaccugcagcagcggacguuccugcucagcuacaaccagaacggcaccaucaccgacgccguggacugcucccuggacccgcugagcgagaccaagugcacgcucaagucccugaccgucgagaagggcaucuaccagaccagcaacuuccgcgugcagcccaccaucagcaucgugcgguuccccaacaucacgaaccugugccccuucggggaggucuucaacgcguccaaguucgccagcguguacgccuggaaccgcaagcggaucuccaacugcgucgccgacuacagcgugcucuacaacuccaccagcuucuccaccuucaagugcuacggcgugagcccgaccaagcugaacgaccugugcuucacgaacgucuacgccgacuccuucguggugaagggggacgagguccgccagaucgcgcccggccagaccggggugaucgccgacuacaacuacaagcuccccgacgacuucaccggcugcgugaucgccuggaacagcgucaagcaggacgcccugaccggcgggaacuaccuguaccgccucuuccggaaguccaagcugaagcccuucgagcgggacaucagcacggagaucuaccaggccggcuccaccccgugcaacggccagguggggcugaacugcuacuacccccucgagcgcuacggguuccaccccaccaccggcgugaacuaccagcccuuccgggucguggugcugagcuucgagcugcucaacggcccggcgaccgucugcgggcccaagcuguccacgacccuggugaaggacaagugcgugaacuucaacuucaacggccugaccgggaccggcguccucacgaccagcaagaagcaguuccugcccuuccagcaguucgggcgcgacaucuccgacaccaccgacgccgugcgcgacccccagacgcuggagauccucgacaucaccccgugcagcuucggcggcguguccgucaucacccccgggaccaacacgagcaaccagguggccgugcuguaccaggacgucaacugcaccgaggugcccauggccauccacgccgagcagcugaccccggcguggcggguguacagcgccggcgccaacgucuuccagacccgcgccgggugccucgugggcgccgagcacgugaacaacuccuacgagugcgacauccccgucggcgcggggaucugcgccagcuaccacuccaugagcucccugcggagcgugaaccagcgcuccaucaucgccuacacgaugagccugggcgccgagaacuccguggcguacagcaacaacuccaucgccauccccaccaacuucaccaucagcgucaccacggagauccuccccguguccaugaccaagaccagcguggacugcaccauguacaucugcggggacuccaucgagugcagcaaccugcugcuccaguacggcuccuucugcacgcagcugaaccgggcccugaccgggaucgccgucgagcaggacaagaacacccaggagguguucgcccaggugaagcagaucuacaagaccccgcccaucaaggacuucggcggcuucaacuucagccagauccuccccgaccccagcaagccguccaagcgcagcuucaucgaggaccugcuguucaacaaggucacgcucgcggacgccggguucaucaagcaguacggcgacugccugggggacaucgccgcccgggaccugaucugcgcccagaaguucaacggccucaccgugcugccgccccugcucaccgacgagaugaucgcgcaguacaccuccgcccugcuggccgggacgaucaccagcggcuggaccuucggcgccggggccgcgcuccagauccccuucgccaugcagauggccuaccgcuucaacggcaucggggugacccagaacguccuguacgagaaccagaagcugaucgccaaccaguucaacuccgcgaucggcaagauccaggacagccucuccagcacggccuccgcccuggggaagcugcaggacguggugaaccagaacgcccaggcccucaacacccuggucaagcagcugagcuccaacuucggcgcgaucagcuccgugcucaacgacauccugagccggcuggacaagguggaggccgagguccagaucgaccgccucaucaccggccggcugcagucccugcagaccuacgugacccagcagcucauccgcgccgccgagauccgggccagcgcgaaccuggccgccacgaagauguccgagugcgugcuggggcagagcaagcgcgucgacuucugcggcaagggguaccaccucauguccuucccccagagcgcgccccacggcguggucuuccugcacgugaccuacgugcccgcccaggagaagaacuucaccaccgcccccgccaucugccacgaggggaaggcccacuucccgcgggagggcgucuucgugagcaacggcacgcacugguucaucacccagcgcaacuucuacgagccccagaucaucaccaccgacaacacguucguguccgggagcugcgacgucgugaucggcaucgugaacaacaccgucuacgacccccugcagcccgagcucgacuccuucaaggaggagcuggacaaguacuucaagaaccacaccagcccggacguggaccugggggacaucuccggcaucaacgccagcguggucaacauccagaaggagaucgaccggcucaacgagguggcgaagaaccugaacgagucccugaucgaccuccaggagcugggcaaguacgagcaguacaucaaguggcccugguacaucuggcugggguucaucgccggccucaucgccaucaucauggugaccaucaugcugugcugcaugacgagcugcugcuccugccugaaggggugcugcagcugcggcuccugcugcaaguucgacgaggacgacagcgagcccguccucaagggggugaagcugcacuacaccugaggacuagucccuguucccagagcccacuuuuuuuucuuuuuuugaaauaaaauagccugucuuucagaucucaaaggcucuuuucagagccaccaaaaaaaaaaaaaaaaaaaaaaaaaaaaaaaaaaaaaaaaaaaaaaaaaaaaaaaaaaaaaaaaaaaaaaaaaaaaaaaaaaaaaaaaaaaaaaaaaaaaa

SEQ ID NO: 12338 - RNA, 4094 nt, Artificial Sequence; identical to SEQ ID NO: 149
  SARS-CoV-2/Wuhan/WIV05/2019__EPI_ISL_402128 spike protein mRNA gc (1-1273)(K986P_V987P) R9487, R9491, R9709, R10159, R10160

SEQ ID NO: 12339 - RNA, 4094 nt, Artificial Sequence
  SARS-CoV-2/Wuhan/WIV05/2019__EPI_ISL_402128 spike protein mRNA gc (1-1273)(K986P_V987P_T887WN_A1020W)
aggagagucccgcagucggcguccagcggcucugcuuguucgugugugugucguugcaggccuuauucaagcuuaccauguucguguuccugguccuccugccccuggugagcucccagugcgugaaccucaccacccgcacgcagcugccgcccgccuacaccaacagcuucacccggggcgucuacuaccccgacaagguguuccgcuccagcgugcugcacuccacccaggaccucuuccugcccuucuucagcaacgucacgugguuccacgccauccacguguccgggaccaacggcaccaagcgguucgacaacccggugcugcccuucaacgacggggucuacuucgcgagcaccgagaaguccaacaucauccgcggcuggaucuucgggacgacccucgacagcaagacccagucccugcugaucgugaacaacgccaccaacguggucaucaaggugugcgaguuccaguucugcaacgaccccuuccucggcguguacuaccacaagaacaacaagagcuggauggaguccgaguuccgggucuacagcuccgccaacaacugcacguucgaguacgugagccagcccuuccugauggaccuggagggcaagcaggggaacuucaagaaccuccgcgaguucguguucaagaacaucgacggcuacuucaagaucuacuccaagcacaccccgaucaaccugguccgggaccugccccagggguucagcgcccucgagccccugguggaccugcccaucggcaucaacaucacccgcuuccagacccuccuggcccugcaccgguccuaccucacgccgggggacagcagcuccggcuggaccgcgggcgccgccgccuacuacgugggguaccugcagccccgcaccuuccugcucaaguacaacgagaacggcaccaucacggacgcggucgacugcgcccuggacccccugagcgagaccaagugcacccucaaguccuucaccguggagaaggggaucuaccagacgagcaacuuccgggugcagcccaccgaguccaucguccgcuucccgaacaucaccaaccugugccccuucggcgagguguucaacgccacccgguucgccagcgucuacgccuggaaccgcaagcggaucuccaacugcguggcggacuacagcgugcuguacaacuccgccagcuucuccacguucaagugcuacggcgucagccccaccaagcucaacgaccugugcuucaccaacguguacgccgacuccuucgugauccgcggggacgagguccggcagaucgcccccggccagaccgggaagaucgccgacuacaacuacaagcugccggacgacuucacgggcugcgugaucgcguggaacagcaacaaccucgacuccaaggucgggggcaacuacaacuaccuguaccgccuguuccgcaagagcaaccucaagcccuucgagcgggacaucuccaccgagaucuaccaggccggcagcacccccugcaacgggguggagggcuucaacugcuacuucccccugcaguccuacggguuccagccgaccaacggcgugggguaccagcccuaccggguggucgugcugagcuucgagcuccugcacgcccccgccacggugugcggccccaagaaguccaccaaccuggucaagaacaagugcgugaacuucaacuucaacggccucaccgggaccggcgugcugaccgagagcaacaagaaguuccugccguuccagcaguucgggcgcgacaucgccgacacgaccgacgcgguccgcgacccccagacccuggagauccucgacaucacccccugcagcuucggcgggguguccgugaucacgccgggcaccaacaccagcaaccaggucgccgugcuguaccaggacgugaacugcaccgagguccccguggccauccacgccgaccagcugacgcccaccuggcggguguacuccaccggcagcaacgucuuccagacccgcgccgggugccucaucggcgcggagcacgugaacaacuccuacgagugcgacauccccaucggggccggcaucugcgccagcuaccagacgcagaccaacuccccgcggcgcgcccggagcguggcgucccagagcaucaucgccuacaccaugucccugggcgccgagaacagcgucgccuacuccaacaacagcaucgccauccccaccaacuucacgaucuccgugaccaccgagauccugcccgugagcaugaccaagacgagcgucgacugcaccauguacaucugcggggacuccaccgagugcagcaaccuccugcugcaguacggcuccuucugcacccagcucaaccgcgcgcugacggggaucgccguggagcaggacaagaacacccaggagguguucgcccaggucaagcagaucuacaagacgcccccgaucaaggacuucggcggguucaacuucagccagauccugcccgaccccuccaagcccagcaagcgguccuucaucgaggaccuccuguucaacaaggugacccuggccgacgccggcuucaucaagcaguacggcgacugccucggggacaucgcggcccgcgaccugaucugcgcccagaaguucaacggccugaccgugcucccgccccugcugaccgacgagaugaucgcccaguacaccagcgcccuccuggcggggaccaucacguccggcuggugguucggggccggcgccgcccugcagauccccuucgcgaugcagauggccuaccgguucaacggcaucggggucacccagaacgugcucuacgagaaccagaagcugaucgccaaccaguucaacagcgccaucggcaagauccaggacucccugagcuccaccgccagcgcgcucgggaagcugcaggacguggucaaccagaacgcccaggcccugaacacgcucgugaagcagcuguccagcaacuucggcgccaucuccagcgugcugaacgacauccucucccgccuggacccgcccgaggccgaggugcagaucgaccggcugaucaccgggcgccuccagagccugcagaccuacgugacccagcagcugauccgggcggccgagauccgcuggagcgccaaccucgccgcgaccaagauguccgagugcguccugggccagagcaagcggguggacuucugcggcaagggguaccaccugauguccuucccccagagcgccccgcacggcguggucuuccuccacgugacguacguccccgcccaggagaagaacuucaccaccgcccccgcgaucugccacgacgggaaggcccacuucccccgcgagggcguguucguguccaacgggacccacugguucgucacgcagcggaacuucuacgagccgcagaucaucaccaccgacaacaccuucgugagcggcaacugcgacguggucaucggcaucgugaacaacacgguguacgacccccugcagcccgagcuggacuccuucaaggaggagcucgacaaguacuucaagaaccacaccagccccgacgucgaccugggggacaucuccggcaucaacgccagcguggugaacauccagaaggagaucgaccgccugaacgaggucgccaagaaccucaacgagucccugaucgaccugcaggagcucgggaaguacgagcaguacaucaaguggccgugguacaucuggcugggcuucaucgccggccugaucgcgaucgugauggugaccaucaugcucugcugcaugaccagcugcugcuccugccugaaggggugcugcagcugcggcuccugcugcaaguucgacgaggacgacagcgagcccguccugaagggggugaagcuccacuacacgugaggacuagucccuguucccagagcccacuuuuuuuucuuuuuuugaaauaaaauagccugucuuucagaucucaaaggcucuuuucagagccaccaaaaaaaaaaaaaaaaaaaaaaaaaaaaaaaaaaaaaaaaaaaaaaaaaaaaaaaaaaaaaaaaaaaaaaaaaaaaaaaaaaaaaaaaaaaaaaaaaaaaa

SEQ ID NO: 12340 - RNA, 4094 nt, Artificial Sequence
  SARS-CoV-2/Wuhan/WIV05/2019__EPI_ISL_402128 spike protein mRNA gc (1-1273)(K986P_V987P_P1069F)
aggagagucccgcagucggcguccagcggcucugcuuguucgugugugugucguugcaggccuuauucaagcuuaccauguucguguuccugguccuccugccccuggugagcucccagugcgugaaccucaccacccgcacgcagcugccgcccgccuacaccaacagcuucacccggggcgucuacuaccccgacaagguguuccgcuccagcgugcugcacuccacccaggaccucuuccugcccuucuucagcaacgucacgugguuccacgccauccacguguccgggaccaacggcaccaagcgguucgacaacccggugcugcccuucaacgacggggucuacuucgcgagcaccgagaaguccaacaucauccgcggcuggaucuucgggacgacccucgacagcaagacccagucccugcugaucgugaacaacgccaccaacguggucaucaaggugugcgaguuccaguucugcaacgaccccuuccucggcguguacuaccacaagaacaacaagagcuggauggaguccgaguuccgggucuacagcuccgccaacaacugcacguucgaguacgugagccagcccuuccugauggaccuggagggcaagcaggggaacuucaagaaccuccgcgaguucguguucaagaacaucgacggcuacuucaagaucuacuccaagcacaccccgaucaaccugguccgggaccugccccagggguucagcgcccucgagccccugguggaccugcccaucggcaucaacaucacccgcuuccagacccuccuggcccugcaccgguccuaccucacgccgggggacagcagcuccggcuggaccgcgggcgccgccgccuacuacgugggguaccugcagccccgcaccuuccugcucaaguacaacgagaacggcaccaucacggacgcggucgacugcgcccuggacccccugagcgagaccaagugcacccucaaguccuucaccguggagaaggggaucuaccagacgagcaacuuccgggugcagcccaccgaguccaucguccgcuucccgaacaucaccaaccugugccccuucggcgagguguucaacgccacccgguucgccagcgucuacgccuggaaccgcaagcggaucuccaacugcguggcggacuacagcgugcuguacaacuccgccagcuucuccacguucaagugcuacggcgucagccccaccaagcucaacgaccugugcuucaccaacguguacgccgacuccuucgugauccgcggggacgagguccggcagaucgcccccggccagaccgggaagaucgccgacuacaacuacaagcugccggacgacuucacgggcugcgugaucgcguggaacagcaacaaccucgacuccaaggucgggggcaacuacaacuaccuguaccgccuguuccgcaagagcaaccucaagcccuucgagcgggacaucuccaccgagaucuaccaggccggcagcacccccugcaacgggguggagggcuucaacugcuacuucccccugcaguccuacggguuccagccgaccaacggcgugggguaccagcccuaccggguggucgugcugagcuucgagcuccugcacgcccccgccacggugugcggccccaagaaguccaccaaccuggucaagaacaagugcgugaacuucaacuucaacggccucaccgggaccggcgugcugaccgagagcaacaagaaguuccugccguuccagcaguucgggcgcgacaucgccgacacgaccgacgcgguccgcgacccccagacccuggagauccucgacaucacccccugcagcuucggcgggguguccgugaucacgccgggcaccaacaccagcaaccaggucgccgugcuguaccaggacgugaacugcaccgagguccccguggccauccacgccgaccagcugacgcccaccuggcggguguacuccaccggcagcaacgucuuccagacccgcgccgggugccucaucggcgcggagcacgugaacaacuccuacgagugcgacauccccaucggggccggcaucugcgccagcuaccagacgcagaccaacuccccgcggcgcgcccggagcguggcgucccagagcaucaucgccuacaccaugucccugggcgccgagaacagcgucgccuacuccaacaacagcaucgccauccccaccaacuucacgaucuccgugaccaccgagauccugcccgugagcaugaccaagacgagcgucgacugcaccauguacaucugcggggacuccaccgagugcagcaaccuccugcugcaguacggcuccuucugcacccagcucaaccgcgcgcugacggggaucgccguggagcaggacaagaacacccaggagguguucgcccaggucaagcagaucuacaagacgcccccgaucaaggacuucggcggguucaacuucagccagauccugcccgaccccuccaagcccagcaagcgguccuucaucgaggaccuccuguucaacaaggugacccuggccgacgccggcuucaucaagcaguacggcgacugccucggggacaucgcggcccgcgaccugaucugcgcccagaaguucaacggccugaccgugcucccgccccugcugaccgacgagaugaucgcccaguacaccagcgcccuccuggcggggaccaucacguccggcuggaccuucggggccggcgccgcccugcagauccccuucgcgaugcagauggccuaccgguucaacggcaucggggucacccagaacgugcucuacgagaaccagaagcugaucgccaaccaguucaacagcgccaucggcaagauccaggacucccugagcuccaccgccagcgcgcucgggaagcugcaggacguggucaaccagaacgcccaggcccugaacacgcucgugaagcagcuguccagcaacuucggcgccaucuccagcgugcugaacgacauccucucccgccuggacccgcccgaggccgaggugcagaucgaccggcugaucaccgggcgccuccagagccugcagaccuacgugacccagcagcugauccgggcggccgagauccgcgccagcgccaaccucgccgcgaccaagauguccgagugcguccugggccagagcaagcggguggacuucugcggcaagggguaccaccugauguccuucccccagagcgccccgcacggcguggucuuccuccacgugacguacgucuucgcccaggagaagaacuucaccaccgcccccgcgaucugccacgacgggaaggcccacuucccccgcgagggcguguucguguccaacgggacccacugguucgucacgcagcggaacuucuacgagccgcagaucaucaccaccgacaacaccuucgugagcggcaacugcgacguggucaucggcaucgugaacaacacgguguacgacccccugcagcccgagcuggacuccuucaaggaggagcucgacaaguacuucaagaaccacaccagccccgacgucgaccugggggacaucuccggcaucaacgccagcguggugaacauccagaaggagaucgaccgccugaacgaggucgccaagaaccucaacgagucccugaucgaccugcaggagcucgggaaguacgagcaguacaucaaguggccgugguacaucuggcugggcuucaucgccggccugaucgcgaucgugauggugaccaucaugcucugcugcaugaccagcugcugcuccugccugaaggggugcugcagcugcggcuccugcugcaaguucgacgaggacgacagcgagcccguccugaagggggugaagcuccacuacacgugaggacuagucccuguucccagagcccacuuuuuuuucuuuuuuugaaauaaaauagccugucuuucagaucucaaaggcucuuuucagagccaccaaaaaaaaaaaaaaaaaaaaaaaaaaaaaaaaaaaaaaaaaaaaaaaaaaaaaaaaaaaaaaaaaaaaaaaaaaaaaaaaaaaaaaaaaaaaaaaaaaaaa

SEQ ID NO: 12341 - RNA, 4094 nt, Artificial Sequence
  SARS-CoV-2/Wuhan/WIV05/2019__EPI_ISL_402128 spike protein mRNA gc (1-1273)(K986P_V987P_ H1048Q_H1064N_ H1083N_H1101N)
aggagagucccgcagucggcguccagcggcucugcuuguucgugugugugucguugcaggccuuauucaagcuuaccauguucguguuccugguccuccugccccuggugagcucccagugcgugaaccucaccacccgcacgcagcugccgcccgccuacaccaacagcuucacccggggcgucuacuaccccgacaagguguuccgcuccagcgugcugcacuccacccaggaccucuuccugcccuucuucagcaacgucacgugguuccacgccauccacguguccgggaccaacggcaccaagcgguucgacaacccggugcugcccuucaacgacggggucuacuucgcgagcaccgagaaguccaacaucauccgcggcuggaucuucgggacgacccucgacagcaagacccagucccugcugaucgugaacaacgccaccaacguggucaucaaggugugcgaguuccaguucugcaacgaccccuuccucggcguguacuaccacaagaacaacaagagcuggauggaguccgaguuccgggucuacagcuccgccaacaacugcacguucgaguacgugagccagcccuuccugauggaccuggagggcaagcaggggaacuucaagaaccuccgcgaguucguguucaagaacaucgacggcuacuucaagaucuacuccaagcacaccccgaucaaccugguccgggaccugccccagggguucagcgcccucgagccccugguggaccugcccaucggcaucaacaucacccgcuuccagacccuccuggcccugcaccgguccuaccucacgccgggggacagcagcuccggcuggaccgcgggcgccgccgccuacuacgugggguaccugcagccccgcaccuuccugcucaaguacaacgagaacggcaccaucacggacgcggucgacugcgcccuggacccccugagcgagaccaagugcacccucaaguccuucaccguggagaaggggaucuaccagacgagcaacuuccgggugcagcccaccgaguccaucguccgcuucccgaacaucaccaaccugugccccuucggcgagguguucaacgccacccgguucgccagcgucuacgccuggaaccgcaagcggaucuccaacugcguggcggacuacagcgugcuguacaacuccgccagcuucuccacguucaagugcuacggcgucagccccaccaagcucaacgaccugugcuucaccaacguguacgccgacuccuucgugauccgcggggacgagguccggcagaucgcccccggccagaccgggaagaucgccgacuacaacuacaagcugccggacgacuucacgggcugcgugaucgcguggaacagcaacaaccucgacuccaaggucgggggcaacuacaacuaccuguaccgccuguuccgcaagagcaaccucaagcccuucgagcgggacaucuccaccgagaucuaccaggccggcagcacccccugcaacgggguggagggcuucaacugcuacuucccccugcaguccuacggguuccagccgaccaacggcgugggguaccagcccuaccggguggucgugcugagcuucgagcuccugcacgcccccgccacggugugcggccccaagaaguccaccaaccuggucaagaacaagugcgugaacuucaacuucaacggccucaccgggaccggcgugcugaccgagagcaacaagaaguuccugccguuccagcaguucgggcgcgacaucgccgacacgaccgacgcgguccgcgacccccagacccuggagauccucgacaucacccccugcagcuucggcgggguguccgugaucacgccgggcaccaacaccagcaaccaggucgccgugcuguaccaggacgugaacugcaccgagguccccguggccauccacgccgaccagcugacgcccaccuggcggguguacuccaccggcagcaacgucuuccagacccgcgccgggugccucaucggcgcggagcacgugaacaacuccuacgagugcgacauccccaucggggccggcaucugcgccagcuaccagacgcagaccaacuccccgcggcgcgcccggagcguggcgucccagagcaucaucgccuacaccaugucccugggcgccgagaacagcgucgccuacuccaacaacagcaucgccauccccaccaacuucacgaucuccgugaccaccgagauccugcccgugagcaugaccaagacgagcgucgacugcaccauguacaucugcggggacuccaccgagugcagcaaccuccugcugcaguacggcuccuucugcacccagcucaaccgcgcgcugacggggaucgccguggagcaggacaagaacacccaggagguguucgcccaggucaagcagaucuacaagacgcccccgaucaaggacuucggcggguucaacuucagccagauccugcccgaccccuccaagcccagcaagcgguccuucaucgaggaccuccuguucaacaaggugacccuggccgacgccggcuucaucaagcaguacggcgacugccucggggacaucgcggcccgcgaccugaucugcgcccagaaguucaacggccugaccgugcucccgccccugcugaccgacgagaugaucgcccaguacaccagcgcccuccuggcggggaccaucacguccggcuggaccuucggggccggcgccgcccugcagauccccuucgcgaugcagauggccuaccgguucaacggcaucggggucacccagaacgugcucuacgagaaccagaagcugaucgccaaccaguucaacagcgccaucggcaagauccaggacucccugagcuccaccgccagcgcgcucgggaagcugcaggacguggucaaccagaacgcccaggcccugaacacgcucgugaagcagcuguccagcaacuucggcgccaucuccagcgugcugaacgacauccucucccgccuggacccgcccgaggccgaggugcagaucgaccggcugaucaccgggcgccuccagagccugcagaccuacgugacccagcagcugauccgggcggccgagauccgcgccagcgccaaccucgccgcgaccaagauguccgagugcguccugggccagagcaagcggguggacuucugcggcaagggguaccagcugauguccuucccccagagcgccccgcacggcguggucuuccucaacgugacguacguccccgcccaggagaagaacuucaccaccgcccccgcgaucugcaacgacgggaaggcccacuucccccgcgagggcguguucguguccaacgggaccaacugguucgucacgcagcggaacuucuacgagccgcagaucaucaccaccgacaacaccuucgugagcggcaacugcgacguggucaucggcaucgugaacaacacgguguacgacccccugcagcccgagcuggacuccuucaaggaggagcucgacaaguacuucaagaaccacaccagccccgacgucgaccugggggacaucuccggcaucaacgccagcguggugaacauccagaaggagaucgaccgccugaacgaggucgccaagaaccucaacgagucccugaucgaccugcaggagcucgggaaguacgagcaguacaucaaguggccgugguacaucuggcugggcuucaucgccggccugaucgcgaucgugauggugaccaucaugcucugcugcaugaccagcugcugcuccugccugaaggggugcugcagcugcggcuccugcugcaaguucgacgaggacgacagcgagcccguccugaagggggugaagcuccacuacacgugaggacuagucccuguucccagagcccacuuuuuuuucuuuuuuugaaauaaaauagccugucuuucagaucucaaaggcucuuuucagagccaccaaaaaaaaaaaaaaaaaaaaaaaaaaaaaaaaaaaaaaaaaaaaaaaaaaaaaaaaaaaaaaaaaaaaaaaaaaaaaaaaaaaaaaaaaaaaaaaaaaaaa

SEQ ID NO: 12342 - RNA, 4094 nt, Artificial Sequence
  SARS-CoV-2/Wuhan/WIV05/2019__EPI_ISL_402128 spike protein mRNA gc (1-1273)(I712C_T1077C)
aggagagucccgcagucggcguccagcggcucugcuuguucgugugugugucguugcaggccuuauucaagcuuaccauguucguguuccugguccuccugccccuggugagcucccagugcgugaaccucaccacccgcacgcagcugccgcccgccuacaccaacagcuucacccggggcgucuacuaccccgacaagguguuccgcuccagcgugcugcacuccacccaggaccucuuccugcccuucuucagcaacgucacgugguuccacgccauccacguguccgggaccaacggcaccaagcgguucgacaacccggugcugcccuucaacgacggggucuacuucgcgagcaccgagaaguccaacaucauccgcggcuggaucuucgggacgacccucgacagcaagacccagucccugcugaucgugaacaacgccaccaacguggucaucaaggugugcgaguuccaguucugcaacgaccccuuccucggcguguacuaccacaagaacaacaagagcuggauggaguccgaguuccgggucuacagcuccgccaacaacugcacguucgaguacgugagccagcccuuccugauggaccuggagggcaagcaggggaacuucaagaaccuccgcgaguucguguucaagaacaucgacggcuacuucaagaucuacuccaagcacaccccgaucaaccugguccgggaccugccccagggguucagcgcccucgagccccugguggaccugcccaucggcaucaacaucacccgcuuccagacccuccuggcccugcaccgguccuaccucacgccgggggacagcagcuccggcuggaccgcgggcgccgccgccuacuacgugggguaccugcagccccgcaccuuccugcucaaguacaacgagaacggcaccaucacggacgcggucgacugcgcccuggacccccugagcgagaccaagugcacccucaaguccuucaccguggagaaggggaucuaccagacgagcaacuuccgggugcagcccaccgaguccaucguccgcuucccgaacaucaccaaccugugccccuucggcgagguguucaacgccacccgguucgccagcgucuacgccuggaaccgcaagcggaucuccaacugcguggcggacuacagcgugcuguacaacuccgccagcuucuccacguucaagugcuacggcgucagccccaccaagcucaacgaccugugcuucaccaacguguacgccgacuccuucgugauccgcggggacgagguccggcagaucgcccccggccagaccgggaagaucgccgacuacaacuacaagcugccggacgacuucacgggcugcgugaucgcguggaacagcaacaaccucgacuccaaggucgggggcaacuacaacuaccuguaccgccuguuccgcaagagcaaccucaagcccuucgagcgggacaucuccaccgagaucuaccaggccggcagcacccccugcaacgggguggagggcuucaacugcuacuucccccugcaguccuacggguuccagccgaccaacggcgugggguaccagcccuaccggguggucgugcugagcuucgagcuccugcacgcccccgccacggugugcggccccaagaaguccaccaaccuggucaagaacaagugcgugaacuucaacuucaacggccucaccgggaccggcgugcugaccgagagcaacaagaaguuccugccguuccagcaguucgggcgcgacaucgccgacacgaccgacgcgguccgcgacccccagacccuggagauccucgacaucacccccugcagcuucggcgggguguccgugaucacgccgggcaccaacaccagcaaccaggucgccgugcuguaccaggacgugaacugcaccgagguccccguggccauccacgccgaccagcugacgcccaccuggcggguguacuccaccggcagcaacgucuuccagacccgcgccgggugccucaucggcgcggagcacgugaacaacuccuacgagugcgacauccccaucggggccggcaucugcgccagcuaccagacgcagaccaacuccccgcggcgcgcccggagcguggcgucccagagcaucaucgccuacaccaugucccugggcgccgagaacagcgucgccuacuccaacaacagcugcgccauccccaccaacuucacgaucuccgugaccaccgagauccugcccgugagcaugaccaagacgagcgucgacugcaccauguacaucugcggggacuccaccgagugcagcaaccuccugcugcaguacggcuccuucugcacccagcucaaccgcgcgcugacggggaucgccguggagcaggacaagaacacccaggagguguucgcccaggucaagcagaucuacaagacgcccccgaucaaggacuucggcggguucaacuucagccagauccugcccgaccccuccaagcccagcaagcgguccuucaucgaggaccuccuguucaacaaggugacccuggccgacgccggcuucaucaagcaguacggcgacugccucggggacaucgcggcccgcgaccugaucugcgcccagaaguucaacggccugaccgugcucccgccccugcugaccgacgagaugaucgcccaguacaccagcgcccuccuggcggggaccaucacguccggcuggaccuucggggccggcgccgcccugcagauccccuucgcgaugcagauggccuaccgguucaacggcaucggggucacccagaacgugcucuacgagaaccagaagcugaucgccaaccaguucaacagcgccaucggcaagauccaggacucccugagcuccaccgccagcgcgcucgggaagcugcaggacguggucaaccagaacgcccaggcccugaacacgcucgugaagcagcuguccagcaacuucggcgccaucuccagcgugcugaacgacauccucucccgccuggacaaggucgaggccgaggugcagaucgaccggcugaucaccgggcgccuccagagccugcagaccuacgugacccagcagcugauccgggcggccgagauccgcgccagcgccaaccucgccgcgaccaagauguccgagugcguccugggccagagcaagcggguggacuucugcggcaagggguaccaccugauguccuucccccagagcgccccgcacggcguggucuuccuccacgugacguacguccccgcccaggagaagaacuucaccugcgcccccgcgaucugccacgacgggaaggcccacuucccccgcgagggcguguucguguccaacgggacccacugguucgucacgcagcggaacuucuacgagccgcagaucaucaccaccgacaacaccuucgugagcggcaacugcgacguggucaucggcaucgugaacaacacgguguacgacccccugcagcccgagcuggacuccuucaaggaggagcucgacaaguacuucaagaaccacaccagccccgacgucgaccugggggacaucuccggcaucaacgccagcguggugaacauccagaaggagaucgaccgccugaacgaggucgccaagaaccucaacgagucccugaucgaccugcaggagcucgggaaguacgagcaguacaucaaguggccgugguacaucuggcugggcuucaucgccggccugaucgcgaucgugauggugaccaucaugcucugcugcaugaccagcugcugcuccugccugaaggggugcugcagcugcggcuccugcugcaaguucgacgaggacgacagcgagcccguccugaagggggugaagcuccacuacacgugaggacuagucccuguucccagagcccacuuuuuuuucuuuuuuugaaauaaaauagccugucuuucagaucucaaaggcucuuuucagagccaccaaaaaaaaaaaaaaaaaaaaaaaaaaaaaaaaaaaaaaaaaaaaaaaaaaaaaaaaaaaaaaaaaaaaaaaaaaaaaaaaaaaaaaaaaaaaaaaaaaaaa

SEQ ID NO: 12343 - RNA, 4094 nt, Artificial Sequence
  SARS-CoV-2/Wuhan/WIV05/2019__EPI_ISL_402128 spike protein mRNA gc (1-1273)(I714C_Y1110C)
aggagagucccgcagucggcguccagcggcucugcuuguucgugugugugucguugcaggccuuauucaagcuuaccauguucguguuccugguccuccugccccuggugagcucccagugcgugaaccucaccacccgcacgcagcugccgcccgccuacaccaacagcuucacccggggcgucuacuaccccgacaagguguuccgcuccagcgugcugcacuccacccaggaccucuuccugcccuucuucagcaacgucacgugguuccacgccauccacguguccgggaccaacggcaccaagcgguucgacaacccggugcugcccuucaacgacggggucuacuucgcgagcaccgagaaguccaacaucauccgcggcuggaucuucgggacgacccucgacagcaagacccagucccugcugaucgugaacaacgccaccaacguggucaucaaggugugcgaguuccaguucugcaacgaccccuuccucggcguguacuaccacaagaacaacaagagcuggauggaguccgaguuccgggucuacagcuccgccaacaacugcacguucgaguacgugagccagcccuuccugauggaccuggagggcaagcaggggaacuucaagaaccuccgcgaguucguguucaagaacaucgacggcuacuucaagaucuacuccaagcacaccccgaucaaccugguccgggaccugccccagggguucagcgcccucgagccccugguggaccugcccaucggcaucaacaucacccgcuuccagacccuccuggcccugcaccgguccuaccucacgccgggggacagcagcuccggcuggaccgcgggcgccgccgccuacuacgugggguaccugcagccccgcaccuuccugcucaaguacaacgagaacggcaccaucacggacgcggucgacugcgcccuggacccccugagcgagaccaagugcacccucaaguccuucaccguggagaaggggaucuaccagacgagcaacuuccgggugcagcccaccgaguccaucguccgcuucccgaacaucaccaaccugugccccuucggcgagguguucaacgccacccgguucgccagcgucuacgccuggaaccgcaagcggaucuccaacugcguggcggacuacagcgugcuguacaacuccgccagcuucuccacguucaagugcuacggcgucagccccaccaagcucaacgaccugugcuucaccaacguguacgccgacuccuucgugauccgcggggacgagguccggcagaucgcccccggccagaccgggaagaucgccgacuacaacuacaagcugccggacgacuucacgggcugcgugaucgcguggaacagcaacaaccucgacuccaaggucgggggcaacuacaacuaccuguaccgccuguuccgcaagagcaaccucaagcccuucgagcgggacaucuccaccgagaucuaccaggccggcagcacccccugcaacgggguggagggcuucaacugcuacuucccccugcaguccuacggguuccagccgaccaacggcgugggguaccagcccuaccggguggucgugcugagcuucgagcuccugcacgcccccgccacggugugcggccccaagaaguccaccaaccuggucaagaacaagugcgugaacuucaacuucaacggccucaccgggaccggcgugcugaccgagagcaacaagaaguuccugccguuccagcaguucgggcgcgacaucgccgacacgaccgacgcgguccgcgacccccagacccuggagauccucgacaucacccccugcagcuucggcgggguguccgugaucacgccgggcaccaacaccagcaaccaggucgccgugcuguaccaggacgugaacugcaccgagguccccguggccauccacgccgaccagcugacgcccaccuggcggguguacuccaccggcagcaacgucuuccagacccgcgccgggugccucaucggcgcggagcacgugaacaacuccuacgagugcgacauccccaucggggccggcaucugcgccagcuaccagacgcagaccaacuccccgcggcgcgcccggagcguggcgucccagagcaucaucgccuacaccaugucccugggcgccgagaacagcgucgccuacuccaacaacagcaucgccugccccaccaacuucacgaucuccgugaccaccgagauccugcccgugagcaugaccaagacgagcgucgacugcaccauguacaucugcggggacuccaccgagugcagcaaccuccugcugcaguacggcuccuucugcacccagcucaaccgcgcgcugacggggaucgccguggagcaggacaagaacacccaggagguguucgcccaggucaagcagaucuacaagacgcccccgaucaaggacuucggcggguucaacuucagccagauccugcccgaccccuccaagcccagcaagcgguccuucaucgaggaccuccuguucaacaaggugacccuggccgacgccggcuucaucaagcaguacggcgacugccucggggacaucgcggcccgcgaccugaucugcgcccagaaguucaacggccugaccgugcucccgccccugcugaccgacgagaugaucgcccaguacaccagcgcccuccuggcggggaccaucacguccggcuggaccuucggggccggcgccgcccugcagauccccuucgcgaugcagauggccuaccgguucaacggcaucggggucacccagaacgugcucuacgagaaccagaagcugaucgccaaccaguucaacagcgccaucggcaagauccaggacucccugagcuccaccgccagcgcgcucgggaagcugcaggacguggucaaccagaacgcccaggcccugaacacgcucgugaagcagcuguccagcaacuucggcgccaucuccagcgugcugaacgacauccucucccgccuggacaaggucgaggccgaggugcagaucgaccggcugaucaccgggcgccuccagagccugcagaccuacgugacccagcagcugauccgggcggccgagauccgcgccagcgccaaccucgccgcgaccaagauguccgagugcguccugggccagagcaagcggguggacuucugcggcaagggguaccaccugauguccuucccccagagcgccccgcacggcguggucuuccuccacgugacguacguccccgcccaggagaagaacuucaccaccgcccccgcgaucugccacgacgggaaggcccacuucccccgcgagggcguguucguguccaacgggacccacugguucgucacgcagcggaacuucugcgagccgcagaucaucaccaccgacaacaccuucgugagcggcaacugcgacguggucaucggcaucgugaacaacacgguguacgacccccugcagcccgagcuggacuccuucaaggaggagcucgacaaguacuucaagaaccacaccagccccgacgucgaccugggggacaucuccggcaucaacgccagcguggugaacauccagaaggagaucgaccgccugaacgaggucgccaagaaccucaacgagucccugaucgaccugcaggagcucgggaaguacgagcaguacaucaaguggccgugguacaucuggcugggcuucaucgccggccugaucgcgaucgugauggugaccaucaugcucugcugcaugaccagcugcugcuccugccugaaggggugcugcagcugcggcuccugcugcaaguucgacgaggacgacagcgagcccguccugaagggggugaagcuccacuacacgugaggacuagucccuguucccagagcccacuuuuuuuucuuuuuuugaaauaaaauagccugucuuucagaucucaaaggcucuuuucagagccaccaaaaaaaaaaaaaaaaaaaaaaaaaaaaaaaaaaaaaaaaaaaaaaaaaaaaaaaaaaaaaaaaaaaaaaaaaaaaaaaaaaaaaaaaaaaaaaaaaaaaa

SEQ ID NO: 12344 - RNA, 4094 nt, Artificial Sequence
  SARS-CoV-2/Wuhan/WIV05/2019__EPI_ISL_402128 spike protein mRNA gc (1-1273)(P715C_P1069C)
aggagagucccgcagucggcguccagcggcucugcuuguucgugugugugucguugcaggccuuauucaagcuuaccauguucguguuccugguccuccugccccuggugagcucccagugcgugaaccucaccacccgcacgcagcugccgcccgccuacaccaacagcuucacccggggcgucuacuaccccgacaagguguuccgcuccagcgugcugcacuccacccaggaccucuuccugcccuucuucagcaacgucacgugguuccacgccauccacguguccgggaccaacggcaccaagcgguucgacaacccggugcugcccuucaacgacggggucuacuucgcgagcaccgagaaguccaacaucauccgcggcuggaucuucgggacgacccucgacagcaagacccagucccugcugaucgugaacaacgccaccaacguggucaucaaggugugcgaguuccaguucugcaacgaccccuuccucggcguguacuaccacaagaacaacaagagcuggauggaguccgaguuccgggucuacagcuccgccaacaacugcacguucgaguacgugagccagcccuuccugauggaccuggagggcaagcaggggaacuucaagaaccuccgcgaguucguguucaagaacaucgacggcuacuucaagaucuacuccaagcacaccccgaucaaccugguccgggaccugccccagggguucagcgcccucgagccccugguggaccugcccaucggcaucaacaucacccgcuuccagacccuccuggcccugcaccgguccuaccucacgccgggggacagcagcuccggcuggaccgcgggcgccgccgccuacuacgugggguaccugcagccccgcaccuuccugcucaaguacaacgagaacggcaccaucacggacgcggucgacugcgcccuggacccccugagcgagaccaagugcacccucaaguccuucaccguggagaaggggaucuaccagacgagcaacuuccgggugcagcccaccgaguccaucguccgcuucccgaacaucaccaaccugugccccuucggcgagguguucaacgccacccgguucgccagcgucuacgccuggaaccgcaagcggaucuccaacugcguggcggacuacagcgugcuguacaacuccgccagcuucuccacguucaagugcuacggcgucagccccaccaagcucaacgaccugugcuucaccaacguguacgccgacuccuucgugauccgcggggacgagguccggcagaucgcccccggccagaccgggaagaucgccgacuacaacuacaagcugccggacgacuucacgggcugcgugaucgcguggaacagcaacaaccucgacuccaaggucgggggcaacuacaacuaccuguaccgccuguuccgcaagagcaaccucaagcccuucgagcgggacaucuccaccgagaucuaccaggccggcagcacccccugcaacgggguggagggcuucaacugcuacuucccccugcaguccuacggguuccagccgaccaacggcgugggguaccagcccuaccggguggucgugcugagcuucgagcuccugcacgcccccgccacggugugcggccccaagaaguccaccaaccuggucaagaacaagugcgugaacuucaacuucaacggccucaccgggaccggcgugcugaccgagagcaacaagaaguuccugccguuccagcaguucgggcgcgacaucgccgacacgaccgacgcgguccgcgacccccagacccuggagauccucgacaucacccccugcagcuucggcgggguguccgugaucacgccgggcaccaacaccagcaaccaggucgccgugcuguaccaggacgugaacugcaccgagguccccguggccauccacgccgaccagcugacgcccaccuggcggguguacuccaccggcagcaacgucuuccagacccgcgccgggugccucaucggcgcggagcacgugaacaacuccuacgagugcgacauccccaucggggccggcaucugcgccagcuaccagacgcagaccaacuccccgcggcgcgcccggagcguggcgucccagagcaucaucgccuacaccaugucccugggcgccgagaacagcgucgccuacuccaacaacagcaucgccaucugcaccaacuucacgaucuccgugaccaccgagauccugcccgugagcaugaccaagacgagcgucgacugcaccauguacaucugcggggacuccaccgagugcagcaaccuccugcugcaguacggcuccuucugcacccagcucaaccgcgcgcugacggggaucgccguggagcaggacaagaacacccaggagguguucgcccaggucaagcagaucuacaagacgcccccgaucaaggacuucggcggguucaacuucagccagauccugcccgaccccuccaagcccagcaagcgguccuucaucgaggaccuccuguucaacaaggugacccuggccgacgccggcuucaucaagcaguacggcgacugccucggggacaucgcggcccgcgaccugaucugcgcccagaaguucaacggccugaccgugcucccgccccugcugaccgacgagaugaucgcccaguacaccagcgcccuccuggcggggaccaucacguccggcuggaccuucggggccggcgccgcccugcagauccccuucgcgaugcagauggccuaccgguucaacggcaucggggucacccagaacgugcucuacgagaaccagaagcugaucgccaaccaguucaacagcgccaucggcaagauccaggacucccugagcuccaccgccagcgcgcucgggaagcugcaggacguggucaaccagaacgcccaggcccugaacacgcucgugaagcagcuguccagcaacuucggcgccaucuccagcgugcugaacgacauccucucccgccuggacaaggucgaggccgaggugcagaucgaccggcugaucaccgggcgccuccagagccugcagaccuacgugacccagcagcugauccgggcggccgagauccgcgccagcgccaaccucgccgcgaccaagauguccgagugcguccugggccagagcaagcggguggacuucugcggcaagggguaccaccugauguccuucccccagagcgccccgcacggcguggucuuccuccacgugacguacgucugcgcccaggagaagaacuucaccaccgcccccgcgaucugccacgacgggaaggcccacuucccccgcgagggcguguucguguccaacgggacccacugguucgucacgcagcggaacuucuacgagccgcagaucaucaccaccgacaacaccuucgugagcggcaacugcgacguggucaucggcaucgugaacaacacgguguacgacccccugcagcccgagcuggacuccuucaaggaggagcucgacaaguacuucaagaaccacaccagccccgacgucgaccugggggacaucuccggcaucaacgccagcguggugaacauccagaaggagaucgaccgccugaacgaggucgccaagaaccucaacgagucccugaucgaccugcaggagcucgggaaguacgagcaguacaucaaguggccgugguacaucuggcugggcuucaucgccggccugaucgcgaucgugauggugaccaucaugcucugcugcaugaccagcugcugcuccugccugaaggggugcugcagcugcggcuccugcugcaaguucgacgaggacgacagcgagcccguccugaagggggugaagcuccacuacacgugaggacuagucccuguucccagagcccacuuuuuuuucuuuuuuugaaauaaaauagccugucuuucagaucucaaaggcucuuuucagagccaccaaaaaaaaaaaaaaaaaaaaaaaaaaaaaaaaaaaaaaaaaaaaaaaaaaaaaaaaaaaaaaaaaaaaaaaaaaaaaaaaaaaaaaaaaaaaaaaaaaaaa

SEQ ID NO: 12345 - RNA, 4094 nt, Artificial Sequence
  SARS-CoV-2/Wuhan/WIV05/2019__EPI_ISL_402128 spike protein mRNA gc (1-1273)(G889C_L1034C)
aggagagucccgcagucggcguccagcggcucugcuuguucgugugugugucguugcaggccuuauucaagcuuaccauguucguguuccugguccuccugccccuggugagcucccagugcgugaaccucaccacccgcacgcagcugccgcccgccuacaccaacagcuucacccggggcgucuacuaccccgacaagguguuccgcuccagcgugcugcacuccacccaggaccucuuccugcccuucuucagcaacgucacgugguuccacgccauccacguguccgggaccaacggcaccaagcgguucgacaacccggugcugcccuucaacgacggggucuacuucgcgagcaccgagaaguccaacaucauccgcggcuggaucuucgggacgacccucgacagcaagacccagucccugcugaucgugaacaacgccaccaacguggucaucaaggugugcgaguuccaguucugcaacgaccccuuccucggcguguacuaccacaagaacaacaagagcuggauggaguccgaguuccgggucuacagcuccgccaacaacugcacguucgaguacgugagccagcccuuccugauggaccuggagggcaagcaggggaacuucaagaaccuccgcgaguucguguucaagaacaucgacggcuacuucaagaucuacuccaagcacaccccgaucaaccugguccgggaccugccccagggguucagcgcccucgagccccugguggaccugcccaucggcaucaacaucacccgcuuccagacccuccuggcccugcaccgguccuaccucacgccgggggacagcagcuccggcuggaccgcgggcgccgccgccuacuacgugggguaccugcagccccgcaccuuccugcucaaguacaacgagaacggcaccaucacggacgcggucgacugcgcccuggacccccugagcgagaccaagugcacccucaaguccuucaccguggagaaggggaucuaccagacgagcaacuuccgggugcagcccaccgaguccaucguccgcuucccgaacaucaccaaccugugccccuucggcgagguguucaacgccacccgguucgccagcgucuacgccuggaaccgcaagcggaucuccaacugcguggcggacuacagcgugcuguacaacuccgccagcuucuccacguucaagugcuacggcgucagccccaccaagcucaacgaccugugcuucaccaacguguacgccgacuccuucgugauccgcggggacgagguccggcagaucgcccccggccagaccgggaagaucgccgacuacaacuacaagcugccggacgacuucacgggcugcgugaucgcguggaacagcaacaaccucgacuccaaggucgggggcaacuacaacuaccuguaccgccuguuccgcaagagcaaccucaagcccuucgagcgggacaucuccaccgagaucuaccaggccggcagcacccccugcaacgggguggagggcuucaacugcuacuucccccugcaguccuacggguuccagccgaccaacggcgugggguaccagcccuaccggguggucgugcugagcuucgagcuccugcacgcccccgccacggugugcggccccaagaaguccaccaaccuggucaagaacaagugcgugaacuucaacuucaacggccucaccgggaccggcgugcugaccgagagcaacaagaaguuccugccguuccagcaguucgggcgcgacaucgccgacacgaccgacgcgguccgcgacccccagacccuggagauccucgacaucacccccugcagcuucggcgggguguccgugaucacgccgggcaccaacaccagcaaccaggucgccgugcuguaccaggacgugaacugcaccgagguccccguggccauccacgccgaccagcugacgcccaccuggcggguguacuccaccggcagcaacgucuuccagacccgcgccgggugccucaucggcgcggagcacgugaacaacuccuacgagugcgacauccccaucggggccggcaucugcgccagcuaccagacgcagaccaacuccccgcggcgcgcccggagcguggcgucccagagcaucaucgccuacaccaugucccugggcgccgagaacagcgucgccuacuccaacaacagcaucgccauccccaccaacuucacgaucuccgugaccaccgagauccugcccgugagcaugaccaagacgagcgucgacugcaccauguacaucugcggggacuccaccgagugcagcaaccuccugcugcaguacggcuccuucugcacccagcucaaccgcgcgcugacggggaucgccguggagcaggacaagaacacccaggagguguucgcccaggucaagcagaucuacaagacgcccccgaucaaggacuucggcggguucaacuucagccagauccugcccgaccccuccaagcccagcaagcgguccuucaucgaggaccuccuguucaacaaggugacccuggccgacgccggcuucaucaagcaguacggcgacugccucggggacaucgcggcccgcgaccugaucugcgcccagaaguucaacggccugaccgugcucccgccccugcugaccgacgagaugaucgcccaguacaccagcgcccuccuggcggggaccaucacguccggcuggaccuucugcgccggcgccgcccugcagauccccuucgcgaugcagauggccuaccgguucaacggcaucggggucacccagaacgugcucuacgagaaccagaagcugaucgccaaccaguucaacagcgccaucggcaagauccaggacucccugagcuccaccgccagcgcgcucgggaagcugcaggacguggucaaccagaacgcccaggcccugaacacgcucgugaagcagcuguccagcaacuucggcgccaucuccagcgugcugaacgacauccucucccgccuggacaaggucgaggccgaggugcagaucgaccggcugaucaccgggcgccuccagagccugcagaccuacgugacccagcagcugauccgggcggccgagauccgcgccagcgccaaccucgccgcgaccaagauguccgagugcgucugcggccagagcaagcggguggacuucugcggcaagggguaccaccugauguccuucccccagagcgccccgcacggcguggucuuccuccacgugacguacguccccgcccaggagaagaacuucaccaccgcccccgcgaucugccacgacgggaaggcccacuucccccgcgagggcguguucguguccaacgggacccacugguucgucacgcagcggaacuucuacgagccgcagaucaucaccaccgacaacaccuucgugagcggcaacugcgacguggucaucggcaucgugaacaacacgguguacgacccccugcagcccgagcuggacuccuucaaggaggagcucgacaaguacuucaagaaccacaccagccccgacgucgaccugggggacaucuccggcaucaacgccagcguggugaacauccagaaggagaucgaccgccugaacgaggucgccaagaaccucaacgagucccugaucgaccugcaggagcucgggaaguacgagcaguacaucaaguggccgugguacaucuggcugggcuucaucgccggccugaucgcgaucgugauggugaccaucaugcucugcugcaugaccagcugcugcuccugccugaaggggugcugcagcugcggcuccugcugcaaguucgacgaggacgacagcgagcccguccugaagggggugaagcuccacuacacgugaggacuagucccuguucccagagcccacuuuuuuuucuuuuuuugaaauaaaauagccugucuuucagaucucaaaggcucuuuucagagccaccaaaaaaaaaaaaaaaaaaaaaaaaaaaaaaaaaaaaaaaaaaaaaaaaaaaaaaaaaaaaaaaaaaaaaaaaaaaaaaaaaaaaaaaaaaaaaaaaaaaaa

SEQ ID NO: 12346 - RNA, 4094 nt, Artificial Sequence
  SARS-CoV-2/Wuhan/WIV05/2019__EPI_ISL_402128 spike protein mRNA gc (1-1273)(I909C_Y1047C)
aggagagucccgcagucggcguccagcggcucugcuuguucgugugugugucguugcaggccuuauucaagcuuaccauguucguguuccugguccuccugccccuggugagcucccagugcgugaaccucaccacccgcacgcagcugccgcccgccuacaccaacagcuucacccggggcgucuacuaccccgacaagguguuccgcuccagcgugcugcacuccacccaggaccucuuccugcccuucuucagcaacgucacgugguuccacgccauccacguguccgggaccaacggcaccaagcgguucgacaacccggugcugcccuucaacgacggggucuacuucgcgagcaccgagaaguccaacaucauccgcggcuggaucuucgggacgacccucgacagcaagacccagucccugcugaucgugaacaacgccaccaacguggucaucaaggugugcgaguuccaguucugcaacgaccccuuccucggcguguacuaccacaagaacaacaagagcuggauggaguccgaguuccgggucuacagcuccgccaacaacugcacguucgaguacgugagccagcccuuccugauggaccuggagggcaagcaggggaacuucaagaaccuccgcgaguucguguucaagaacaucgacggcuacuucaagaucuacuccaagcacaccccgaucaaccugguccgggaccugccccagggguucagcgcccucgagccccugguggaccugcccaucggcaucaacaucacccgcuuccagacccuccuggcccugcaccgguccuaccucacgccgggggacagcagcuccggcuggaccgcgggcgccgccgccuacuacgugggguaccugcagccccgcaccuuccugcucaaguacaacgagaacggcaccaucacggacgcggucgacugcgcccuggacccccugagcgagaccaagugcacccucaaguccuucaccguggagaaggggaucuaccagacgagcaacuuccgggugcagcccaccgaguccaucguccgcuucccgaacaucaccaaccugugccccuucggcgagguguucaacgccacccgguucgccagcgucuacgccuggaaccgcaagcggaucuccaacugcguggcggacuacagcgugcuguacaacuccgccagcuucuccacguucaagugcuacggcgucagccccaccaagcucaacgaccugugcuucaccaacguguacgccgacuccuucgugauccgcggggacgagguccggcagaucgcccccggccagaccgggaagaucgccgacuacaacuacaagcugccggacgacuucacgggcugcgugaucgcguggaacagcaacaaccucgacuccaaggucgggggcaacuacaacuaccuguaccgccuguuccgcaagagcaaccucaagcccuucgagcgggacaucuccaccgagaucuaccaggccggcagcacccccugcaacgggguggagggcuucaacugcuacuucccccugcaguccuacggguuccagccgaccaacggcgugggguaccagcccuaccggguggucgugcugagcuucgagcuccugcacgcccccgccacggugugcggccccaagaaguccaccaaccuggucaagaacaagugcgugaacuucaacuucaacggccucaccgggaccggcgugcugaccgagagcaacaagaaguuccugccguuccagcaguucgggcgcgacaucgccgacacgaccgacgcgguccgcgacccccagacccuggagauccucgacaucacccccugcagcuucggcgggguguccgugaucacgccgggcaccaacaccagcaaccaggucgccgugcuguaccaggacgugaacugcaccgagguccccguggccauccacgccgaccagcugacgcccaccuggcggguguacuccaccggcagcaacgucuuccagacccgcgccgggugccucaucggcgcggagcacgugaacaacuccuacgagugcgacauccccaucggggccggcaucugcgccagcuaccagacgcagaccaacuccccgcggcgcgcccggagcguggcgucccagagcaucaucgccuacaccaugucccugggcgccgagaacagcgucgccuacuccaacaacagcaucgccauccccaccaacuucacgaucuccgugaccaccgagauccugcccgugagcaugaccaagacgagcgucgacugcaccauguacaucugcggggacuccaccgagugcagcaaccuccugcugcaguacggcuccuucugcacccagcucaaccgcgcgcugacggggaucgccguggagcaggacaagaacacccaggagguguucgcccaggucaagcagaucuacaagacgcccccgaucaaggacuucggcggguucaacuucagccagauccugcccgaccccuccaagcccagcaagcgguccuucaucgaggaccuccuguucaacaaggugacccuggccgacgccggcuucaucaagcaguacggcgacugccucggggacaucgcggcccgcgaccugaucugcgcccagaaguucaacggccugaccgugcucccgccccugcugaccgacgagaugaucgcccaguacaccagcgcccuccuggcggggaccaucacguccggcuggaccuucggggccggcgccgcccugcagauccccuucgcgaugcagauggccuaccgguucaacggcugcggggucacccagaacgugcucuacgagaaccagaagcugaucgccaaccaguucaacagcgccaucggcaagauccaggacucccugagcuccaccgccagcgcgcucgggaagcugcaggacguggucaaccagaacgcccaggcccugaacacgcucgugaagcagcuguccagcaacuucggcgccaucuccagcgugcugaacgacauccucucccgccuggacaaggucgaggccgaggugcagaucgaccggcugaucaccgggcgccuccagagccugcagaccuacgugacccagcagcugauccgggcggccgagauccgcgccagcgccaaccucgccgcgaccaagauguccgagugcguccugggccagagcaagcggguggacuucugcggcaaggggugccaccugauguccuucccccagagcgccccgcacggcguggucuuccuccacgugacguacguccccgcccaggagaagaacuucaccaccgcccccgcgaucugccacgacgggaaggcccacuucccccgcgagggcguguucguguccaacgggacccacugguucgucacgcagcggaacuucuacgagccgcagaucaucaccaccgacaacaccuucgugagcggcaacugcgacguggucaucggcaucgugaacaacacgguguacgacccccugcagcccgagcuggacuccuucaaggaggagcucgacaaguacuucaagaaccacaccagccccgacgucgaccugggggacaucuccggcaucaacgccagcguggugaacauccagaaggagaucgaccgccugaacgaggucgccaagaaccucaacgagucccugaucgaccugcaggagcucgggaaguacgagcaguacaucaaguggccgugguacaucuggcugggcuucaucgccggccugaucgcgaucgugauggugaccaucaugcucugcugcaugaccagcugcugcuccugccugaaggggugcugcagcugcggcuccugcugcaaguucgacgaggacgacagcgagcccguccugaagggggugaagcuccacuacacgugaggacuagucccuguucccagagcccacuuuuuuuucuuuuuuugaaauaaaauagccugucuuucagaucucaaaggcucuuuucagagccaccaaaaaaaaaaaaaaaaaaaaaaaaaaaaaaaaaaaaaaaaaaaaaaaaaaaaaaaaaaaaaaaaaaaaaaaaaaaaaaaaaaaaaaaaaaaaaaaaaaaaa

SEQ ID NO: 12347 - RNA, 4094 nt, Artificial Sequence
  SARS-CoV-2/Wuhan/WIV05/2019__EPI_ISL_402128 spike protein mRNA gc (1-1273)(Q965C_S1003C)
aggagagucccgcagucggcguccagcggcucugcuuguucgugugugugucguugcaggccuuauucaagcuuaccauguucguguuccugguccuccugccccuggugagcucccagugcgugaaccucaccacccgcacgcagcugccgcccgccuacaccaacagcuucacccggggcgucuacuaccccgacaagguguuccgcuccagcgugcugcacuccacccaggaccucuuccugcccuucuucagcaacgucacgugguuccacgccauccacguguccgggaccaacggcaccaagcgguucgacaacccggugcugcccuucaacgacggggucuacuucgcgagcaccgagaaguccaacaucauccgcggcuggaucuucgggacgacccucgacagcaagacccagucccugcugaucgugaacaacgccaccaacguggucaucaaggugugcgaguuccaguucugcaacgaccccuuccucggcguguacuaccacaagaacaacaagagcuggauggaguccgaguuccgggucuacagcuccgccaacaacugcacguucgaguacgugagccagcccuuccugauggaccuggagggcaagcaggggaacuucaagaaccuccgcgaguucguguucaagaacaucgacggcuacuucaagaucuacuccaagcacaccccgaucaaccugguccgggaccugccccagggguucagcgcccucgagccccugguggaccugcccaucggcaucaacaucacccgcuuccagacccuccuggcccugcaccgguccuaccucacgccgggggacagcagcuccggcuggaccgcgggcgccgccgccuacuacgugggguaccugcagccccgcaccuuccugcucaaguacaacgagaacggcaccaucacggacgcggucgacugcgcccuggacccccugagcgagaccaagugcacccucaaguccuucaccguggagaaggggaucuaccagacgagcaacuuccgggugcagcccaccgaguccaucguccgcuucccgaacaucaccaaccugugccccuucggcgagguguucaacgccacccgguucgccagcgucuacgccuggaaccgcaagcggaucuccaacugcguggcggacuacagcgugcuguacaacuccgccagcuucuccacguucaagugcuacggcgucagccccaccaagcucaacgaccugugcuucaccaacguguacgccgacuccuucgugauccgcggggacgagguccggcagaucgcccccggccagaccgggaagaucgccgacuacaacuacaagcugccggacgacuucacgggcugcgugaucgcguggaacagcaacaaccucgacuccaaggucgggggcaacuacaacuaccuguaccgccuguuccgcaagagcaaccucaagcccuucgagcgggacaucuccaccgagaucuaccaggccggcagcacccccugcaacgggguggagggcuucaacugcuacuucccccugcaguccuacggguuccagccgaccaacggcgugggguaccagcccuaccggguggucgugcugagcuucgagcuccugcacgcccccgccacggugugcggccccaagaaguccaccaaccuggucaagaacaagugcgugaacuucaacuucaacggccucaccgggaccggcgugcugaccgagagcaacaagaaguuccugccguuccagcaguucgggcgcgacaucgccgacacgaccgacgcgguccgcgacccccagacccuggagauccucgacaucacccccugcagcuucggcgggguguccgugaucacgccgggcaccaacaccagcaaccaggucgccgugcuguaccaggacgugaacugcaccgagguccccguggccauccacgccgaccagcugacgcccaccuggcggguguacuccaccggcagcaacgucuuccagacccgcgccgggugccucaucggcgcggagcacgugaacaacuccuacgagugcgacauccccaucggggccggcaucugcgccagcuaccagacgcagaccaacuccccgcggcgcgcccggagcguggcgucccagagcaucaucgccuacaccaugucccugggcgccgagaacagcgucgccuacuccaacaacagcaucgccauccccaccaacuucacgaucuccgugaccaccgagauccugcccgugagcaugaccaagacgagcgucgacugcaccauguacaucugcggggacuccaccgagugcagcaaccuccugcugcaguacggcuccuucugcacccagcucaaccgcgcgcugacggggaucgccguggagcaggacaagaacacccaggagguguucgcccaggucaagcagaucuacaagacgcccccgaucaaggacuucggcggguucaacuucagccagauccugcccgaccccuccaagcccagcaagcgguccuucaucgaggaccuccuguucaacaaggugacccuggccgacgccggcuucaucaagcaguacggcgacugccucggggacaucgcggcccgcgaccugaucugcgcccagaaguucaacggccugaccgugcucccgccccugcugaccgacgagaugaucgcccaguacaccagcgcccuccuggcggggaccaucacguccggcuggaccuucggggccggcgccgcccugcagauccccuucgcgaugcagauggccuaccgguucaacggcaucggggucacccagaacgugcucuacgagaaccagaagcugaucgccaaccaguucaacagcgccaucggcaagauccaggacucccugagcuccaccgccagcgcgcucgggaagcugcaggacguggucaaccagaacgcccaggcccugaacacgcucgugaagugccuguccagcaacuucggcgccaucuccagcgugcugaacgacauccucucccgccuggacaaggucgaggccgaggugcagaucgaccggcugaucaccgggcgccuccagugccugcagaccuacgugacccagcagcugauccgggcggccgagauccgcgccagcgccaaccucgccgcgaccaagauguccgagugcguccugggccagagcaagcggguggacuucugcggcaagggguaccaccugauguccuucccccagagcgccccgcacggcguggucuuccuccacgugacguacguccccgcccaggagaagaacuucaccaccgcccccgcgaucugccacgacgggaaggcccacuucccccgcgagggcguguucguguccaacgggacccacugguucgucacgcagcggaacuucuacgagccgcagaucaucaccaccgacaacaccuucgugagcggcaacugcgacguggucaucggcaucgugaacaacacgguguacgacccccugcagcccgagcuggacuccuucaaggaggagcucgacaaguacuucaagaaccacaccagccccgacgucgaccugggggacaucuccggcaucaacgccagcguggugaacauccagaaggagaucgaccgccugaacgaggucgccaagaaccucaacgagucccugaucgaccugcaggagcucgggaaguacgagcaguacaucaaguggccgugguacaucuggcugggcuucaucgccggccugaucgcgaucgugauggugaccaucaugcucugcugcaugaccagcugcugcuccugccugaaggggugcugcagcugcggcuccugcugcaaguucgacgaggacgacagcgagcccguccugaagggggugaagcuccacuacacgugaggacuagucccuguucccagagcccacuuuuuuuucuuuuuuugaaauaaaauagccugucuuucagaucucaaaggcucuuuucagagccaccaaaaaaaaaaaaaaaaaaaaaaaaaaaaaaaaaaaaaaaaaaaaaaaaaaaaaaaaaaaaaaaaaaaaaaaaaaaaaaaaaaaaaaaaaaaaaaaaaaaaa

SEQ ID NO: 12348 - RNA, 4094 nt, Artificial Sequence
  SARS-CoV-2/Wuhan/WIV05/2019__EPI_ISL_402128 spike protein mRNA gc (1-1273)(F970C_G999C)
aggagagucccgcagucggcguccagcggcucugcuuguucgugugugugucguugcaggccuuauucaagcuuaccauguucguguuccugguccuccugccccuggugagcucccagugcgugaaccucaccacccgcacgcagcugccgcccgccuacaccaacagcuucacccggggcgucuacuaccccgacaagguguuccgcuccagcgugcugcacuccacccaggaccucuuccugcccuucuucagcaacgucacgugguuccacgccauccacguguccgggaccaacggcaccaagcgguucgacaacccggugcugcccuucaacgacggggucuacuucgcgagcaccgagaaguccaacaucauccgcggcuggaucuucgggacgacccucgacagcaagacccagucccugcugaucgugaacaacgccaccaacguggucaucaaggugugcgaguuccaguucugcaacgaccccuuccucggcguguacuaccacaagaacaacaagagcuggauggaguccgaguuccgggucuacagcuccgccaacaacugcacguucgaguacgugagccagcccuuccugauggaccuggagggcaagcaggggaacuucaagaaccuccgcgaguucguguucaagaacaucgacggcuacuucaagaucuacuccaagcacaccccgaucaaccugguccgggaccugccccagggguucagcgcccucgagccccugguggaccugcccaucggcaucaacaucacccgcuuccagacccuccuggcccugcaccgguccuaccucacgccgggggacagcagcuccggcuggaccgcgggcgccgccgccuacuacgugggguaccugcagccccgcaccuuccugcucaaguacaacgagaacggcaccaucacggacgcggucgacugcgcccuggacccccugagcgagaccaagugcacccucaaguccuucaccguggagaaggggaucuaccagacgagcaacuuccgggugcagcccaccgaguccaucguccgcuucccgaacaucaccaaccugugccccuucggcgagguguucaacgccacccgguucgccagcgucuacgccuggaaccgcaagcggaucuccaacugcguggcggacuacagcgugcuguacaacuccgccagcuucuccacguucaagugcuacggcgucagccccaccaagcucaacgaccugugcuucaccaacguguacgccgacuccuucgugauccgcggggacgagguccggcagaucgcccccggccagaccgggaagaucgccgacuacaacuacaagcugccggacgacuucacgggcugcgugaucgcguggaacagcaacaaccucgacuccaaggucgggggcaacuacaacuaccuguaccgccuguuccgcaagagcaaccucaagcccuucgagcgggacaucuccaccgagaucuaccaggccggcagcacccccugcaacgggguggagggcuucaacugcuacuucccccugcaguccuacggguuccagccgaccaacggcgugggguaccagcccuaccggguggucgugcugagcuucgagcuccugcacgcccccgccacggugugcggccccaagaaguccaccaaccuggucaagaacaagugcgugaacuucaacuucaacggccucaccgggaccggcgugcugaccgagagcaacaagaaguuccugccguuccagcaguucgggcgcgacaucgccgacacgaccgacgcgguccgcgacccccagacccuggagauccucgacaucacccccugcagcuucggcgggguguccgugaucacgccgggcaccaacaccagcaaccaggucgccgugcuguaccaggacgugaacugcaccgagguccccguggccauccacgccgaccagcugacgcccaccuggcggguguacuccaccggcagcaacgucuuccagacccgcgccgggugccucaucggcgcggagcacgugaacaacuccuacgagugcgacauccccaucggggccggcaucugcgccagcuaccagacgcagaccaacuccccgcggcgcgcccggagcguggcgucccagagcaucaucgccuacaccaugucccugggcgccgagaacagcgucgccuacuccaacaacagcaucgccauccccaccaacuucacgaucuccgugaccaccgagauccugcccgugagcaugaccaagacgagcgucgacugcaccauguacaucugcggggacuccaccgagugcagcaaccuccugcugcaguacggcuccuucugcacccagcucaaccgcgcgcugacggggaucgccguggagcaggacaagaacacccaggagguguucgcccaggucaagcagaucuacaagacgcccccgaucaaggacuucggcggguucaacuucagccagauccugcccgaccccuccaagcccagcaagcgguccuucaucgaggaccuccuguucaacaaggugacccuggccgacgccggcuucaucaagcaguacggcgacugccucggggacaucgcggcccgcgaccugaucugcgcccagaaguucaacggccugaccgugcucccgccccugcugaccgacgagaugaucgcccaguacaccagcgcccuccuggcggggaccaucacguccggcuggaccuucggggccggcgccgcccugcagauccccuucgcgaugcagauggccuaccgguucaacggcaucggggucacccagaacgugcucuacgagaaccagaagcugaucgccaaccaguucaacagcgccaucggcaagauccaggacucccugagcuccaccgccagcgcgcucgggaagcugcaggacguggucaaccagaacgcccaggcccugaacacgcucgugaagcagcuguccagcaacugcggcgccaucuccagcgugcugaacgacauccucucccgccuggacaaggucgaggccgaggugcagaucgaccggcugaucaccugucgccuccagagccugcagaccuacgugacccagcagcugauccgggcggccgagauccgcgccagcgccaaccucgccgcgaccaagauguccgagugcguccugggccagagcaagcggguggacuucugcggcaagggguaccaccugauguccuucccccagagcgccccgcacggcguggucuuccuccacgugacguacguccccgcccaggagaagaacuucaccaccgcccccgcgaucugccacgacgggaaggcccacuucccccgcgagggcguguucguguccaacgggacccacugguucgucacgcagcggaacuucuacgagccgcagaucaucaccaccgacaacaccuucgugagcggcaacugcgacguggucaucggcaucgugaacaacacgguguacgacccccugcagcccgagcuggacuccuucaaggaggagcucgacaaguacuucaagaaccacaccagccccgacgucgaccugggggacaucuccggcaucaacgccagcguggugaacauccagaaggagaucgaccgccugaacgaggucgccaagaaccucaacgagucccugaucgaccugcaggagcucgggaaguacgagcaguacaucaaguggccgugguacaucuggcugggcuucaucgccggccugaucgcgaucgugauggugaccaucaugcucugcugcaugaccagcugcugcuccugccugaaggggugcugcagcugcggcuccugcugcaaguucgacgaggacgacagcgagcccguccugaagggggugaagcuccacuacacgugaggacuagucccuguucccagagcccacuuuuuuuucuuuuuuugaaauaaaauagccugucuuucagaucucaaaggcucuuuucagagccaccaaaaaaaaaaaaaaaaaaaaaaaaaaaaaaaaaaaaaaaaaaaaaaaaaaaaaaaaaaaaaaaaaaaaaaaaaaaaaaaaaaaaaaaaaaaaaaaaaaaaa

SEQ ID NO: 12349 - RNA, 4094 nt, Artificial Sequence
  SARS-CoV-2/Wuhan/WIV05/2019__EPI_ISL_402128 spike protein mRNA gc (1-1273)(A972C_R995C)
aggagagucccgcagucggcguccagcggcucugcuuguucgugugugugucguugcaggccuuauucaagcuuaccauguucguguuccugguccuccugccccuggugagcucccagugcgugaaccucaccacccgcacgcagcugccgcccgccuacaccaacagcuucacccggggcgucuacuaccccgacaagguguuccgcuccagcgugcugcacuccacccaggaccucuuccugcccuucuucagcaacgucacgugguuccacgccauccacguguccgggaccaacggcaccaagcgguucgacaacccggugcugcccuucaacgacggggucuacuucgcgagcaccgagaaguccaacaucauccgcggcuggaucuucgggacgacccucgacagcaagacccagucccugcugaucgugaacaacgccaccaacguggucaucaaggugugcgaguuccaguucugcaacgaccccuuccucggcguguacuaccacaagaacaacaagagcuggauggaguccgaguuccgggucuacagcuccgccaacaacugcacguucgaguacgugagccagcccuuccugauggaccuggagggcaagcaggggaacuucaagaaccuccgcgaguucguguucaagaacaucgacggcuacuucaagaucuacuccaagcacaccccgaucaaccugguccgggaccugccccagggguucagcgcccucgagccccugguggaccugcccaucggcaucaacaucacccgcuuccagacccuccuggcccugcaccgguccuaccucacgccgggggacagcagcuccggcuggaccgcgggcgccgccgccuacuacgugggguaccugcagccccgcaccuuccugcucaaguacaacgagaacggcaccaucacggacgcggucgacugcgcccuggacccccugagcgagaccaagugcacccucaaguccuucaccguggagaaggggaucuaccagacgagcaacuuccgggugcagcccaccgaguccaucguccgcuucccgaacaucaccaaccugugccccuucggcgagguguucaacgccacccgguucgccagcgucuacgccuggaaccgcaagcggaucuccaacugcguggcggacuacagcgugcuguacaacuccgccagcuucuccacguucaagugcuacggcgucagccccaccaagcucaacgaccugugcuucaccaacguguacgccgacuccuucgugauccgcggggacgagguccggcagaucgcccccggccagaccgggaagaucgccgacuacaacuacaagcugccggacgacuucacgggcugcgugaucgcguggaacagcaacaaccucgacuccaaggucgggggcaacuacaacuaccuguaccgccuguuccgcaagagcaaccucaagcccuucgagcgggacaucuccaccgagaucuaccaggccggcagcacccccugcaacgggguggagggcuucaacugcuacuucccccugcaguccuacggguuccagccgaccaacggcgugggguaccagcccuaccggguggucgugcugagcuucgagcuccugcacgcccccgccacggugugcggccccaagaaguccaccaaccuggucaagaacaagugcgugaacuucaacuucaacggccucaccgggaccggcgugcugaccgagagcaacaagaaguuccugccguuccagcaguucgggcgcgacaucgccgacacgaccgacgcgguccgcgacccccagacccuggagauccucgacaucacccccugcagcuucggcgggguguccgugaucacgccgggcaccaacaccagcaaccaggucgccgugcuguaccaggacgugaacugcaccgagguccccguggccauccacgccgaccagcugacgcccaccuggcggguguacuccaccggcagcaacgucuuccagacccgcgccgggugccucaucggcgcggagcacgugaacaacuccuacgagugcgacauccccaucggggccggcaucugcgccagcuaccagacgcagaccaacuccccgcggcgcgcccggagcguggcgucccagagcaucaucgccuacaccaugucccugggcgccgagaacagcgucgccuacuccaacaacagcaucgccauccccaccaacuucacgaucuccgugaccaccgagauccugcccgugagcaugaccaagacgagcgucgacugcaccauguacaucugcggggacuccaccgagugcagcaaccuccugcugcaguacggcuccuucugcacccagcucaaccgcgcgcugacggggaucgccguggagcaggacaagaacacccaggagguguucgcccaggucaagcagaucuacaagacgcccccgaucaaggacuucggcggguucaacuucagccagauccugcccgaccccuccaagcccagcaagcgguccuucaucgaggaccuccuguucaacaaggugacccuggccgacgccggcuucaucaagcaguacggcgacugccucggggacaucgcggcccgcgaccugaucugcgcccagaaguucaacggccugaccgugcucccgccccugcugaccgacgagaugaucgcccaguacaccagcgcccuccuggcggggaccaucacguccggcuggaccuucggggccggcgccgcccugcagauccccuucgcgaugcagauggccuaccgguucaacggcaucggggucacccagaacgugcucuacgagaaccagaagcugaucgccaaccaguucaacagcgccaucggcaagauccaggacucccugagcuccaccgccagcgcgcucgggaagcugcaggacguggucaaccagaacgcccaggcccugaacacgcucgugaagcagcuguccagcaacuucggcugcaucuccagcgugcugaacgacauccucucccgccuggacaaggucgaggccgaggugcagaucgacugccugaucaccgggcgccuccagagccugcagaccuacgugacccagcagcugauccgggcggccgagauccgcgccagcgccaaccucgccgcgaccaagauguccgagugcguccugggccagagcaagcggguggacuucugcggcaagggguaccaccugauguccuucccccagagcgccccgcacggcguggucuuccuccacgugacguacguccccgcccaggagaagaacuucaccaccgcccccgcgaucugccacgacgggaaggcccacuucccccgcgagggcguguucguguccaacgggacccacugguucgucacgcagcggaacuucuacgagccgcagaucaucaccaccgacaacaccuucgugagcggcaacugcgacguggucaucggcaucgugaacaacacgguguacgacccccugcagcccgagcuggacuccuucaaggaggagcucgacaaguacuucaagaaccacaccagccccgacgucgaccugggggacaucuccggcaucaacgccagcguggugaacauccagaaggagaucgaccgccugaacgaggucgccaagaaccucaacgagucccugaucgaccugcaggagcucgggaaguacgagcaguacaucaaguggccgugguacaucuggcugggcuucaucgccggccugaucgcgaucgugauggugaccaucaugcucugcugcaugaccagcugcugcuccugccugaaggggugcugcagcugcggcuccugcugcaaguucgacgaggacgacagcgagcccguccugaagggggugaagcuccacuacacgugaggacuagucccuguucccagagcccacuuuuuuuucuuuuuuugaaauaaaauagccugucuuucagaucucaaaggcucuuuucagagccaccaaaaaaaaaaaaaaaaaaaaaaaaaaaaaaaaaaaaaaaaaaaaaaaaaaaaaaaaaaaaaaaaaaaaaaaaaaaaaaaaaaaaaaaaaaaaaaaaaaaaa

SEQ ID NO: 12350 - RNA, 4094 nt, Artificial Sequence
  SARS-CoV-2/Wuhan/WIV05/2019__EPI_ISL_402128 spike protein mRNA gc (1-1273)(A890C_V1040C)
aggagagucccgcagucggcguccagcggcucugcuuguucgugugugugucguugcaggccuuauucaagcuuaccauguucguguuccugguccuccugccccuggugagcucccagugcgugaaccucaccacccgcacgcagcugccgcccgccuacaccaacagcuucacccggggcgucuacuaccccgacaagguguuccgcuccagcgugcugcacuccacccaggaccucuuccugcccuucuucagcaacgucacgugguuccacgccauccacguguccgggaccaacggcaccaagcgguucgacaacccggugcugcccuucaacgacggggucuacuucgcgagcaccgagaaguccaacaucauccgcggcuggaucuucgggacgacccucgacagcaagacccagucccugcugaucgugaacaacgccaccaacguggucaucaaggugugcgaguuccaguucugcaacgaccccuuccucggcguguacuaccacaagaacaacaagagcuggauggaguccgaguuccgggucuacagcuccgccaacaacugcacguucgaguacgugagccagcccuuccugauggaccuggagggcaagcaggggaacuucaagaaccuccgcgaguucguguucaagaacaucgacggcuacuucaagaucuacuccaagcacaccccgaucaaccugguccgggaccugccccagggguucagcgcccucgagccccugguggaccugcccaucggcaucaacaucacccgcuuccagacccuccuggcccugcaccgguccuaccucacgccgggggacagcagcuccggcuggaccgcgggcgccgccgccuacuacgugggguaccugcagccccgcaccuuccugcucaaguacaacgagaacggcaccaucacggacgcggucgacugcgcccuggacccccugagcgagaccaagugcacccucaaguccuucaccguggagaaggggaucuaccagacgagcaacuuccgggugcagcccaccgaguccaucguccgcuucccgaacaucaccaaccugugccccuucggcgagguguucaacgccacccgguucgccagcgucuacgccuggaaccgcaagcggaucuccaacugcguggcggacuacagcgugcuguacaacuccgccagcuucuccacguucaagugcuacggcgucagccccaccaagcucaacgaccugugcuucaccaacguguacgccgacuccuucgugauccgcggggacgagguccggcagaucgcccccggccagaccgggaagaucgccgacuacaacuacaagcugccggacgacuucacgggcugcgugaucgcguggaacagcaacaaccucgacuccaaggucgggggcaacuacaacuaccuguaccgccuguuccgcaagagcaaccucaagcccuucgagcgggacaucuccaccgagaucuaccaggccggcagcacccccugcaacgggguggagggcuucaacugcuacuucccccugcaguccuacggguuccagccgaccaacggcgugggguaccagcccuaccggguggucgugcugagcuucgagcuccugcacgcccccgccacggugugcggccccaagaaguccaccaaccuggucaagaacaagugcgugaacuucaacuucaacggccucaccgggaccggcgugcugaccgagagcaacaagaaguuccugccguuccagcaguucgggcgcgacaucgccgacacgaccgacgcgguccgcgacccccagacccuggagauccucgacaucacccccugcagcuucggcgggguguccgugaucacgccgggcaccaacaccagcaaccaggucgccgugcuguaccaggacgugaacugcaccgagguccccguggccauccacgccgaccagcugacgcccaccuggcggguguacuccaccggcagcaacgucuuccagacccgcgccgggugccucaucggcgcggagcacgugaacaacuccuacgagugcgacauccccaucggggccggcaucugcgccagcuaccagacgcagaccaacuccccgcggcgcgcccggagcguggcgucccagagcaucaucgccuacaccaugucccugggcgccgagaacagcgucgccuacuccaacaacagcaucgccauccccaccaacuucacgaucuccgugaccaccgagauccugcccgugagcaugaccaagacgagcgucgacugcaccauguacaucugcggggacuccaccgagugcagcaaccuccugcugcaguacggcuccuucugcacccagcucaaccgcgcgcugacggggaucgccguggagcaggacaagaacacccaggagguguucgcccaggucaagcagaucuacaagacgcccccgaucaaggacuucggcggguucaacuucagccagauccugcccgaccccuccaagcccagcaagcgguccuucaucgaggaccuccuguucaacaaggugacccuggccgacgccggcuucaucaagcaguacggcgacugccucggggacaucgcggcccgcgaccugaucugcgcccagaaguucaacggccugaccgugcucccgccccugcugaccgacgagaugaucgcccaguacaccagcgcccuccuggcggggaccaucacguccggcuggaccuucgggugcggcgccgcccugcagauccccuucgcgaugcagauggccuaccgguucaacggcaucggggucacccagaacgugcucuacgagaaccagaagcugaucgccaaccaguucaacagcgccaucggcaagauccaggacucccugagcuccaccgccagcgcgcucgggaagcugcaggacguggucaaccagaacgcccaggcccugaacacgcucgugaagcagcuguccagcaacuucggcgccaucuccagcgugcugaacgacauccucucccgccuggacaaggucgaggccgaggugcagaucgaccggcugaucaccgggcgccuccagagccugcagaccuacgugacccagcagcugauccgggcggccgagauccgcgccagcgccaaccucgccgcgaccaagauguccgagugcguccugggccagagcaagcggugcgacuucugcggcaagggguaccaccugauguccuucccccagagcgccccgcacggcguggucuuccuccacgugacguacguccccgcccaggagaagaacuucaccaccgcccccgcgaucugccacgacgggaaggcccacuucccccgcgagggcguguucguguccaacgggacccacugguucgucacgcagcggaacuucuacgagccgcagaucaucaccaccgacaacaccuucgugagcggcaacugcgacguggucaucggcaucgugaacaacacgguguacgacccccugcagcccgagcuggacuccuucaaggaggagcucgacaaguacuucaagaaccacaccagccccgacgucgaccugggggacaucuccggcaucaacgccagcguggugaacauccagaaggagaucgaccgccugaacgaggucgccaagaaccucaacgagucccugaucgaccugcaggagcucgggaaguacgagcaguacaucaaguggccgugguacaucuggcugggcuucaucgccggccugaucgcgaucgugauggugaccaucaugcucugcugcaugaccagcugcugcuccugccugaaggggugcugcagcugcggcuccugcugcaaguucgacgaggacgacagcgagcccguccugaagggggugaagcuccacuacacgugaggacuagucccuguucccagagcccacuuuuuuuucuuuuuuugaaauaaaauagccugucuuucagaucucaaaggcucuuuucagagccaccaaaaaaaaaaaaaaaaaaaaaaaaaaaaaaaaaaaaaaaaaaaaaaaaaaaaaaaaaaaaaaaaaaaaaaaaaaaaaaaaaaaaaaaaaaaaaaaaaaaaa

SEQ ID NO: 12351 - RNA, 4094 nt, Artificial Sequence
  SARS-CoV-2/Wuhan/WIV05/2019__EPI_ISL_402128 spike protein mRNA gc (1-1273)(T874C_S1055C)
aggagagucccgcagucggcguccagcggcucugcuuguucgugugugugucguugcaggccuuauucaagcuuaccauguucguguuccugguccuccugccccuggugagcucccagugcgugaaccucaccacccgcacgcagcugccgcccgccuacaccaacagcuucacccggggcgucuacuaccccgacaagguguuccgcuccagcgugcugcacuccacccaggaccucuuccugcccuucuucagcaacgucacgugguuccacgccauccacguguccgggaccaacggcaccaagcgguucgacaacccggugcugcccuucaacgacggggucuacuucgcgagcaccgagaaguccaacaucauccgcggcuggaucuucgggacgacccucgacagcaagacccagucccugcugaucgugaacaacgccaccaacguggucaucaaggugugcgaguuccaguucugcaacgaccccuuccucggcguguacuaccacaagaacaacaagagcuggauggaguccgaguuccgggucuacagcuccgccaacaacugcacguucgaguacgugagccagcccuuccugauggaccuggagggcaagcaggggaacuucaagaaccuccgcgaguucguguucaagaacaucgacggcuacuucaagaucuacuccaagcacaccccgaucaaccugguccgggaccugccccagggguucagcgcccucgagccccugguggaccugcccaucggcaucaacaucacccgcuuccagacccuccuggcccugcaccgguccuaccucacgccgggggacagcagcuccggcuggaccgcgggcgccgccgccuacuacgugggguaccugcagccccgcaccuuccugcucaaguacaacgagaacggcaccaucacggacgcggucgacugcgcccuggacccccugagcgagaccaagugcacccucaaguccuucaccguggagaaggggaucuaccagacgagcaacuuccgggugcagcccaccgaguccaucguccgcuucccgaacaucaccaaccugugccccuucggcgagguguucaacgccacccgguucgccagcgucuacgccuggaaccgcaagcggaucuccaacugcguggcggacuacagcgugcuguacaacuccgccagcuucuccacguucaagugcuacggcgucagccccaccaagcucaacgaccugugcuucaccaacguguacgccgacuccuucgugauccgcggggacgagguccggcagaucgcccccggccagaccgggaagaucgccgacuacaacuacaagcugccggacgacuucacgggcugcgugaucgcguggaacagcaacaaccucgacuccaaggucgggggcaacuacaacuaccuguaccgccuguuccgcaagagcaaccucaagcccuucgagcgggacaucuccaccgagaucuaccaggccggcagcacccccugcaacgggguggagggcuucaacugcuacuucccccugcaguccuacggguuccagccgaccaacggcgugggguaccagcccuaccggguggucgugcugagcuucgagcuccugcacgcccccgccacggugugcggccccaagaaguccaccaaccuggucaagaacaagugcgugaacuucaacuucaacggccucaccgggaccggcgugcugaccgagagcaacaagaaguuccugccguuccagcaguucgggcgcgacaucgccgacacgaccgacgcgguccgcgacccccagacccuggagauccucgacaucacccccugcagcuucggcgggguguccgugaucacgccgggcaccaacaccagcaaccaggucgccgugcuguaccaggacgugaacugcaccgagguccccguggccauccacgccgaccagcugacgcccaccuggcggguguacuccaccggcagcaacgucuuccagacccgcgccgggugccucaucggcgcggagcacgugaacaacuccuacgagugcgacauccccaucggggccggcaucugcgccagcuaccagacgcagaccaacuccccgcggcgcgcccggagcguggcgucccagagcaucaucgccuacaccaugucccugggcgccgagaacagcgucgccuacuccaacaacagcaucgccauccccaccaacuucacgaucuccgugaccaccgagauccugcccgugagcaugaccaagacgagcgucgacugcaccauguacaucugcggggacuccaccgagugcagcaaccuccugcugcaguacggcuccuucugcacccagcucaaccgcgcgcugacggggaucgccguggagcaggacaagaacacccaggagguguucgcccaggucaagcagaucuacaagacgcccccgaucaaggacuucggcggguucaacuucagccagauccugcccgaccccuccaagcccagcaagcgguccuucaucgaggaccuccuguucaacaaggugacccuggccgacgccggcuucaucaagcaguacggcgacugccucggggacaucgcggcccgcgaccugaucugcgcccagaaguucaacggccugaccgugcucccgccccugcugaccgacgagaugaucgcccaguacugcagcgcccuccuggcggggaccaucacguccggcuggaccuucggggccggcgccgcccugcagauccccuucgcgaugcagauggccuaccgguucaacggcaucggggucacccagaacgugcucuacgagaaccagaagcugaucgccaaccaguucaacagcgccaucggcaagauccaggacucccugagcuccaccgccagcgcgcucgggaagcugcaggacguggucaaccagaacgcccaggcccugaacacgcucgugaagcagcuguccagcaacuucggcgccaucuccagcgugcugaacgacauccucucccgccuggacaaggucgaggccgaggugcagaucgaccggcugaucaccgggcgccuccagagccugcagaccuacgugacccagcagcugauccgggcggccgagauccgcgccagcgccaaccucgccgcgaccaagauguccgagugcguccugggccagagcaagcggguggacuucugcggcaagggguaccaccugauguccuucccccagugcgccccgcacggcguggucuuccuccacgugacguacguccccgcccaggagaagaacuucaccaccgcccccgcgaucugccacgacgggaaggcccacuucccccgcgagggcguguucguguccaacgggacccacugguucgucacgcagcggaacuucuacgagccgcagaucaucaccaccgacaacaccuucgugagcggcaacugcgacguggucaucggcaucgugaacaacacgguguacgacccccugcagcccgagcuggacuccuucaaggaggagcucgacaaguacuucaagaaccacaccagccccgacgucgaccugggggacaucuccggcaucaacgccagcguggugaacauccagaaggagaucgaccgccugaacgaggucgccaagaaccucaacgagucccugaucgaccugcaggagcucgggaaguacgagcaguacaucaaguggccgugguacaucuggcugggcuucaucgccggccugaucgcgaucgugauggugaccaucaugcucugcugcaugaccagcugcugcuccugccugaaggggugcugcagcugcggcuccugcugcaaguucgacgaggacgacagcgagcccguccugaagggggugaagcuccacuacacgugaggacuagucccuguucccagagcccacuuuuuuuucuuuuuuugaaauaaaauagccugucuuucagaucucaaaggcucuuuucagagccaccaaaaaaaaaaaaaaaaaaaaaaaaaaaaaaaaaaaaaaaaaaaaaaaaaaaaaaaaaaaaaaaaaaaaaaaaaaaaaaaaaaaaaaaaaaaaaaaaaaaaa

SEQ ID NO: 12352 - RNA, 2318 nt, Artificial Sequence; identical to SEQ ID NO: 152
  SARS-CoV-2/Wuhan/WIV05/2019__EPI_ISL_402128 spike protein mRNA gc (1-681) R9489, R9493

SEQ ID NO: 12353 - RNA, 4388 nt, Artificial Sequence
  SARS-CoV-2/Wuhan/WIV05/2019__EPI_ISL_402128 spike protein mRNA gc (1-1211) LumSynth construct
aggagagucccgcagucggcguccagcggcucugcuuguucgugugugugucguugcaggccuuauucaagcuuaccauguucguguuccugguccuccugccccuggugagcucccagugcgugaaccucaccacccgcacgcagcugccgcccgccuacaccaacagcuucacccggggcgucuacuaccccgacaagguguuccgcuccagcgugcugcacuccacccaggaccucuuccugcccuucuucagcaacgucacgugguuccacgccauccacguguccgggaccaacggcaccaagcgguucgacaacccggugcugcccuucaacgacggggucuacuucgcgagcaccgagaaguccaacaucauccgcggcuggaucuucgggacgacccucgacagcaagacccagucccugcugaucgugaacaacgccaccaacguggucaucaaggugugcgaguuccaguucugcaacgaccccuuccucggcguguacuaccacaagaacaacaagagcuggauggaguccgaguuccgggucuacagcuccgccaacaacugcacguucgaguacgugagccagcccuuccugauggaccuggagggcaagcaggggaacuucaagaaccuccgcgaguucguguucaagaacaucgacggcuacuucaagaucuacuccaagcacaccccgaucaaccugguccgggaccugccccagggguucagcgcccucgagccccugguggaccugcccaucggcaucaacaucacccgcuuccagacccuccuggcccugcaccgguccuaccucacgccgggggacagcagcuccggcuggaccgcgggcgccgccgccuacuacgugggguaccugcagccccgcaccuuccugcucaaguacaacgagaacggcaccaucacggacgcggucgacugcgcccuggacccccugagcgagaccaagugcacccucaaguccuucaccguggagaaggggaucuaccagacgagcaacuuccgggugcagcccaccgaguccaucguccgcuucccgaacaucaccaaccugugccccuucggcgagguguucaacgccacccgguucgccagcgucuacgccuggaaccgcaagcggaucuccaacugcguggcggacuacagcgugcuguacaacuccgccagcuucuccacguucaagugcuacggcgucagccccaccaagcucaacgaccugugcuucaccaacguguacgccgacuccuucgugauccgcggggacgagguccggcagaucgcccccggccagaccgggaagaucgccgacuacaacuacaagcugccggacgacuucacgggcugcgugaucgcguggaacagcaacaaccucgacuccaaggucgggggcaacuacaacuaccuguaccgccuguuccgcaagagcaaccucaagcccuucgagcgggacaucuccaccgagaucuaccaggccggcagcacccccugcaacgggguggagggcuucaacugcuacuucccccugcaguccuacggguuccagccgaccaacggcgugggguaccagcccuaccggguggucgugcugagcuucgagcuccugcacgcccccgccacggugugcggccccaagaaguccaccaaccuggucaagaacaagugcgugaacuucaacuucaacggccucaccgggaccggcgugcugaccgagagcaacaagaaguuccugccguuccagcaguucgggcgcgacaucgccgacacgaccgacgcgguccgcgacccccagacccuggagauccucgacaucacccccugcagcuucggcgggguguccgugaucacgccgggcaccaacaccagcaaccaggucgccgugcuguaccaggacgugaacugcaccgagguccccguggccauccacgccgaccagcugacgcccaccuggcggguguacuccaccggcagcaacgucuuccagacccgcgccgggugccucaucggcgcggagcacgugaacaacuccuacgagugcgacauccccaucggggccggcaucugcgccagcuaccagacgcagaccaacuccccgcggcgcgcccggagcguggcgucccagagcaucaucgccuacaccaugucccugggcgccgagaacagcgucgccuacuccaacaacagcaucgccauccccaccaacuucacgaucuccgugaccaccgagauccugcccgugagcaugaccaagacgagcgucgacugcaccauguacaucugcggggacuccaccgagugcagcaaccuccugcugcaguacggcuccuucugcacccagcucaaccgcgcgcugacggggaucgccguggagcaggacaagaacacccaggagguguucgcccaggucaagcagaucuacaagacgcccccgaucaaggacuucggcggguucaacuucagccagauccugcccgaccccuccaagcccagcaagcgguccuucaucgaggaccuccuguucaacaaggugacccuggccgacgccggcuucaucaagcaguacggcgacugccucggggacaucgcggcccgcgaccugaucugcgcccagaaguucaacggccugaccgugcucccgccccugcugaccgacgagaugaucgcccaguacaccagcgcccuccuggcggggaccaucacguccggcuggaccuucggggccggcgccgcccugcagauccccuucgcgaugcagauggccuaccgguucaacggcaucggggucacccagaacgugcucuacgagaaccagaagcugaucgccaaccaguucaacagcgccaucggcaagauccaggacucccugagcuccaccgccagcgcgcucgggaagcugcaggacguggucaaccagaacgcccaggcccugaacacgcucgugaagcagcuguccagcaacuucggcgccaucuccagcgugcugaacgacauccucucccgccuggacaaggucgaggccgaggugcagaucgaccggcugaucaccgggcgccuccagagccugcagaccuacgugacccagcagcugauccgggcggccgagauccgcgccagcgccaaccucgccgcgaccaagauguccgagugcguccugggccagagcaagcggguggacuucugcggcaagggguaccaccugauguccuucccccagagcgccccgcacggcguggucuuccuccacgugacguacguccccgcccaggagaagaacuucaccaccgcccccgcgaucugccacgacgggaaggcccacuucccccgcgagggcguguucguguccaacgggacccacugguucgucacgcagcggaacuucuacgagccgcagaucaucaccaccgacaacaccuucgugagcggcaacugcgacguggucaucggcaucgugaacaacacgguguacgacccccugcagcccgagcuggacuccuucaaggaggagcucgacaaguacuucaagaaccacaccagccccgacgucgaccugggggacaucuccggcaucaacgccagcguggugaacauccagaaggagaucgaccgccugaacgaggucgccaagaaccucaacgagucccugaucgaccugcaggagcucgggaaguacgagcaguacaucaagggcggcgggagcgggggcgggcagaucuacgagggcaagcugaccgccgaggggcuccgcuucggcaucguggccagccgguucaaccacgcgcuggucgaccgccugguggagggggccaucgacgccaucgugcggcacggcgggcgcgaggaggacaucacccucguccgggugcccggcuccugggagaucccgguggccgccggcgagcuggcccgcaaggaggacaucgacgcggucaucgccaucggggugcugauccggggcgccacgccccacuucgacuacaucgccagcgagguguccaaggggcucgcggaccugagccuggagcuccgcaagcccaucaccuucggcgucaucaccgccgacacccuggagcaggccaucgagcgggccgggacgaagcacggcaacaagggcugggaggccgcgcuguccgccaucgagauggccaaccucuucaagagccugcgcugaggacuagucccuguucccagagcccacuuuuuuuucuuuuuuugaaauaaaauagccugucuuucagaucucaaaggcucuuuucagagccaccaaaaaaaaaaaaaaaaaaaaaaaaaaaaaaaaaaaaaaaaaaaaaaaaaaaaaaaaaaaaaaaaaaaaaaaaaaaaaaaaaaaaaaaaaaaaaaaaaaaaa

SEQ ID NO: 12354 - RNA, 4388 nt, Artificial Sequence
  SARS-CoV-2/Wuhan/WIV05/2019__EPI_ISL_402128 spike protein mRNA gc (1-1211)(K986P_V987P) LumSynth construct
aggagagucccgcagucggcguccagcggcucugcuuguucgugugugugucguugcaggccuuauucaagcuuaccauguucguguuccugguccuccugccccuggugagcucccagugcgugaaccucaccacccgcacgcagcugccgcccgccuacaccaacagcuucacccggggcgucuacuaccccgacaagguguuccgcuccagcgugcugcacuccacccaggaccucuuccugcccuucuucagcaacgucacgugguuccacgccauccacguguccgggaccaacggcaccaagcgguucgacaacccggugcugcccuucaacgacggggucuacuucgcgagcaccgagaaguccaacaucauccgcggcuggaucuucgggacgacccucgacagcaagacccagucccugcugaucgugaacaacgccaccaacguggucaucaaggugugcgaguuccaguucugcaacgaccccuuccucggcguguacuaccacaagaacaacaagagcuggauggaguccgaguuccgggucuacagcuccgccaacaacugcacguucgaguacgugagccagcccuuccugauggaccuggagggcaagcaggggaacuucaagaaccuccgcgaguucguguucaagaacaucgacggcuacuucaagaucuacuccaagcacaccccgaucaaccugguccgggaccugccccagggguucagcgcccucgagccccugguggaccugcccaucggcaucaacaucacccgcuuccagacccuccuggcccugcaccgguccuaccucacgccgggggacagcagcuccggcuggaccgcgggcgccgccgccuacuacgugggguaccugcagccccgcaccuuccugcucaaguacaacgagaacggcaccaucacggacgcggucgacugcgcccuggacccccugagcgagaccaagugcacccucaaguccuucaccguggagaaggggaucuaccagacgagcaacuuccgggugcagcccaccgaguccaucguccgcuucccgaacaucaccaaccugugccccuucggcgagguguucaacgccacccgguucgccagcgucuacgccuggaaccgcaagcggaucuccaacugcguggcggacuacagcgugcuguacaacuccgccagcuucuccacguucaagugcuacggcgucagccccaccaagcucaacgaccugugcuucaccaacguguacgccgacuccuucgugauccgcggggacgagguccggcagaucgcccccggccagaccgggaagaucgccgacuacaacuacaagcugccggacgacuucacgggcugcgugaucgcguggaacagcaacaaccucgacuccaaggucgggggcaacuacaacuaccuguaccgccuguuccgcaagagcaaccucaagcccuucgagcgggacaucuccaccgagaucuaccaggccggcagcacccccugcaacgggguggagggcuucaacugcuacuucccccugcaguccuacggguuccagccgaccaacggcgugggguaccagcccuaccggguggucgugcugagcuucgagcuccugcacgcccccgccacggugugcggccccaagaaguccaccaaccuggucaagaacaagugcgugaacuucaacuucaacggccucaccgggaccggcgugcugaccgagagcaacaagaaguuccugccguuccagcaguucgggcgcgacaucgccgacacgaccgacgcgguccgcgacccccagacccuggagauccucgacaucacccccugcagcuucggcgggguguccgugaucacgccgggcaccaacaccagcaaccaggucgccgugcuguaccaggacgugaacugcaccgagguccccguggccauccacgccgaccagcugacgcccaccuggcggguguacuccaccggcagcaacgucuuccagacccgcgccgggugccucaucggcgcggagcacgugaacaacuccuacgagugcgacauccccaucggggccggcaucugcgccagcuaccagacgcagaccaacuccccgcggcgcgcccggagcguggcgucccagagcaucaucgccuacaccaugucccugggcgccgagaacagcgucgccuacuccaacaacagcaucgccauccccaccaacuucacgaucuccgugaccaccgagauccugcccgugagcaugaccaagacgagcgucgacugcaccauguacaucugcggggacuccaccgagugcagcaaccuccugcugcaguacggcuccuucugcacccagcucaaccgcgcgcugacggggaucgccguggagcaggacaagaacacccaggagguguucgcccaggucaagcagaucuacaagacgcccccgaucaaggacuucggcggguucaacuucagccagauccugcccgaccccuccaagcccagcaagcgguccuucaucgaggaccuccuguucaacaaggugacccuggccgacgccggcuucaucaagcaguacggcgacugccucggggacaucgcggcccgcgaccugaucugcgcccagaaguucaacggccugaccgugcucccgccccugcugaccgacgagaugaucgcccaguacaccagcgcccuccuggcggggaccaucacguccggcuggaccuucggggccggcgccgcccugcagauccccuucgcgaugcagauggccuaccgguucaacggcaucggggucacccagaacgugcucuacgagaaccagaagcugaucgccaaccaguucaacagcgccaucggcaagauccaggacucccugagcuccaccgccagcgcgcucgggaagcugcaggacguggucaaccagaacgcccaggcccugaacacgcucgugaagcagcuguccagcaacuucggcgccaucuccagcgugcugaacgacauccucucccgccuggacccgcccgaggccgaggugcagaucgaccggcugaucaccgggcgccuccagagccugcagaccuacgugacccagcagcugauccgggcggccgagauccgcgccagcgccaaccucgccgcgaccaagauguccgagugcguccugggccagagcaagcggguggacuucugcggcaagggguaccaccugauguccuucccccagagcgccccgcacggcguggucuuccuccacgugacguacguccccgcccaggagaagaacuucaccaccgcccccgcgaucugccacgacgggaaggcccacuucccccgcgagggcguguucguguccaacgggacccacugguucgucacgcagcggaacuucuacgagccgcagaucaucaccaccgacaacaccuucgugagcggcaacugcgacguggucaucggcaucgugaacaacacgguguacgacccccugcagcccgagcuggacuccuucaaggaggagcucgacaaguacuucaagaaccacaccagccccgacgucgaccugggggacaucuccggcaucaacgccagcguggugaacauccagaaggagaucgaccgccugaacgaggucgccaagaaccucaacgagucccugaucgaccugcaggagcucgggaaguacgagcaguacaucaagggcggcgggagcgggggcgggcagaucuacgagggcaagcugaccgccgaggggcuccgcuucggcaucguggccagccgguucaaccacgcgcuggucgaccgccugguggagggggccaucgacgccaucgugcggcacggcgggcgcgaggaggacaucacccucguccgggugcccggcuccugggagaucccgguggccgccggcgagcuggcccgcaaggaggacaucgacgcggucaucgccaucggggugcugauccggggcgccacgccccacuucgacuacaucgccagcgagguguccaaggggcucgcggaccugagccuggagcuccgcaagcccaucaccuucggcgucaucaccgccgacacccuggagcaggccaucgagcgggccgggacgaagcacggcaacaagggcugggaggccgcgcuguccgccaucgagauggccaaccucuucaagagccugcgcugaggacuagucccuguucccagagcccacuuuuuuuucuuuuuuugaaauaaaauagccugucuuucagaucucaaaggcucuuuucagagccaccaaaaaaaaaaaaaaaaaaaaaaaaaaaaaaaaaaaaaaaaaaaaaaaaaaaaaaaaaaaaaaaaaaaaaaaaaaaaaaaaaaaaaaaaaaaaaaaaaaaaa

SEQ ID NO: 12355 - RNA, 4388 nt, Artificial Sequence
  SARS-CoV-2/Wuhan/WIV05/2019__EPI_ISL_402128 spike protein mRNA gc (1-1211)(K986P_V987P_T887WN_A1020W) LumSynth construct
aggagagucccgcagucggcguccagcggcucugcuuguucgugugugugucguugcaggccuuauucaagcuuaccauguucguguuccugguccuccugccccuggugagcucccagugcgugaaccucaccacccgcacgcagcugccgcccgccuacaccaacagcuucacccggggcgucuacuaccccgacaagguguuccgcuccagcgugcugcacuccacccaggaccucuuccugcccuucuucagcaacgucacgugguuccacgccauccacguguccgggaccaacggcaccaagcgguucgacaacccggugcugcccuucaacgacggggucuacuucgcgagcaccgagaaguccaacaucauccgcggcuggaucuucgggacgacccucgacagcaagacccagucccugcugaucgugaacaacgccaccaacguggucaucaaggugugcgaguuccaguucugcaacgaccccuuccucggcguguacuaccacaagaacaacaagagcuggauggaguccgaguuccgggucuacagcuccgccaacaacugcacguucgaguacgugagccagcccuuccugauggaccuggagggcaagcaggggaacuucaagaaccuccgcgaguucguguucaagaacaucgacggcuacuucaagaucuacuccaagcacaccccgaucaaccugguccgggaccugccccagggguucagcgcccucgagccccugguggaccugcccaucggcaucaacaucacccgcuuccagacccuccuggcccugcaccgguccuaccucacgccgggggacagcagcuccggcuggaccgcgggcgccgccgccuacuacgugggguaccugcagccccgcaccuuccugcucaaguacaacgagaacggcaccaucacggacgcggucgacugcgcccuggacccccugagcgagaccaagugcacccucaaguccuucaccguggagaaggggaucuaccagacgagcaacuuccgggugcagcccaccgaguccaucguccgcuucccgaacaucaccaaccugugccccuucggcgagguguucaacgccacccgguucgccagcgucuacgccuggaaccgcaagcggaucuccaacugcguggcggacuacagcgugcuguacaacuccgccagcuucuccacguucaagugcuacggcgucagccccaccaagcucaacgaccugugcuucaccaacguguacgccgacuccuucgugauccgcggggacgagguccggcagaucgcccccggccagaccgggaagaucgccgacuacaacuacaagcugccggacgacuucacgggcugcgugaucgcguggaacagcaacaaccucgacuccaaggucgggggcaacuacaacuaccuguaccgccuguuccgcaagagcaaccucaagcccuucgagcgggacaucuccaccgagaucuaccaggccggcagcacccccugcaacgggguggagggcuucaacugcuacuucccccugcaguccuacggguuccagccgaccaacggcgugggguaccagcccuaccggguggucgugcugagcuucgagcuccugcacgcccccgccacggugugcggccccaagaaguccaccaaccuggucaagaacaagugcgugaacuucaacuucaacggccucaccgggaccggcgugcugaccgagagcaacaagaaguuccugccguuccagcaguucgggcgcgacaucgccgacacgaccgacgcgguccgcgacccccagacccuggagauccucgacaucacccccugcagcuucggcgggguguccgugaucacgccgggcaccaacaccagcaaccaggucgccgugcuguaccaggacgugaacugcaccgagguccccguggccauccacgccgaccagcugacgcccaccuggcggguguacuccaccggcagcaacgucuuccagacccgcgccgggugccucaucggcgcggagcacgugaacaacuccuacgagugcgacauccccaucggggccggcaucugcgccagcuaccagacgcagaccaacuccccgcggcgcgcccggagcguggcgucccagagcaucaucgccuacaccaugucccugggcgccgagaacagcgucgccuacuccaacaacagcaucgccauccccaccaacuucacgaucuccgugaccaccgagauccugcccgugagcaugaccaagacgagcgucgacugcaccauguacaucugcggggacuccaccgagugcagcaaccuccugcugcaguacggcuccuucugcacccagcucaaccgcgcgcugacggggaucgccguggagcaggacaagaacacccaggagguguucgcccaggucaagcagaucuacaagacgcccccgaucaaggacuucggcggguucaacuucagccagauccugcccgaccccuccaagcccagcaagcgguccuucaucgaggaccuccuguucaacaaggugacccuggccgacgccggcuucaucaagcaguacggcgacugccucggggacaucgcggcccgcgaccugaucugcgcccagaaguucaacggccugaccgugcucccgccccugcugaccgacgagaugaucgcccaguacaccagcgcccuccuggcggggaccaucacguccggcuggugguucggggccggcgccgcccugcagauccccuucgcgaugcagauggccuaccgguucaacggcaucggggucacccagaacgugcucuacgagaaccagaagcugaucgccaaccaguucaacagcgccaucggcaagauccaggacucccugagcuccaccgccagcgcgcucgggaagcugcaggacguggucaaccagaacgcccaggcccugaacacgcucgugaagcagcuguccagcaacuucggcgccaucuccagcgugcugaacgacauccucucccgccuggacccgcccgaggccgaggugcagaucgaccggcugaucaccgggcgccuccagagccugcagaccuacgugacccagcagcugauccgggcggccgagauccgcuggagcgccaaccucgccgcgaccaagauguccgagugcguccugggccagagcaagcggguggacuucugcggcaagggguaccaccugauguccuucccccagagcgccccgcacggcguggucuuccuccacgugacguacguccccgcccaggagaagaacuucaccaccgcccccgcgaucugccacgacgggaaggcccacuucccccgcgagggcguguucguguccaacgggacccacugguucgucacgcagcggaacuucuacgagccgcagaucaucaccaccgacaacaccuucgugagcggcaacugcgacguggucaucggcaucgugaacaacacgguguacgacccccugcagcccgagcuggacuccuucaaggaggagcucgacaaguacuucaagaaccacaccagccccgacgucgaccugggggacaucuccggcaucaacgccagcguggugaacauccagaaggagaucgaccgccugaacgaggucgccaagaaccucaacgagucccugaucgaccugcaggagcucgggaaguacgagcaguacaucaagggcggcgggagcgggggcgggcagaucuacgagggcaagcugaccgccgaggggcuccgcuucggcaucguggccagccgguucaaccacgcgcuggucgaccgccugguggagggggccaucgacgccaucgugcggcacggcgggcgcgaggaggacaucacccucguccgggugcccggcuccugggagaucccgguggccgccggcgagcuggcccgcaaggaggacaucgacgcggucaucgccaucggggugcugauccggggcgccacgccccacuucgacuacaucgccagcgagguguccaaggggcucgcggaccugagccuggagcuccgcaagcccaucaccuucggcgucaucaccgccgacacccuggagcaggccaucgagcgggccgggacgaagcacggcaacaagggcugggaggccgcgcuguccgccaucgagauggccaaccucuucaagagccugcgcugaggacuagucccuguucccagagcccacuuuuuuuucuuuuuuugaaauaaaauagccugucuuucagaucucaaaggcucuuuucagagccaccaaaaaaaaaaaaaaaaaaaaaaaaaaaaaaaaaaaaaaaaaaaaaaaaaaaaaaaaaaaaaaaaaaaaaaaaaaaaaaaaaaaaaaaaaaaaaaaaaaaaa

SEQ ID NO: 12356 - RNA, 4388 nt, Artificial Sequence
  SARS-CoV-2/Wuhan/WIV05/2019__EPI_ISL_402128 spike protein mRNA gc (1-1211)(K986P_V987P_P1069F) LumSynth construct
aggagagucccgcagucggcguccagcggcucugcuuguucgugugugugucguugcaggccuuauucaagcuuaccauguucguguuccugguccuccugccccuggugagcucccagugcgugaaccucaccacccgcacgcagcugccgcccgccuacaccaacagcuucacccggggcgucuacuaccccgacaagguguuccgcuccagcgugcugcacuccacccaggaccucuuccugcccuucuucagcaacgucacgugguuccacgccauccacguguccgggaccaacggcaccaagcgguucgacaacccggugcugcccuucaacgacggggucuacuucgcgagcaccgagaaguccaacaucauccgcggcuggaucuucgggacgacccucgacagcaagacccagucccugcugaucgugaacaacgccaccaacguggucaucaaggugugcgaguuccaguucugcaacgaccccuuccucggcguguacuaccacaagaacaacaagagcuggauggaguccgaguuccgggucuacagcuccgccaacaacugcacguucgaguacgugagccagcccuuccugauggaccuggagggcaagcaggggaacuucaagaaccuccgcgaguucguguucaagaacaucgacggcuacuucaagaucuacuccaagcacaccccgaucaaccugguccgggaccugccccagggguucagcgcccucgagccccugguggaccugcccaucggcaucaacaucacccgcuuccagacccuccuggcccugcaccgguccuaccucacgccgggggacagcagcuccggcuggaccgcgggcgccgccgccuacuacgugggguaccugcagccccgcaccuuccugcucaaguacaacgagaacggcaccaucacggacgcggucgacugcgcccuggacccccugagcgagaccaagugcacccucaaguccuucaccguggagaaggggaucuaccagacgagcaacuuccgggugcagcccaccgaguccaucguccgcuucccgaacaucaccaaccugugccccuucggcgagguguucaacgccacccgguucgccagcgucuacgccuggaaccgcaagcggaucuccaacugcguggcggacuacagcgugcuguacaacuccgccagcuucuccacguucaagugcuacggcgucagccccaccaagcucaacgaccugugcuucaccaacguguacgccgacuccuucgugauccgcggggacgagguccggcagaucgcccccggccagaccgggaagaucgccgacuacaacuacaagcugccggacgacuucacgggcugcgugaucgcguggaacagcaacaaccucgacuccaaggucgggggcaacuacaacuaccuguaccgccuguuccgcaagagcaaccucaagcccuucgagcgggacaucuccaccgagaucuaccaggccggcagcacccccugcaacgggguggagggcuucaacugcuacuucccccugcaguccuacggguuccagccgaccaacggcgugggguaccagcccuaccggguggucgugcugagcuucgagcuccugcacgcccccgccacggugugcggccccaagaaguccaccaaccuggucaagaacaagugcgugaacuucaacuucaacggccucaccgggaccggcgugcugaccgagagcaacaagaaguuccugccguuccagcaguucgggcgcgacaucgccgacacgaccgacgcgguccgcgacccccagacccuggagauccucgacaucacccccugcagcuucggcgggguguccgugaucacgccgggcaccaacaccagcaaccaggucgccgugcuguaccaggacgugaacugcaccgagguccccguggccauccacgccgaccagcugacgcccaccuggcggguguacuccaccggcagcaacgucuuccagacccgcgccgggugccucaucggcgcggagcacgugaacaacuccuacgagugcgacauccccaucggggccggcaucugcgccagcuaccagacgcagaccaacuccccgcggcgcgcccggagcguggcgucccagagcaucaucgccuacaccaugucccugggcgccgagaacagcgucgccuacuccaacaacagcaucgccauccccaccaacuucacgaucuccgugaccaccgagauccugcccgugagcaugaccaagacgagcgucgacugcaccauguacaucugcggggacuccaccgagugcagcaaccuccugcugcaguacggcuccuucugcacccagcucaaccgcgcgcugacggggaucgccguggagcaggacaagaacacccaggagguguucgcccaggucaagcagaucuacaagacgcccccgaucaaggacuucggcggguucaacuucagccagauccugcccgaccccuccaagcccagcaagcgguccuucaucgaggaccuccuguucaacaaggugacccuggccgacgccggcuucaucaagcaguacggcgacugccucggggacaucgcggcccgcgaccugaucugcgcccagaaguucaacggccugaccgugcucccgccccugcugaccgacgagaugaucgcccaguacaccagcgcccuccuggcggggaccaucacguccggcuggaccuucggggccggcgccgcccugcagauccccuucgcgaugcagauggccuaccgguucaacggcaucggggucacccagaacgugcucuacgagaaccagaagcugaucgccaaccaguucaacagcgccaucggcaagauccaggacucccugagcuccaccgccagcgcgcucgggaagcugcaggacguggucaaccagaacgcccaggcccugaacacgcucgugaagcagcuguccagcaacuucggcgccaucuccagcgugcugaacgacauccucucccgccuggacccgcccgaggccgaggugcagaucgaccggcugaucaccgggcgccuccagagccugcagaccuacgugacccagcagcugauccgggcggccgagauccgcgccagcgccaaccucgccgcgaccaagauguccgagugcguccugggccagagcaagcggguggacuucugcggcaagggguaccaccugauguccuucccccagagcgccccgcacggcguggucuuccuccacgugacguacgucuucgcccaggagaagaacuucaccaccgcccccgcgaucugccacgacgggaaggcccacuucccccgcgagggcguguucguguccaacgggacccacugguucgucacgcagcggaacuucuacgagccgcagaucaucaccaccgacaacaccuucgugagcggcaacugcgacguggucaucggcaucgugaacaacacgguguacgacccccugcagcccgagcuggacuccuucaaggaggagcucgacaaguacuucaagaaccacaccagccccgacgucgaccugggggacaucuccggcaucaacgccagcguggugaacauccagaaggagaucgaccgccugaacgaggucgccaagaaccucaacgagucccugaucgaccugcaggagcucgggaaguacgagcaguacaucaagggcggcgggagcgggggcgggcagaucuacgagggcaagcugaccgccgaggggcuccgcuucggcaucguggccagccgguucaaccacgcgcuggucgaccgccugguggagggggccaucgacgccaucgugcggcacggcgggcgcgaggaggacaucacccucguccgggugcccggcuccugggagaucccgguggccgccggcgagcuggcccgcaaggaggacaucgacgcggucaucgccaucggggugcugauccggggcgccacgccccacuucgacuacaucgccagcgagguguccaaggggcucgcggaccugagccuggagcuccgcaagcccaucaccuucggcgucaucaccgccgacacccuggagcaggccaucgagcgggccgggacgaagcacggcaacaagggcugggaggccgcgcuguccgccaucgagauggccaaccucuucaagagccugcgcugaggacuagucccuguucccagagcccacuuuuuuuucuuuuuuugaaauaaaauagccugucuuucagaucucaaaggcucuuuucagagccaccaaaaaaaaaaaaaaaaaaaaaaaaaaaaaaaaaaaaaaaaaaaaaaaaaaaaaaaaaaaaaaaaaaaaaaaaaaaaaaaaaaaaaaaaaaaaaaaaaaaaa

SEQ ID NO: 12357 - RNA, 4388 nt, Artificial Sequence
  SARS-CoV-2/Wuhan/WIV05/2019__EPI_ISL_402128 spike protein mRNA gc (1-1211)(K986P_V987P_ H1048Q_H1064N_ H1083N_H1101N) LumSynth construct
aggagagucccgcagucggcguccagcggcucugcuuguucgugugugugucguugcaggccuuauucaagcuuaccauguucguguuccugguccuccugccccuggugagcucccagugcgugaaccucaccacccgcacgcagcugccgcccgccuacaccaacagcuucacccggggcgucuacuaccccgacaagguguuccgcuccagcgugcugcacuccacccaggaccucuuccugcccuucuucagcaacgucacgugguuccacgccauccacguguccgggaccaacggcaccaagcgguucgacaacccggugcugcccuucaacgacggggucuacuucgcgagcaccgagaaguccaacaucauccgcggcuggaucuucgggacgacccucgacagcaagacccagucccugcugaucgugaacaacgccaccaacguggucaucaaggugugcgaguuccaguucugcaacgaccccuuccucggcguguacuaccacaagaacaacaagagcuggauggaguccgaguuccgggucuacagcuccgccaacaacugcacguucgaguacgugagccagcccuuccugauggaccuggagggcaagcaggggaacuucaagaaccuccgcgaguucguguucaagaacaucgacggcuacuucaagaucuacuccaagcacaccccgaucaaccugguccgggaccugccccagggguucagcgcccucgagccccugguggaccugcccaucggcaucaacaucacccgcuuccagacccuccuggcccugcaccgguccuaccucacgccgggggacagcagcuccggcuggaccgcgggcgccgccgccuacuacgugggguaccugcagccccgcaccuuccugcucaaguacaacgagaacggcaccaucacggacgcggucgacugcgcccuggacccccugagcgagaccaagugcacccucaaguccuucaccguggagaaggggaucuaccagacgagcaacuuccgggugcagcccaccgaguccaucguccgcuucccgaacaucaccaaccugugccccuucggcgagguguucaacgccacccgguucgccagcgucuacgccuggaaccgcaagcggaucuccaacugcguggcggacuacagcgugcuguacaacuccgccagcuucuccacguucaagugcuacggcgucagccccaccaagcucaacgaccugugcuucaccaacguguacgccgacuccuucgugauccgcggggacgagguccggcagaucgcccccggccagaccgggaagaucgccgacuacaacuacaagcugccggacgacuucacgggcugcgugaucgcguggaacagcaacaaccucgacuccaaggucgggggcaacuacaacuaccuguaccgccuguuccgcaagagcaaccucaagcccuucgagcgggacaucuccaccgagaucuaccaggccggcagcacccccugcaacgggguggagggcuucaacugcuacuucccccugcaguccuacggguuccagccgaccaacggcgugggguaccagcccuaccggguggucgugcugagcuucgagcuccugcacgcccccgccacggugugcggccccaagaaguccaccaaccuggucaagaacaagugcgugaacuucaacuucaacggccucaccgggaccggcgugcugaccgagagcaacaagaaguuccugccguuccagcaguucgggcgcgacaucgccgacacgaccgacgcgguccgcgacccccagacccuggagauccucgacaucacccccugcagcuucggcgggguguccgugaucacgccgggcaccaacaccagcaaccaggucgccgugcuguaccaggacgugaacugcaccgagguccccguggccauccacgccgaccagcugacgcccaccuggcggguguacuccaccggcagcaacgucuuccagacccgcgccgggugccucaucggcgcggagcacgugaacaacuccuacgagugcgacauccccaucggggccggcaucugcgccagcuaccagacgcagaccaacuccccgcggcgcgcccggagcguggcgucccagagcaucaucgccuacaccaugucccugggcgccgagaacagcgucgccuacuccaacaacagcaucgccauccccaccaacuucacgaucuccgugaccaccgagauccugcccgugagcaugaccaagacgagcgucgacugcaccauguacaucugcggggacuccaccgagugcagcaaccuccugcugcaguacggcuccuucugcacccagcucaaccgcgcgcugacggggaucgccguggagcaggacaagaacacccaggagguguucgcccaggucaagcagaucuacaagacgcccccgaucaaggacuucggcggguucaacuucagccagauccugcccgaccccuccaagcccagcaagcgguccuucaucgaggaccuccuguucaacaaggugacccuggccgacgccggcuucaucaagcaguacggcgacugccucggggacaucgcggcccgcgaccugaucugcgcccagaaguucaacggccugaccgugcucccgccccugcugaccgacgagaugaucgcccaguacaccagcgcccuccuggcggggaccaucacguccggcuggaccuucggggccggcgccgcccugcagauccccuucgcgaugcagauggccuaccgguucaacggcaucggggucacccagaacgugcucuacgagaaccagaagcugaucgccaaccaguucaacagcgccaucggcaagauccaggacucccugagcuccaccgccagcgcgcucgggaagcugcaggacguggucaaccagaacgcccaggcccugaacacgcucgugaagcagcuguccagcaacuucggcgccaucuccagcgugcugaacgacauccucucccgccuggacccgcccgaggccgaggugcagaucgaccggcugaucaccgggcgccuccagagccugcagaccuacgugacccagcagcugauccgggcggccgagauccgcgccagcgccaaccucgccgcgaccaagauguccgagugcguccugggccagagcaagcggguggacuucugcggcaagggguaccagcugauguccuucccccagagcgccccgcacggcguggucuuccucaacgugacguacguccccgcccaggagaagaacuucaccaccgcccccgcgaucugcaacgacgggaaggcccacuucccccgcgagggcguguucguguccaacgggaccaacugguucgucacgcagcggaacuucuacgagccgcagaucaucaccaccgacaacaccuucgugagcggcaacugcgacguggucaucggcaucgugaacaacacgguguacgacccccugcagcccgagcuggacuccuucaaggaggagcucgacaaguacuucaagaaccacaccagccccgacgucgaccugggggacaucuccggcaucaacgccagcguggugaacauccagaaggagaucgaccgccugaacgaggucgccaagaaccucaacgagucccugaucgaccugcaggagcucgggaaguacgagcaguacaucaagggcggcgggagcgggggcgggcagaucuacgagggcaagcugaccgccgaggggcuccgcuucggcaucguggccagccgguucaaccacgcgcuggucgaccgccugguggagggggccaucgacgccaucgugcggcacggcgggcgcgaggaggacaucacccucguccgggugcccggcuccugggagaucccgguggccgccggcgagcuggcccgcaaggaggacaucgacgcggucaucgccaucggggugcugauccggggcgccacgccccacuucgacuacaucgccagcgagguguccaaggggcucgcggaccugagccuggagcuccgcaagcccaucaccuucggcgucaucaccgccgacacccuggagcaggccaucgagcgggccgggacgaagcacggcaacaagggcugggaggccgcgcuguccgccaucgagauggccaaccucuucaagagccugcgcugaggacuagucccuguucccagagcccacuuuuuuuucuuuuuuugaaauaaaauagccugucuuucagaucucaaaggcucuuuucagagccaccaaaaaaaaaaaaaaaaaaaaaaaaaaaaaaaaaaaaaaaaaaaaaaaaaaaaaaaaaaaaaaaaaaaaaaaaaaaaaaaaaaaaaaaaaaaaaaaaaaaaa

SEQ ID NO: 12358 - RNA, 4388 nt, Artificial Sequence
  SARS-CoV-2/Wuhan/WIV05/2019__EPI_ISL_402128 spike protein mRNA gc (1-1211)(I712C_T1077C) LumSynth construct
aggagagucccgcagucggcguccagcggcucugcuuguucgugugugugucguugcaggccuuauucaagcuuaccauguucguguuccugguccuccugccccuggugagcucccagugcgugaaccucaccacccgcacgcagcugccgcccgccuacaccaacagcuucacccggggcgucuacuaccccgacaagguguuccgcuccagcgugcugcacuccacccaggaccucuuccugcccuucuucagcaacgucacgugguuccacgccauccacguguccgggaccaacggcaccaagcgguucgacaacccggugcugcccuucaacgacggggucuacuucgcgagcaccgagaaguccaacaucauccgcggcuggaucuucgggacgacccucgacagcaagacccagucccugcugaucgugaacaacgccaccaacguggucaucaaggugugcgaguuccaguucugcaacgaccccuuccucggcguguacuaccacaagaacaacaagagcuggauggaguccgaguuccgggucuacagcuccgccaacaacugcacguucgaguacgugagccagcccuuccugauggaccuggagggcaagcaggggaacuucaagaaccuccgcgaguucguguucaagaacaucgacggcuacuucaagaucuacuccaagcacaccccgaucaaccugguccgggaccugccccagggguucagcgcccucgagccccugguggaccugcccaucggcaucaacaucacccgcuuccagacccuccuggcccugcaccgguccuaccucacgccgggggacagcagcuccggcuggaccgcgggcgccgccgccuacuacgugggguaccugcagccccgcaccuuccugcucaaguacaacgagaacggcaccaucacggacgcggucgacugcgcccuggacccccugagcgagaccaagugcacccucaaguccuucaccguggagaaggggaucuaccagacgagcaacuuccgggugcagcccaccgaguccaucguccgcuucccgaacaucaccaaccugugccccuucggcgagguguucaacgccacccgguucgccagcgucuacgccuggaaccgcaagcggaucuccaacugcguggcggacuacagcgugcuguacaacuccgccagcuucuccacguucaagugcuacggcgucagccccaccaagcucaacgaccugugcuucaccaacguguacgccgacuccuucgugauccgcggggacgagguccggcagaucgcccccggccagaccgggaagaucgccgacuacaacuacaagcugccggacgacuucacgggcugcgugaucgcguggaacagcaacaaccucgacuccaaggucgggggcaacuacaacuaccuguaccgccuguuccgcaagagcaaccucaagcccuucgagcgggacaucuccaccgagaucuaccaggccggcagcacccccugcaacgggguggagggcuucaacugcuacuucccccugcaguccuacggguuccagccgaccaacggcgugggguaccagcccuaccggguggucgugcugagcuucgagcuccugcacgcccccgccacggugugcggccccaagaaguccaccaaccuggucaagaacaagugcgugaacuucaacuucaacggccucaccgggaccggcgugcugaccgagagcaacaagaaguuccugccguuccagcaguucgggcgcgacaucgccgacacgaccgacgcgguccgcgacccccagacccuggagauccucgacaucacccccugcagcuucggcgggguguccgugaucacgccgggcaccaacaccagcaaccaggucgccgugcuguaccaggacgugaacugcaccgagguccccguggccauccacgccgaccagcugacgcccaccuggcggguguacuccaccggcagcaacgucuuccagacccgcgccgggugccucaucggcgcggagcacgugaacaacuccuacgagugcgacauccccaucggggccggcaucugcgccagcuaccagacgcagaccaacuccccgcggcgcgcccggagcguggcgucccagagcaucaucgccuacaccaugucccugggcgccgagaacagcgucgccuacuccaacaacagcugcgccauccccaccaacuucacgaucuccgugaccaccgagauccugcccgugagcaugaccaagacgagcgucgacugcaccauguacaucugcggggacuccaccgagugcagcaaccuccugcugcaguacggcuccuucugcacccagcucaaccgcgcgcugacggggaucgccguggagcaggacaagaacacccaggagguguucgcccaggucaagcagaucuacaagacgcccccgaucaaggacuucggcggguucaacuucagccagauccugcccgaccccuccaagcccagcaagcgguccuucaucgaggaccuccuguucaacaaggugacccuggccgacgccggcuucaucaagcaguacggcgacugccucggggacaucgcggcccgcgaccugaucugcgcccagaaguucaacggccugaccgugcucccgccccugcugaccgacgagaugaucgcccaguacaccagcgcccuccuggcggggaccaucacguccggcuggaccuucggggccggcgccgcccugcagauccccuucgcgaugcagauggccuaccgguucaacggcaucggggucacccagaacgugcucuacgagaaccagaagcugaucgccaaccaguucaacagcgccaucggcaagauccaggacucccugagcuccaccgccagcgcgcucgggaagcugcaggacguggucaaccagaacgcccaggcccugaacacgcucgugaagcagcuguccagcaacuucggcgccaucuccagcgugcugaacgacauccucucccgccuggacaaggucgaggccgaggugcagaucgaccggcugaucaccgggcgccuccagagccugcagaccuacgugacccagcagcugauccgggcggccgagauccgcgccagcgccaaccucgccgcgaccaagauguccgagugcguccugggccagagcaagcggguggacuucugcggcaagggguaccaccugauguccuucccccagagcgccccgcacggcguggucuuccuccacgugacguacguccccgcccaggagaagaacuucaccugcgcccccgcgaucugccacgacgggaaggcccacuucccccgcgagggcguguucguguccaacgggacccacugguucgucacgcagcggaacuucuacgagccgcagaucaucaccaccgacaacaccuucgugagcggcaacugcgacguggucaucggcaucgugaacaacacgguguacgacccccugcagcccgagcuggacuccuucaaggaggagcucgacaaguacuucaagaaccacaccagccccgacgucgaccugggggacaucuccggcaucaacgccagcguggugaacauccagaaggagaucgaccgccugaacgaggucgccaagaaccucaacgagucccugaucgaccugcaggagcucgggaaguacgagcaguacaucaagggcggcgggagcgggggcgggcagaucuacgagggcaagcugaccgccgaggggcuccgcuucggcaucguggccagccgguucaaccacgcgcuggucgaccgccugguggagggggccaucgacgccaucgugcggcacggcgggcgcgaggaggacaucacccucguccgggugcccggcuccugggagaucccgguggccgccggcgagcuggcccgcaaggaggacaucgacgcggucaucgccaucggggugcugauccggggcgccacgccccacuucgacuacaucgccagcgagguguccaaggggcucgcggaccugagccuggagcuccgcaagcccaucaccuucggcgucaucaccgccgacacccuggagcaggccaucgagcgggccgggacgaagcacggcaacaagggcugggaggccgcgcuguccgccaucgagauggccaaccucuucaagagccugcgcugaggacuagucccuguucccagagcccacuuuuuuuucuuuuuuugaaauaaaauagccugucuuucagaucucaaaggcucuuuucagagccaccaaaaaaaaaaaaaaaaaaaaaaaaaaaaaaaaaaaaaaaaaaaaaaaaaaaaaaaaaaaaaaaaaaaaaaaaaaaaaaaaaaaaaaaaaaaaaaaaaaaaa

SEQ ID NO: 12359 - RNA, 4388 nt, Artificial Sequence
  SARS-CoV-2/Wuhan/WIV05/2019__EPI_ISL_402128 spike protein mRNA gc (1-1211)(I714C_Y1110C) LumSynth construct
aggagagucccgcagucggcguccagcggcucugcuuguucgugugugugucguugcaggccuuauucaagcuuaccauguucguguuccugguccuccugccccuggugagcucccagugcgugaaccucaccacccgcacgcagcugccgcccgccuacaccaacagcuucacccggggcgucuacuaccccgacaagguguuccgcuccagcgugcugcacuccacccaggaccucuuccugcccuucuucagcaacgucacgugguuccacgccauccacguguccgggaccaacggcaccaagcgguucgacaacccggugcugcccuucaacgacggggucuacuucgcgagcaccgagaaguccaacaucauccgcggcuggaucuucgggacgacccucgacagcaagacccagucccugcugaucgugaacaacgccaccaacguggucaucaaggugugcgaguuccaguucugcaacgaccccuuccucggcguguacuaccacaagaacaacaagagcuggauggaguccgaguuccgggucuacagcuccgccaacaacugcacguucgaguacgugagccagcccuuccugauggaccuggagggcaagcaggggaacuucaagaaccuccgcgaguucguguucaagaacaucgacggcuacuucaagaucuacuccaagcacaccccgaucaaccugguccgggaccugccccagggguucagcgcccucgagccccugguggaccugcccaucggcaucaacaucacccgcuuccagacccuccuggcccugcaccgguccuaccucacgccgggggacagcagcuccggcuggaccgcgggcgccgccgccuacuacgugggguaccugcagccccgcaccuuccugcucaaguacaacgagaacggcaccaucacggacgcggucgacugcgcccuggacccccugagcgagaccaagugcacccucaaguccuucaccguggagaaggggaucuaccagacgagcaacuuccgggugcagcccaccgaguccaucguccgcuucccgaacaucaccaaccugugccccuucggcgagguguucaacgccacccgguucgccagcgucuacgccuggaaccgcaagcggaucuccaacugcguggcggacuacagcgugcuguacaacuccgccagcuucuccacguucaagugcuacggcgucagccccaccaagcucaacgaccugugcuucaccaacguguacgccgacuccuucgugauccgcggggacgagguccggcagaucgcccccggccagaccgggaagaucgccgacuacaacuacaagcugccggacgacuucacgggcugcgugaucgcguggaacagcaacaaccucgacuccaaggucgggggcaacuacaacuaccuguaccgccuguuccgcaagagcaaccucaagcccuucgagcgggacaucuccaccgagaucuaccaggccggcagcacccccugcaacgggguggagggcuucaacugcuacuucccccugcaguccuacggguuccagccgaccaacggcgugggguaccagcccuaccggguggucgugcugagcuucgagcuccugcacgcccccgccacggugugcggccccaagaaguccaccaaccuggucaagaacaagugcgugaacuucaacuucaacggccucaccgggaccggcgugcugaccgagagcaacaagaaguuccugccguuccagcaguucgggcgcgacaucgccgacacgaccgacgcgguccgcgacccccagacccuggagauccucgacaucacccccugcagcuucggcgggguguccgugaucacgccgggcaccaacaccagcaaccaggucgccgugcuguaccaggacgugaacugcaccgagguccccguggccauccacgccgaccagcugacgcccaccuggcggguguacuccaccggcagcaacgucuuccagacccgcgccgggugccucaucggcgcggagcacgugaacaacuccuacgagugcgacauccccaucggggccggcaucugcgccagcuaccagacgcagaccaacuccccgcggcgcgcccggagcguggcgucccagagcaucaucgccuacaccaugucccugggcgccgagaacagcgucgccuacuccaacaacagcaucgccugccccaccaacuucacgaucuccgugaccaccgagauccugcccgugagcaugaccaagacgagcgucgacugcaccauguacaucugcggggacuccaccgagugcagcaaccuccugcugcaguacggcuccuucugcacccagcucaaccgcgcgcugacggggaucgccguggagcaggacaagaacacccaggagguguucgcccaggucaagcagaucuacaagacgcccccgaucaaggacuucggcggguucaacuucagccagauccugcccgaccccuccaagcccagcaagcgguccuucaucgaggaccuccuguucaacaaggugacccuggccgacgccggcuucaucaagcaguacggcgacugccucggggacaucgcggcccgcgaccugaucugcgcccagaaguucaacggccugaccgugcucccgccccugcugaccgacgagaugaucgcccaguacaccagcgcccuccuggcggggaccaucacguccggcuggaccuucggggccggcgccgcccugcagauccccuucgcgaugcagauggccuaccgguucaacggcaucggggucacccagaacgugcucuacgagaaccagaagcugaucgccaaccaguucaacagcgccaucggcaagauccaggacucccugagcuccaccgccagcgcgcucgggaagcugcaggacguggucaaccagaacgcccaggcccugaacacgcucgugaagcagcuguccagcaacuucggcgccaucuccagcgugcugaacgacauccucucccgccuggacaaggucgaggccgaggugcagaucgaccggcugaucaccgggcgccuccagagccugcagaccuacgugacccagcagcugauccgggcggccgagauccgcgccagcgccaaccucgccgcgaccaagauguccgagugcguccugggccagagcaagcggguggacuucugcggcaagggguaccaccugauguccuucccccagagcgccccgcacggcguggucuuccuccacgugacguacguccccgcccaggagaagaacuucaccaccgcccccgcgaucugccacgacgggaaggcccacuucccccgcgagggcguguucguguccaacgggacccacugguucgucacgcagcggaacuucugcgagccgcagaucaucaccaccgacaacaccuucgugagcggcaacugcgacguggucaucggcaucgugaacaacacgguguacgacccccugcagcccgagcuggacuccuucaaggaggagcucgacaaguacuucaagaaccacaccagccccgacgucgaccugggggacaucuccggcaucaacgccagcguggugaacauccagaaggagaucgaccgccugaacgaggucgccaagaaccucaacgagucccugaucgaccugcaggagcucgggaaguacgagcaguacaucaagggcggcgggagcgggggcgggcagaucuacgagggcaagcugaccgccgaggggcuccgcuucggcaucguggccagccgguucaaccacgcgcuggucgaccgccugguggagggggccaucgacgccaucgugcggcacggcgggcgcgaggaggacaucacccucguccgggugcccggcuccugggagaucccgguggccgccggcgagcuggcccgcaaggaggacaucgacgcggucaucgccaucggggugcugauccggggcgccacgccccacuucgacuacaucgccagcgagguguccaaggggcucgcggaccugagccuggagcuccgcaagcccaucaccuucggcgucaucaccgccgacacccuggagcaggccaucgagcgggccgggacgaagcacggcaacaagggcugggaggccgcgcuguccgccaucgagauggccaaccucuucaagagccugcgcugaggacuagucccuguucccagagcccacuuuuuuuucuuuuuuugaaauaaaauagccugucuuucagaucucaaaggcucuuuucagagccaccaaaaaaaaaaaaaaaaaaaaaaaaaaaaaaaaaaaaaaaaaaaaaaaaaaaaaaaaaaaaaaaaaaaaaaaaaaaaaaaaaaaaaaaaaaaaaaaaaaaaa

SEQ ID NO: 12360 - RNA, 4388 nt, Artificial Sequence
  SARS-CoV-2/Wuhan/WIV05/2019__EPI_ISL_402128 spike protein mRNA gc (1-1211)(P715C_P1069C) LumSynth construct
aggagagucccgcagucggcguccagcggcucugcuuguucgugugugugucguugcaggccuuauucaagcuuaccauguucguguuccugguccuccugccccuggugagcucccagugcgugaaccucaccacccgcacgcagcugccgcccgccuacaccaacagcuucacccggggcgucuacuaccccgacaagguguuccgcuccagcgugcugcacuccacccaggaccucuuccugcccuucuucagcaacgucacgugguuccacgccauccacguguccgggaccaacggcaccaagcgguucgacaacccggugcugcccuucaacgacggggucuacuucgcgagcaccgagaaguccaacaucauccgcggcuggaucuucgggacgacccucgacagcaagacccagucccugcugaucgugaacaacgccaccaacguggucaucaaggugugcgaguuccaguucugcaacgaccccuuccucggcguguacuaccacaagaacaacaagagcuggauggaguccgaguuccgggucuacagcuccgccaacaacugcacguucgaguacgugagccagcccuuccugauggaccuggagggcaagcaggggaacuucaagaaccuccgcgaguucguguucaagaacaucgacggcuacuucaagaucuacuccaagcacaccccgaucaaccugguccgggaccugccccagggguucagcgcccucgagccccugguggaccugcccaucggcaucaacaucacccgcuuccagacccuccuggcccugcaccgguccuaccucacgccgggggacagcagcuccggcuggaccgcgggcgccgccgccuacuacgugggguaccugcagccccgcaccuuccugcucaaguacaacgagaacggcaccaucacggacgcggucgacugcgcccuggacccccugagcgagaccaagugcacccucaaguccuucaccguggagaaggggaucuaccagacgagcaacuuccgggugcagcccaccgaguccaucguccgcuucccgaacaucaccaaccugugccccuucggcgagguguucaacgccacccgguucgccagcgucuacgccuggaaccgcaagcggaucuccaacugcguggcggacuacagcgugcuguacaacuccgccagcuucuccacguucaagugcuacggcgucagccccaccaagcucaacgaccugugcuucaccaacguguacgccgacuccuucgugauccgcggggacgagguccggcagaucgcccccggccagaccgggaagaucgccgacuacaacuacaagcugccggacgacuucacgggcugcgugaucgcguggaacagcaacaaccucgacuccaaggucgggggcaacuacaacuaccuguaccgccuguuccgcaagagcaaccucaagcccuucgagcgggacaucuccaccgagaucuaccaggccggcagcacccccugcaacgggguggagggcuucaacugcuacuucccccugcaguccuacggguuccagccgaccaacggcgugggguaccagcccuaccggguggucgugcugagcuucgagcuccugcacgcccccgccacggugugcggccccaagaaguccaccaaccuggucaagaacaagugcgugaacuucaacuucaacggccucaccgggaccggcgugcugaccgagagcaacaagaaguuccugccguuccagcaguucgggcgcgacaucgccgacacgaccgacgcgguccgcgacccccagacccuggagauccucgacaucacccccugcagcuucggcgggguguccgugaucacgccgggcaccaacaccagcaaccaggucgccgugcuguaccaggacgugaacugcaccgagguccccguggccauccacgccgaccagcugacgcccaccuggcggguguacuccaccggcagcaacgucuuccagacccgcgccgggugccucaucggcgcggagcacgugaacaacuccuacgagugcgacauccccaucggggccggcaucugcgccagcuaccagacgcagaccaacuccccgcggcgcgcccggagcguggcgucccagagcaucaucgccuacaccaugucccugggcgccgagaacagcgucgccuacuccaacaacagcaucgccaucugcaccaacuucacgaucuccgugaccaccgagauccugcccgugagcaugaccaagacgagcgucgacugcaccauguacaucugcggggacuccaccgagugcagcaaccuccugcugcaguacggcuccuucugcacccagcucaaccgcgcgcugacggggaucgccguggagcaggacaagaacacccaggagguguucgcccaggucaagcagaucuacaagacgcccccgaucaaggacuucggcggguucaacuucagccagauccugcccgaccccuccaagcccagcaagcgguccuucaucgaggaccuccuguucaacaaggugacccuggccgacgccggcuucaucaagcaguacggcgacugccucggggacaucgcggcccgcgaccugaucugcgcccagaaguucaacggccugaccgugcucccgccccugcugaccgacgagaugaucgcccaguacaccagcgcccuccuggcggggaccaucacguccggcuggaccuucggggccggcgccgcccugcagauccccuucgcgaugcagauggccuaccgguucaacggcaucggggucacccagaacgugcucuacgagaaccagaagcugaucgccaaccaguucaacagcgccaucggcaagauccaggacucccugagcuccaccgccagcgcgcucgggaagcugcaggacguggucaaccagaacgcccaggcccugaacacgcucgugaagcagcuguccagcaacuucggcgccaucuccagcgugcugaacgacauccucucccgccuggacaaggucgaggccgaggugcagaucgaccggcugaucaccgggcgccuccagagccugcagaccuacgugacccagcagcugauccgggcggccgagauccgcgccagcgccaaccucgccgcgaccaagauguccgagugcguccugggccagagcaagcggguggacuucugcggcaagggguaccaccugauguccuucccccagagcgccccgcacggcguggucuuccuccacgugacguacgucugcgcccaggagaagaacuucaccaccgcccccgcgaucugccacgacgggaaggcccacuucccccgcgagggcguguucguguccaacgggacccacugguucgucacgcagcggaacuucuacgagccgcagaucaucaccaccgacaacaccuucgugagcggcaacugcgacguggucaucggcaucgugaacaacacgguguacgacccccugcagcccgagcuggacuccuucaaggaggagcucgacaaguacuucaagaaccacaccagccccgacgucgaccugggggacaucuccggcaucaacgccagcguggugaacauccagaaggagaucgaccgccugaacgaggucgccaagaaccucaacgagucccugaucgaccugcaggagcucgggaaguacgagcaguacaucaagggcggcgggagcgggggcgggcagaucuacgagggcaagcugaccgccgaggggcuccgcuucggcaucguggccagccgguucaaccacgcgcuggucgaccgccugguggagggggccaucgacgccaucgugcggcacggcgggcgcgaggaggacaucacccucguccgggugcccggcuccugggagaucccgguggccgccggcgagcuggcccgcaaggaggacaucgacgcggucaucgccaucggggugcugauccggggcgccacgccccacuucgacuacaucgccagcgagguguccaaggggcucgcggaccugagccuggagcuccgcaagcccaucaccuucggcgucaucaccgccgacacccuggagcaggccaucgagcgggccgggacgaagcacggcaacaagggcugggaggccgcgcuguccgccaucgagauggccaaccucuucaagagccugcgcugaggacuagucccuguucccagagcccacuuuuuuuucuuuuuuugaaauaaaauagccugucuuucagaucucaaaggcucuuuucagagccaccaaaaaaaaaaaaaaaaaaaaaaaaaaaaaaaaaaaaaaaaaaaaaaaaaaaaaaaaaaaaaaaaaaaaaaaaaaaaaaaaaaaaaaaaaaaaaaaaaaaaa

SEQ ID NO: 12361 - RNA, 4388 nt, Artificial Sequence
  SARS-CoV-2/Wuhan/WIV05/2019__EPI_ISL_402128 spike protein mRNA gc (1-1211)(G889C_L1034C) LumSynth construct
aggagagucccgcagucggcguccagcggcucugcuuguucgugugugugucguugcaggccuuauucaagcuuaccauguucguguuccugguccuccugccccuggugagcucccagugcgugaaccucaccacccgcacgcagcugccgcccgccuacaccaacagcuucacccggggcgucuacuaccccgacaagguguuccgcuccagcgugcugcacuccacccaggaccucuuccugcccuucuucagcaacgucacgugguuccacgccauccacguguccgggaccaacggcaccaagcgguucgacaacccggugcugcccuucaacgacggggucuacuucgcgagcaccgagaaguccaacaucauccgcggcuggaucuucgggacgacccucgacagcaagacccagucccugcugaucgugaacaacgccaccaacguggucaucaaggugugcgaguuccaguucugcaacgaccccuuccucggcguguacuaccacaagaacaacaagagcuggauggaguccgaguuccgggucuacagcuccgccaacaacugcacguucgaguacgugagccagcccuuccugauggaccuggagggcaagcaggggaacuucaagaaccuccgcgaguucguguucaagaacaucgacggcuacuucaagaucuacuccaagcacaccccgaucaaccugguccgggaccugccccagggguucagcgcccucgagccccugguggaccugcccaucggcaucaacaucacccgcuuccagacccuccuggcccugcaccgguccuaccucacgccgggggacagcagcuccggcuggaccgcgggcgccgccgccuacuacgugggguaccugcagccccgcaccuuccugcucaaguacaacgagaacggcaccaucacggacgcggucgacugcgcccuggacccccugagcgagaccaagugcacccucaaguccuucaccguggagaaggggaucuaccagacgagcaacuuccgggugcagcccaccgaguccaucguccgcuucccgaacaucaccaaccugugccccuucggcgagguguucaacgccacccgguucgccagcgucuacgccuggaaccgcaagcggaucuccaacugcguggcggacuacagcgugcuguacaacuccgccagcuucuccacguucaagugcuacggcgucagccccaccaagcucaacgaccugugcuucaccaacguguacgccgacuccuucgugauccgcggggacgagguccggcagaucgcccccggccagaccgggaagaucgccgacuacaacuacaagcugccggacgacuucacgggcugcgugaucgcguggaacagcaacaaccucgacuccaaggucgggggcaacuacaacuaccuguaccgccuguuccgcaagagcaaccucaagcccuucgagcgggacaucuccaccgagaucuaccaggccggcagcacccccugcaacgggguggagggcuucaacugcuacuucccccugcaguccuacggguuccagccgaccaacggcgugggguaccagcccuaccggguggucgugcugagcuucgagcuccugcacgcccccgccacggugugcggccccaagaaguccaccaaccuggucaagaacaagugcgugaacuucaacuucaacggccucaccgggaccggcgugcugaccgagagcaacaagaaguuccugccguuccagcaguucgggcgcgacaucgccgacacgaccgacgcgguccgcgacccccagacccuggagauccucgacaucacccccugcagcuucggcgggguguccgugaucacgccgggcaccaacaccagcaaccaggucgccgugcuguaccaggacgugaacugcaccgagguccccguggccauccacgccgaccagcugacgcccaccuggcggguguacuccaccggcagcaacgucuuccagacccgcgccgggugccucaucggcgcggagcacgugaacaacuccuacgagugcgacauccccaucggggccggcaucugcgccagcuaccagacgcagaccaacuccccgcggcgcgcccggagcguggcgucccagagcaucaucgccuacaccaugucccugggcgccgagaacagcgucgccuacuccaacaacagcaucgccauccccaccaacuucacgaucuccgugaccaccgagauccugcccgugagcaugaccaagacgagcgucgacugcaccauguacaucugcggggacuccaccgagugcagcaaccuccugcugcaguacggcuccuucugcacccagcucaaccgcgcgcugacggggaucgccguggagcaggacaagaacacccaggagguguucgcccaggucaagcagaucuacaagacgcccccgaucaaggacuucggcggguucaacuucagccagauccugcccgaccccuccaagcccagcaagcgguccuucaucgaggaccuccuguucaacaaggugacccuggccgacgccggcuucaucaagcaguacggcgacugccucggggacaucgcggcccgcgaccugaucugcgcccagaaguucaacggccugaccgugcucccgccccugcugaccgacgagaugaucgcccaguacaccagcgcccuccuggcggggaccaucacguccggcuggaccuucugcgccggcgccgcccugcagauccccuucgcgaugcagauggccuaccgguucaacggcaucggggucacccagaacgugcucuacgagaaccagaagcugaucgccaaccaguucaacagcgccaucggcaagauccaggacucccugagcuccaccgccagcgcgcucgggaagcugcaggacguggucaaccagaacgcccaggcccugaacacgcucgugaagcagcuguccagcaacuucggcgccaucuccagcgugcugaacgacauccucucccgccuggacaaggucgaggccgaggugcagaucgaccggcugaucaccgggcgccuccagagccugcagaccuacgugacccagcagcugauccgggcggccgagauccgcgccagcgccaaccucgccgcgaccaagauguccgagugcgucugcggccagagcaagcggguggacuucugcggcaagggguaccaccugauguccuucccccagagcgccccgcacggcguggucuuccuccacgugacguacguccccgcccaggagaagaacuucaccaccgcccccgcgaucugccacgacgggaaggcccacuucccccgcgagggcguguucguguccaacgggacccacugguucgucacgcagcggaacuucuacgagccgcagaucaucaccaccgacaacaccuucgugagcggcaacugcgacguggucaucggcaucgugaacaacacgguguacgacccccugcagcccgagcuggacuccuucaaggaggagcucgacaaguacuucaagaaccacaccagccccgacgucgaccugggggacaucuccggcaucaacgccagcguggugaacauccagaaggagaucgaccgccugaacgaggucgccaagaaccucaacgagucccugaucgaccugcaggagcucgggaaguacgagcaguacaucaagggcggcgggagcgggggcgggcagaucuacgagggcaagcugaccgccgaggggcuccgcuucggcaucguggccagccgguucaaccacgcgcuggucgaccgccugguggagggggccaucgacgccaucgugcggcacggcgggcgcgaggaggacaucacccucguccgggugcccggcuccugggagaucccgguggccgccggcgagcuggcccgcaaggaggacaucgacgcggucaucgccaucggggugcugauccggggcgccacgccccacuucgacuacaucgccagcgagguguccaaggggcucgcggaccugagccuggagcuccgcaagcccaucaccuucggcgucaucaccgccgacacccuggagcaggccaucgagcgggccgggacgaagcacggcaacaagggcugggaggccgcgcuguccgccaucgagauggccaaccucuucaagagccugcgcugaggacuagucccuguucccagagcccacuuuuuuuucuuuuuuugaaauaaaauagccugucuuucagaucucaaaggcucuuuucagagccaccaaaaaaaaaaaaaaaaaaaaaaaaaaaaaaaaaaaaaaaaaaaaaaaaaaaaaaaaaaaaaaaaaaaaaaaaaaaaaaaaaaaaaaaaaaaaaaaaaaaaa

SEQ ID NO: 12362 - RNA, 4388 nt, Artificial Sequence
  SARS-CoV-2/Wuhan/WIV05/2019__EPI_ISL_402128 spike protein mRNA gc (1-1211)(I909C_Y1047C) LumSynth construct
aggagagucccgcagucggcguccagcggcucugcuuguucgugugugugucguugcaggccuuauucaagcuuaccauguucguguuccugguccuccugccccuggugagcucccagugcgugaaccucaccacccgcacgcagcugccgcccgccuacaccaacagcuucacccggggcgucuacuaccccgacaagguguuccgcuccagcgugcugcacuccacccaggaccucuuccugcccuucuucagcaacgucacgugguuccacgccauccacguguccgggaccaacggcaccaagcgguucgacaacccggugcugcccuucaacgacggggucuacuucgcgagcaccgagaaguccaacaucauccgcggcuggaucuucgggacgacccucgacagcaagacccagucccugcugaucgugaacaacgccaccaacguggucaucaaggugugcgaguuccaguucugcaacgaccccuuccucggcguguacuaccacaagaacaacaagagcuggauggaguccgaguuccgggucuacagcuccgccaacaacugcacguucgaguacgugagccagcccuuccugauggaccuggagggcaagcaggggaacuucaagaaccuccgcgaguucguguucaagaacaucgacggcuacuucaagaucuacuccaagcacaccccgaucaaccugguccgggaccugccccagggguucagcgcccucgagccccugguggaccugcccaucggcaucaacaucacccgcuuccagacccuccuggcccugcaccgguccuaccucacgccgggggacagcagcuccggcuggaccgcgggcgccgccgccuacuacgugggguaccugcagccccgcaccuuccugcucaaguacaacgagaacggcaccaucacggacgcggucgacugcgcccuggacccccugagcgagaccaagugcacccucaaguccuucaccguggagaaggggaucuaccagacgagcaacuuccgggugcagcccaccgaguccaucguccgcuucccgaacaucaccaaccugugccccuucggcgagguguucaacgccacccgguucgccagcgucuacgccuggaaccgcaagcggaucuccaacugcguggcggacuacagcgugcuguacaacuccgccagcuucuccacguucaagugcuacggcgucagccccaccaagcucaacgaccugugcuucaccaacguguacgccgacuccuucgugauccgcggggacgagguccggcagaucgcccccggccagaccgggaagaucgccgacuacaacuacaagcugccggacgacuucacgggcugcgugaucgcguggaacagcaacaaccucgacuccaaggucgggggcaacuacaacuaccuguaccgccuguuccgcaagagcaaccucaagcccuucgagcgggacaucuccaccgagaucuaccaggccggcagcacccccugcaacgggguggagggcuucaacugcuacuucccccugcaguccuacggguuccagccgaccaacggcgugggguaccagcccuaccggguggucgugcugagcuucgagcuccugcacgcccccgccacggugugcggccccaagaaguccaccaaccuggucaagaacaagugcgugaacuucaacuucaacggccucaccgggaccggcgugcugaccgagagcaacaagaaguuccugccguuccagcaguucgggcgcgacaucgccgacacgaccgacgcgguccgcgacccccagacccuggagauccucgacaucacccccugcagcuucggcgggguguccgugaucacgccgggcaccaacaccagcaaccaggucgccgugcuguaccaggacgugaacugcaccgagguccccguggccauccacgccgaccagcugacgcccaccuggcggguguacuccaccggcagcaacgucuuccagacccgcgccgggugccucaucggcgcggagcacgugaacaacuccuacgagugcgacauccccaucggggccggcaucugcgccagcuaccagacgcagaccaacuccccgcggcgcgcccggagcguggcgucccagagcaucaucgccuacaccaugucccugggcgccgagaacagcgucgccuacuccaacaacagcaucgccauccccaccaacuucacgaucuccgugaccaccgagauccugcccgugagcaugaccaagacgagcgucgacugcaccauguacaucugcggggacuccaccgagugcagcaaccuccugcugcaguacggcuccuucugcacccagcucaaccgcgcgcugacggggaucgccguggagcaggacaagaacacccaggagguguucgcccaggucaagcagaucuacaagacgcccccgaucaaggacuucggcggguucaacuucagccagauccugcccgaccccuccaagcccagcaagcgguccuucaucgaggaccuccuguucaacaaggugacccuggccgacgccggcuucaucaagcaguacggcgacugccucggggacaucgcggcccgcgaccugaucugcgcccagaaguucaacggccugaccgugcucccgccccugcugaccgacgagaugaucgcccaguacaccagcgcccuccuggcggggaccaucacguccggcuggaccuucggggccggcgccgcccugcagauccccuucgcgaugcagauggccuaccgguucaacggcugcggggucacccagaacgugcucuacgagaaccagaagcugaucgccaaccaguucaacagcgccaucggcaagauccaggacucccugagcuccaccgccagcgcgcucgggaagcugcaggacguggucaaccagaacgcccaggcccugaacacgcucgugaagcagcuguccagcaacuucggcgccaucuccagcgugcugaacgacauccucucccgccuggacaaggucgaggccgaggugcagaucgaccggcugaucaccgggcgccuccagagccugcagaccuacgugacccagcagcugauccgggcggccgagauccgcgccagcgccaaccucgccgcgaccaagauguccgagugcguccugggccagagcaagcggguggacuucugcggcaaggggugccaccugauguccuucccccagagcgccccgcacggcguggucuuccuccacgugacguacguccccgcccaggagaagaacuucaccaccgcccccgcgaucugccacgacgggaaggcccacuucccccgcgagggcguguucguguccaacgggacccacugguucgucacgcagcggaacuucuacgagccgcagaucaucaccaccgacaacaccuucgugagcggcaacugcgacguggucaucggcaucgugaacaacacgguguacgacccccugcagcccgagcuggacuccuucaaggaggagcucgacaaguacuucaagaaccacaccagccccgacgucgaccugggggacaucuccggcaucaacgccagcguggugaacauccagaaggagaucgaccgccugaacgaggucgccaagaaccucaacgagucccugaucgaccugcaggagcucgggaaguacgagcaguacaucaagggcggcgggagcgggggcgggcagaucuacgagggcaagcugaccgccgaggggcuccgcuucggcaucguggccagccgguucaaccacgcgcuggucgaccgccugguggagggggccaucgacgccaucgugcggcacggcgggcgcgaggaggacaucacccucguccgggugcccggcuccugggagaucccgguggccgccggcgagcuggcccgcaaggaggacaucgacgcggucaucgccaucggggugcugauccggggcgccacgccccacuucgacuacaucgccagcgagguguccaaggggcucgcggaccugagccuggagcuccgcaagcccaucaccuucggcgucaucaccgccgacacccuggagcaggccaucgagcgggccgggacgaagcacggcaacaagggcugggaggccgcgcuguccgccaucgagauggccaaccucuucaagagccugcgcugaggacuagucccuguucccagagcccacuuuuuuuucuuuuuuugaaauaaaauagccugucuuucagaucucaaaggcucuuuucagagccaccaaaaaaaaaaaaaaaaaaaaaaaaaaaaaaaaaaaaaaaaaaaaaaaaaaaaaaaaaaaaaaaaaaaaaaaaaaaaaaaaaaaaaaaaaaaaaaaaaaaaa

SEQ ID NO: 12363 - RNA, 4388 nt, Artificial Sequence
  SARS-CoV-2/Wuhan/WIV05/2019__EPI_ISL_402128 spike protein mRNA gc (1-1211)(Q965C_S1003C) LumSynth construct
aggagagucccgcagucggcguccagcggcucugcuuguucgugugugugucguugcaggccuuauucaagcuuaccauguucguguuccugguccuccugccccuggugagcucccagugcgugaaccucaccacccgcacgcagcugccgcccgccuacaccaacagcuucacccggggcgucuacuaccccgacaagguguuccgcuccagcgugcugcacuccacccaggaccucuuccugcccuucuucagcaacgucacgugguuccacgccauccacguguccgggaccaacggcaccaagcgguucgacaacccggugcugcccuucaacgacggggucuacuucgcgagcaccgagaaguccaacaucauccgcggcuggaucuucgggacgacccucgacagcaagacccagucccugcugaucgugaacaacgccaccaacguggucaucaaggugugcgaguuccaguucugcaacgaccccuuccucggcguguacuaccacaagaacaacaagagcuggauggaguccgaguuccgggucuacagcuccgccaacaacugcacguucgaguacgugagccagcccuuccugauggaccuggagggcaagcaggggaacuucaagaaccuccgcgaguucguguucaagaacaucgacggcuacuucaagaucuacuccaagcacaccccgaucaaccugguccgggaccugccccagggguucagcgcccucgagccccugguggaccugcccaucggcaucaacaucacccgcuuccagacccuccuggcccugcaccgguccuaccucacgccgggggacagcagcuccggcuggaccgcgggcgccgccgccuacuacgugggguaccugcagccccgcaccuuccugcucaaguacaacgagaacggcaccaucacggacgcggucgacugcgcccuggacccccugagcgagaccaagugcacccucaaguccuucaccguggagaaggggaucuaccagacgagcaacuuccgggugcagcccaccgaguccaucguccgcuucccgaacaucaccaaccugugccccuucggcgagguguucaacgccacccgguucgccagcgucuacgccuggaaccgcaagcggaucuccaacugcguggcggacuacagcgugcuguacaacuccgccagcuucuccacguucaagugcuacggcgucagccccaccaagcucaacgaccugugcuucaccaacguguacgccgacuccuucgugauccgcggggacgagguccggcagaucgcccccggccagaccgggaagaucgccgacuacaacuacaagcugccggacgacuucacgggcugcgugaucgcguggaacagcaacaaccucgacuccaaggucgggggcaacuacaacuaccuguaccgccuguuccgcaagagcaaccucaagcccuucgagcgggacaucuccaccgagaucuaccaggccggcagcacccccugcaacgggguggagggcuucaacugcuacuucccccugcaguccuacggguuccagccgaccaacggcgugggguaccagcccuaccggguggucgugcugagcuucgagcuccugcacgcccccgccacggugugcggccccaagaaguccaccaaccuggucaagaacaagugcgugaacuucaacuucaacggccucaccgggaccggcgugcugaccgagagcaacaagaaguuccugccguuccagcaguucgggcgcgacaucgccgacacgaccgacgcgguccgcgacccccagacccuggagauccucgacaucacccccugcagcuucggcgggguguccgugaucacgccgggcaccaacaccagcaaccaggucgccgugcuguaccaggacgugaacugcaccgagguccccguggccauccacgccgaccagcugacgcccaccuggcggguguacuccaccggcagcaacgucuuccagacccgcgccgggugccucaucggcgcggagcacgugaacaacuccuacgagugcgacauccccaucggggccggcaucugcgccagcuaccagacgcagaccaacuccccgcggcgcgcccggagcguggcgucccagagcaucaucgccuacaccaugucccugggcgccgagaacagcgucgccuacuccaacaacagcaucgccauccccaccaacuucacgaucuccgugaccaccgagauccugcccgugagcaugaccaagacgagcgucgacugcaccauguacaucugcggggacuccaccgagugcagcaaccuccugcugcaguacggcuccuucugcacccagcucaaccgcgcgcugacggggaucgccguggagcaggacaagaacacccaggagguguucgcccaggucaagcagaucuacaagacgcccccgaucaaggacuucggcggguucaacuucagccagauccugcccgaccccuccaagcccagcaagcgguccuucaucgaggaccuccuguucaacaaggugacccuggccgacgccggcuucaucaagcaguacggcgacugccucggggacaucgcggcccgcgaccugaucugcgcccagaaguucaacggccugaccgugcucccgccccugcugaccgacgagaugaucgcccaguacaccagcgcccuccuggcggggaccaucacguccggcuggaccuucggggccggcgccgcccugcagauccccuucgcgaugcagauggccuaccgguucaacggcaucggggucacccagaacgugcucuacgagaaccagaagcugaucgccaaccaguucaacagcgccaucggcaagauccaggacucccugagcuccaccgccagcgcgcucgggaagcugcaggacguggucaaccagaacgcccaggcccugaacacgcucgugaagugccuguccagcaacuucggcgccaucuccagcgugcugaacgacauccucucccgccuggacaaggucgaggccgaggugcagaucgaccggcugaucaccgggcgccuccagugccugcagaccuacgugacccagcagcugauccgggcggccgagauccgcgccagcgccaaccucgccgcgaccaagauguccgagugcguccugggccagagcaagcggguggacuucugcggcaagggguaccaccugauguccuucccccagagcgccccgcacggcguggucuuccuccacgugacguacguccccgcccaggagaagaacuucaccaccgcccccgcgaucugccacgacgggaaggcccacuucccccgcgagggcguguucguguccaacgggacccacugguucgucacgcagcggaacuucuacgagccgcagaucaucaccaccgacaacaccuucgugagcggcaacugcgacguggucaucggcaucgugaacaacacgguguacgacccccugcagcccgagcuggacuccuucaaggaggagcucgacaaguacuucaagaaccacaccagccccgacgucgaccugggggacaucuccggcaucaacgccagcguggugaacauccagaaggagaucgaccgccugaacgaggucgccaagaaccucaacgagucccugaucgaccugcaggagcucgggaaguacgagcaguacaucaagggcggcgggagcgggggcgggcagaucuacgagggcaagcugaccgccgaggggcuccgcuucggcaucguggccagccgguucaaccacgcgcuggucgaccgccugguggagggggccaucgacgccaucgugcggcacggcgggcgcgaggaggacaucacccucguccgggugcccggcuccugggagaucccgguggccgccggcgagcuggcccgcaaggaggacaucgacgcggucaucgccaucggggugcugauccggggcgccacgccccacuucgacuacaucgccagcgagguguccaaggggcucgcggaccugagccuggagcuccgcaagcccaucaccuucggcgucaucaccgccgacacccuggagcaggccaucgagcgggccgggacgaagcacggcaacaagggcugggaggccgcgcuguccgccaucgagauggccaaccucuucaagagccugcgcugaggacuagucccuguucccagagcccacuuuuuuuucuuuuuuugaaauaaaauagccugucuuucagaucucaaaggcucuuuucagagccaccaaaaaaaaaaaaaaaaaaaaaaaaaaaaaaaaaaaaaaaaaaaaaaaaaaaaaaaaaaaaaaaaaaaaaaaaaaaaaaaaaaaaaaaaaaaaaaaaaaaaa

SEQ ID NO: 12364 - RNA, 4388 nt, Artificial Sequence
  SARS-CoV-2/Wuhan/WIV05/2019__EPI_ISL_402128 spike protein mRNA gc (1-1211)(F970C_G999C) LumSynth construct
aggagagucccgcagucggcguccagcggcucugcuuguucgugugugugucguugcaggccuuauucaagcuuaccauguucguguuccugguccuccugccccuggugagcucccagugcgugaaccucaccacccgcacgcagcugccgcccgccuacaccaacagcuucacccggggcgucuacuaccccgacaagguguuccgcuccagcgugcugcacuccacccaggaccucuuccugcccuucuucagcaacgucacgugguuccacgccauccacguguccgggaccaacggcaccaagcgguucgacaacccggugcugcccuucaacgacggggucuacuucgcgagcaccgagaaguccaacaucauccgcggcuggaucuucgggacgacccucgacagcaagacccagucccugcugaucgugaacaacgccaccaacguggucaucaaggugugcgaguuccaguucugcaacgaccccuuccucggcguguacuaccacaagaacaacaagagcuggauggaguccgaguuccgggucuacagcuccgccaacaacugcacguucgaguacgugagccagcccuuccugauggaccuggagggcaagcaggggaacuucaagaaccuccgcgaguucguguucaagaacaucgacggcuacuucaagaucuacuccaagcacaccccgaucaaccugguccgggaccugccccagggguucagcgcccucgagccccugguggaccugcccaucggcaucaacaucacccgcuuccagacccuccuggcccugcaccgguccuaccucacgccgggggacagcagcuccggcuggaccgcgggcgccgccgccuacuacgugggguaccugcagccccgcaccuuccugcucaaguacaacgagaacggcaccaucacggacgcggucgacugcgcccuggacccccugagcgagaccaagugcacccucaaguccuucaccguggagaaggggaucuaccagacgagcaacuuccgggugcagcccaccgaguccaucguccgcuucccgaacaucaccaaccugugccccuucggcgagguguucaacgccacccgguucgccagcgucuacgccuggaaccgcaagcggaucuccaacugcguggcggacuacagcgugcuguacaacuccgccagcuucuccacguucaagugcuacggcgucagccccaccaagcucaacgaccugugcuucaccaacguguacgccgacuccuucgugauccgcggggacgagguccggcagaucgcccccggccagaccgggaagaucgccgacuacaacuacaagcugccggacgacuucacgggcugcgugaucgcguggaacagcaacaaccucgacuccaaggucgggggcaacuacaacuaccuguaccgccuguuccgcaagagcaaccucaagcccuucgagcgggacaucuccaccgagaucuaccaggccggcagcacccccugcaacgggguggagggcuucaacugcuacuucccccugcaguccuacggguuccagccgaccaacggcgugggguaccagcccuaccggguggucgugcugagcuucgagcuccugcacgcccccgccacggugugcggccccaagaaguccaccaaccuggucaagaacaagugcgugaacuucaacuucaacggccucaccgggaccggcgugcugaccgagagcaacaagaaguuccugccguuccagcaguucgggcgcgacaucgccgacacgaccgacgcgguccgcgacccccagacccuggagauccucgacaucacccccugcagcuucggcgggguguccgugaucacgccgggcaccaacaccagcaaccaggucgccgugcuguaccaggacgugaacugcaccgagguccccguggccauccacgccgaccagcugacgcccaccuggcggguguacuccaccggcagcaacgucuuccagacccgcgccgggugccucaucggcgcggagcacgugaacaacuccuacgagugcgacauccccaucggggccggcaucugcgccagcuaccagacgcagaccaacuccccgcggcgcgcccggagcguggcgucccagagcaucaucgccuacaccaugucccugggcgccgagaacagcgucgccuacuccaacaacagcaucgccauccccaccaacuucacgaucuccgugaccaccgagauccugcccgugagcaugaccaagacgagcgucgacugcaccauguacaucugcggggacuccaccgagugcagcaaccuccugcugcaguacggcuccuucugcacccagcucaaccgcgcgcugacggggaucgccguggagcaggacaagaacacccaggagguguucgcccaggucaagcagaucuacaagacgcccccgaucaaggacuucggcggguucaacuucagccagauccugcccgaccccuccaagcccagcaagcgguccuucaucgaggaccuccuguucaacaaggugacccuggccgacgccggcuucaucaagcaguacggcgacugccucggggacaucgcggcccgcgaccugaucugcgcccagaaguucaacggccugaccgugcucccgccccugcugaccgacgagaugaucgcccaguacaccagcgcccuccuggcggggaccaucacguccggcuggaccuucggggccggcgccgcccugcagauccccuucgcgaugcagauggccuaccgguucaacggcaucggggucacccagaacgugcucuacgagaaccagaagcugaucgccaaccaguucaacagcgccaucggcaagauccaggacucccugagcuccaccgccagcgcgcucgggaagcugcaggacguggucaaccagaacgcccaggcccugaacacgcucgugaagcagcuguccagcaacugcggcgccaucuccagcgugcugaacgacauccucucccgccuggacaaggucgaggccgaggugcagaucgaccggcugaucaccugucgccuccagagccugcagaccuacgugacccagcagcugauccgggcggccgagauccgcgccagcgccaaccucgccgcgaccaagauguccgagugcguccugggccagagcaagcggguggacuucugcggcaagggguaccaccugauguccuucccccagagcgccccgcacggcguggucuuccuccacgugacguacguccccgcccaggagaagaacuucaccaccgcccccgcgaucugccacgacgggaaggcccacuucccccgcgagggcguguucguguccaacgggacccacugguucgucacgcagcggaacuucuacgagccgcagaucaucaccaccgacaacaccuucgugagcggcaacugcgacguggucaucggcaucgugaacaacacgguguacgacccccugcagcccgagcuggacuccuucaaggaggagcucgacaaguacuucaagaaccacaccagccccgacgucgaccugggggacaucuccggcaucaacgccagcguggugaacauccagaaggagaucgaccgccugaacgaggucgccaagaaccucaacgagucccugaucgaccugcaggagcucgggaaguacgagcaguacaucaagggcggcgggagcgggggcgggcagaucuacgagggcaagcugaccgccgaggggcuccgcuucggcaucguggccagccgguucaaccacgcgcuggucgaccgccugguggagggggccaucgacgccaucgugcggcacggcgggcgcgaggaggacaucacccucguccgggugcccggcuccugggagaucccgguggccgccggcgagcuggcccgcaaggaggacaucgacgcggucaucgccaucggggugcugauccggggcgccacgccccacuucgacuacaucgccagcgagguguccaaggggcucgcggaccugagccuggagcuccgcaagcccaucaccuucggcgucaucaccgccgacacccuggagcaggccaucgagcgggccgggacgaagcacggcaacaagggcugggaggccgcgcuguccgccaucgagauggccaaccucuucaagagccugcgcugaggacuagucccuguucccagagcccacuuuuuuuucuuuuuuugaaauaaaauagccugucuuucagaucucaaaggcucuuuucagagccaccaaaaaaaaaaaaaaaaaaaaaaaaaaaaaaaaaaaaaaaaaaaaaaaaaaaaaaaaaaaaaaaaaaaaaaaaaaaaaaaaaaaaaaaaaaaaaaaaaaaaa

SEQ ID NO: 12365 - RNA, 4388 nt, Artificial Sequence
  SARS-CoV-2/Wuhan/WIV05/2019__EPI_ISL_402128 spike protein mRNA gc (1-1211)(A972C_R995C) LumSynth construct
aggagagucccgcagucggcguccagcggcucugcuuguucgugugugugucguugcaggccuuauucaagcuuaccauguucguguuccugguccuccugccccuggugagcucccagugcgugaaccucaccacccgcacgcagcugccgcccgccuacaccaacagcuucacccggggcgucuacuaccccgacaagguguuccgcuccagcgugcugcacuccacccaggaccucuuccugcccuucuucagcaacgucacgugguuccacgccauccacguguccgggaccaacggcaccaagcgguucgacaacccggugcugcccuucaacgacggggucuacuucgcgagcaccgagaaguccaacaucauccgcggcuggaucuucgggacgacccucgacagcaagacccagucccugcugaucgugaacaacgccaccaacguggucaucaaggugugcgaguuccaguucugcaacgaccccuuccucggcguguacuaccacaagaacaacaagagcuggauggaguccgaguuccgggucuacagcuccgccaacaacugcacguucgaguacgugagccagcccuuccugauggaccuggagggcaagcaggggaacuucaagaaccuccgcgaguucguguucaagaacaucgacggcuacuucaagaucuacuccaagcacaccccgaucaaccugguccgggaccugccccagggguucagcgcccucgagccccugguggaccugcccaucggcaucaacaucacccgcuuccagacccuccuggcccugcaccgguccuaccucacgccgggggacagcagcuccggcuggaccgcgggcgccgccgccuacuacgugggguaccugcagccccgcaccuuccugcucaaguacaacgagaacggcaccaucacggacgcggucgacugcgcccuggacccccugagcgagaccaagugcacccucaaguccuucaccguggagaaggggaucuaccagacgagcaacuuccgggugcagcccaccgaguccaucguccgcuucccgaacaucaccaaccugugccccuucggcgagguguucaacgccacccgguucgccagcgucuacgccuggaaccgcaagcggaucuccaacugcguggcggacuacagcgugcuguacaacuccgccagcuucuccacguucaagugcuacggcgucagccccaccaagcucaacgaccugugcuucaccaacguguacgccgacuccuucgugauccgcggggacgagguccggcagaucgcccccggccagaccgggaagaucgccgacuacaacuacaagcugccggacgacuucacgggcugcgugaucgcguggaacagcaacaaccucgacuccaaggucgggggcaacuacaacuaccuguaccgccuguuccgcaagagcaaccucaagcccuucgagcgggacaucuccaccgagaucuaccaggccggcagcacccccugcaacgggguggagggcuucaacugcuacuucccccugcaguccuacggguuccagccgaccaacggcgugggguaccagcccuaccggguggucgugcugagcuucgagcuccugcacgcccccgccacggugugcggccccaagaaguccaccaaccuggucaagaacaagugcgugaacuucaacuucaacggccucaccgggaccggcgugcugaccgagagcaacaagaaguuccugccguuccagcaguucgggcgcgacaucgccgacacgaccgacgcgguccgcgacccccagacccuggagauccucgacaucacccccugcagcuucggcgggguguccgugaucacgccgggcaccaacaccagcaaccaggucgccgugcuguaccaggacgugaacugcaccgagguccccguggccauccacgccgaccagcugacgcccaccuggcggguguacuccaccggcagcaacgucuuccagacccgcgccgggugccucaucggcgcggagcacgugaacaacuccuacgagugcgacauccccaucggggccggcaucugcgccagcuaccagacgcagaccaacuccccgcggcgcgcccggagcguggcgucccagagcaucaucgccuacaccaugucccugggcgccgagaacagcgucgccuacuccaacaacagcaucgccauccccaccaacuucacgaucuccgugaccaccgagauccugcccgugagcaugaccaagacgagcgucgacugcaccauguacaucugcggggacuccaccgagugcagcaaccuccugcugcaguacggcuccuucugcacccagcucaaccgcgcgcugacggggaucgccguggagcaggacaagaacacccaggagguguucgcccaggucaagcagaucuacaagacgcccccgaucaaggacuucggcggguucaacuucagccagauccugcccgaccccuccaagcccagcaagcgguccuucaucgaggaccuccuguucaacaaggugacccuggccgacgccggcuucaucaagcaguacggcgacugccucggggacaucgcggcccgcgaccugaucugcgcccagaaguucaacggccugaccgugcucccgccccugcugaccgacgagaugaucgcccaguacaccagcgcccuccuggcggggaccaucacguccggcuggaccuucggggccggcgccgcccugcagauccccuucgcgaugcagauggccuaccgguucaacggcaucggggucacccagaacgugcucuacgagaaccagaagcugaucgccaaccaguucaacagcgccaucggcaagauccaggacucccugagcuccaccgccagcgcgcucgggaagcugcaggacguggucaaccagaacgcccaggcccugaacacgcucgugaagcagcuguccagcaacuucggcugcaucuccagcgugcugaacgacauccucucccgccuggacaaggucgaggccgaggugcagaucgacugccugaucaccgggcgccuccagagccugcagaccuacgugacccagcagcugauccgggcggccgagauccgcgccagcgccaaccucgccgcgaccaagauguccgagugcguccugggccagagcaagcggguggacuucugcggcaagggguaccaccugauguccuucccccagagcgccccgcacggcguggucuuccuccacgugacguacguccccgcccaggagaagaacuucaccaccgcccccgcgaucugccacgacgggaaggcccacuucccccgcgagggcguguucguguccaacgggacccacugguucgucacgcagcggaacuucuacgagccgcagaucaucaccaccgacaacaccuucgugagcggcaacugcgacguggucaucggcaucgugaacaacacgguguacgacccccugcagcccgagcuggacuccuucaaggaggagcucgacaaguacuucaagaaccacaccagccccgacgucgaccugggggacaucuccggcaucaacgccagcguggugaacauccagaaggagaucgaccgccugaacgaggucgccaagaaccucaacgagucccugaucgaccugcaggagcucgggaaguacgagcaguacaucaagggcggcgggagcgggggcgggcagaucuacgagggcaagcugaccgccgaggggcuccgcuucggcaucguggccagccgguucaaccacgcgcuggucgaccgccugguggagggggccaucgacgccaucgugcggcacggcgggcgcgaggaggacaucacccucguccgggugcccggcuccugggagaucccgguggccgccggcgagcuggcccgcaaggaggacaucgacgcggucaucgccaucggggugcugauccggggcgccacgccccacuucgacuacaucgccagcgagguguccaaggggcucgcggaccugagccuggagcuccgcaagcccaucaccuucggcgucaucaccgccgacacccuggagcaggccaucgagcgggccgggacgaagcacggcaacaagggcugggaggccgcgcuguccgccaucgagauggccaaccucuucaagagccugcgcugaggacuagucccuguucccagagcccacuuuuuuuucuuuuuuugaaauaaaauagccugucuuucagaucucaaaggcucuuuucagagccaccaaaaaaaaaaaaaaaaaaaaaaaaaaaaaaaaaaaaaaaaaaaaaaaaaaaaaaaaaaaaaaaaaaaaaaaaaaaaaaaaaaaaaaaaaaaaaaaaaaaaa

SEQ ID NO: 12366 - RNA, 4388 nt, Artificial Sequence
  SARS-CoV-2/Wuhan/WIV05/2019__EPI_ISL_402128 spike protein mRNA gc (1-1211)(A890C_V1040C) LumSynth construct
aggagagucccgcagucggcguccagcggcucugcuuguucgugugugugucguugcaggccuuauucaagcuuaccauguucguguuccugguccuccugccccuggugagcucccagugcgugaaccucaccacccgcacgcagcugccgcccgccuacaccaacagcuucacccggggcgucuacuaccccgacaagguguuccgcuccagcgugcugcacuccacccaggaccucuuccugcccuucuucagcaacgucacgugguuccacgccauccacguguccgggaccaacggcaccaagcgguucgacaacccggugcugcccuucaacgacggggucuacuucgcgagcaccgagaaguccaacaucauccgcggcuggaucuucgggacgacccucgacagcaagacccagucccugcugaucgugaacaacgccaccaacguggucaucaaggugugcgaguuccaguucugcaacgaccccuuccucggcguguacuaccacaagaacaacaagagcuggauggaguccgaguuccgggucuacagcuccgccaacaacugcacguucgaguacgugagccagcccuuccugauggaccuggagggcaagcaggggaacuucaagaaccuccgcgaguucguguucaagaacaucgacggcuacuucaagaucuacuccaagcacaccccgaucaaccugguccgggaccugccccagggguucagcgcccucgagccccugguggaccugcccaucggcaucaacaucacccgcuuccagacccuccuggcccugcaccgguccuaccucacgccgggggacagcagcuccggcuggaccgcgggcgccgccgccuacuacgugggguaccugcagccccgcaccuuccugcucaaguacaacgagaacggcaccaucacggacgcggucgacugcgcccuggacccccugagcgagaccaagugcacccucaaguccuucaccguggagaaggggaucuaccagacgagcaacuuccgggugcagcccaccgaguccaucguccgcuucccgaacaucaccaaccugugccccuucggcgagguguucaacgccacccgguucgccagcgucuacgccuggaaccgcaagcggaucuccaacugcguggcggacuacagcgugcuguacaacuccgccagcuucuccacguucaagugcuacggcgucagccccaccaagcucaacgaccugugcuucaccaacguguacgccgacuccuucgugauccgcggggacgagguccggcagaucgcccccggccagaccgggaagaucgccgacuacaacuacaagcugccggacgacuucacgggcugcgugaucgcguggaacagcaacaaccucgacuccaaggucgggggcaacuacaacuaccuguaccgccuguuccgcaagagcaaccucaagcccuucgagcgggacaucuccaccgagaucuaccaggccggcagcacccccugcaacgggguggagggcuucaacugcuacuucccccugcaguccuacggguuccagccgaccaacggcgugggguaccagcccuaccggguggucgugcugagcuucgagcuccugcacgcccccgccacggugugcggccccaagaaguccaccaaccuggucaagaacaagugcgugaacuucaacuucaacggccucaccgggaccggcgugcugaccgagagcaacaagaaguuccugccguuccagcaguucgggcgcgacaucgccgacacgaccgacgcgguccgcgacccccagacccuggagauccucgacaucacccccugcagcuucggcgggguguccgugaucacgccgggcaccaacaccagcaaccaggucgccgugcuguaccaggacgugaacugcaccgagguccccguggccauccacgccgaccagcugacgcccaccuggcggguguacuccaccggcagcaacgucuuccagacccgcgccgggugccucaucggcgcggagcacgugaacaacuccuacgagugcgacauccccaucggggccggcaucugcgccagcuaccagacgcagaccaacuccccgcggcgcgcccggagcguggcgucccagagcaucaucgccuacaccaugucccugggcgccgagaacagcgucgccuacuccaacaacagcaucgccauccccaccaacuucacgaucuccgugaccaccgagauccugcccgugagcaugaccaagacgagcgucgacugcaccauguacaucugcggggacuccaccgagugcagcaaccuccugcugcaguacggcuccuucugcacccagcucaaccgcgcgcugacggggaucgccguggagcaggacaagaacacccaggagguguucgcccaggucaagcagaucuacaagacgcccccgaucaaggacuucggcggguucaacuucagccagauccugcccgaccccuccaagcccagcaagcgguccuucaucgaggaccuccuguucaacaaggugacccuggccgacgccggcuucaucaagcaguacggcgacugccucggggacaucgcggcccgcgaccugaucugcgcccagaaguucaacggccugaccgugcucccgccccugcugaccgacgagaugaucgcccaguacaccagcgcccuccuggcggggaccaucacguccggcuggaccuucgggugcggcgccgcccugcagauccccuucgcgaugcagauggccuaccgguucaacggcaucggggucacccagaacgugcucuacgagaaccagaagcugaucgccaaccaguucaacagcgccaucggcaagauccaggacucccugagcuccaccgccagcgcgcucgggaagcugcaggacguggucaaccagaacgcccaggcccugaacacgcucgugaagcagcuguccagcaacuucggcgccaucuccagcgugcugaacgacauccucucccgccuggacaaggucgaggccgaggugcagaucgaccggcugaucaccgggcgccuccagagccugcagaccuacgugacccagcagcugauccgggcggccgagauccgcgccagcgccaaccucgccgcgaccaagauguccgagugcguccugggccagagcaagcggugcgacuucugcggcaagggguaccaccugauguccuucccccagagcgccccgcacggcguggucuuccuccacgugacguacguccccgcccaggagaagaacuucaccaccgcccccgcgaucugccacgacgggaaggcccacuucccccgcgagggcguguucguguccaacgggacccacugguucgucacgcagcggaacuucuacgagccgcagaucaucaccaccgacaacaccuucgugagcggcaacugcgacguggucaucggcaucgugaacaacacgguguacgacccccugcagcccgagcuggacuccuucaaggaggagcucgacaaguacuucaagaaccacaccagccccgacgucgaccugggggacaucuccggcaucaacgccagcguggugaacauccagaaggagaucgaccgccugaacgaggucgccaagaaccucaacgagucccugaucgaccugcaggagcucgggaaguacgagcaguacaucaagggcggcgggagcgggggcgggcagaucuacgagggcaagcugaccgccgaggggcuccgcuucggcaucguggccagccgguucaaccacgcgcuggucgaccgccugguggagggggccaucgacgccaucgugcggcacggcgggcgcgaggaggacaucacccucguccgggugcccggcuccugggagaucccgguggccgccggcgagcuggcccgcaaggaggacaucgacgcggucaucgccaucggggugcugauccggggcgccacgccccacuucgacuacaucgccagcgagguguccaaggggcucgcggaccugagccuggagcuccgcaagcccaucaccuucggcgucaucaccgccgacacccuggagcaggccaucgagcgggccgggacgaagcacggcaacaagggcugggaggccgcgcuguccgccaucgagauggccaaccucuucaagagccugcgcugaggacuagucccuguucccagagcccacuuuuuuuucuuuuuuugaaauaaaauagccugucuuucagaucucaaaggcucuuuucagagccaccaaaaaaaaaaaaaaaaaaaaaaaaaaaaaaaaaaaaaaaaaaaaaaaaaaaaaaaaaaaaaaaaaaaaaaaaaaaaaaaaaaaaaaaaaaaaaaaaaaaaa

SEQ ID NO: 12367 - RNA, 4388 nt, Artificial Sequence
  SARS-CoV-2/Wuhan/WIV05/2019__EPI_ISL_402128 spike protein mRNA gc (1-1211)(T874C_S1055C) LumSynth construct
aggagagucccgcagucggcguccagcggcucugcuuguucgugugugugucguugcaggccuuauucaagcuuaccauguucguguuccugguccuccugccccuggugagcucccagugcgugaaccucaccacccgcacgcagcugccgcccgccuacaccaacagcuucacccggggcgucuacuaccccgacaagguguuccgcuccagcgugcugcacuccacccaggaccucuuccugcccuucuucagcaacgucacgugguuccacgccauccacguguccgggaccaacggcaccaagcgguucgacaacccggugcugcccuucaacgacggggucuacuucgcgagcaccgagaaguccaacaucauccgcggcuggaucuucgggacgacccucgacagcaagacccagucccugcugaucgugaacaacgccaccaacguggucaucaaggugugcgaguuccaguucugcaacgaccccuuccucggcguguacuaccacaagaacaacaagagcuggauggaguccgaguuccgggucuacagcuccgccaacaacugcacguucgaguacgugagccagcccuuccugauggaccuggagggcaagcaggggaacuucaagaaccuccgcgaguucguguucaagaacaucgacggcuacuucaagaucuacuccaagcacaccccgaucaaccugguccgggaccugccccagggguucagcgcccucgagccccugguggaccugcccaucggcaucaacaucacccgcuuccagacccuccuggcccugcaccgguccuaccucacgccgggggacagcagcuccggcuggaccgcgggcgccgccgccuacuacgugggguaccugcagccccgcaccuuccugcucaaguacaacgagaacggcaccaucacggacgcggucgacugcgcccuggacccccugagcgagaccaagugcacccucaaguccuucaccguggagaaggggaucuaccagacgagcaacuuccgggugcagcccaccgaguccaucguccgcuucccgaacaucaccaaccugugccccuucggcgagguguucaacgccacccgguucgccagcgucuacgccuggaaccgcaagcggaucuccaacugcguggcggacuacagcgugcuguacaacuccgccagcuucuccacguucaagugcuacggcgucagccccaccaagcucaacgaccugugcuucaccaacguguacgccgacuccuucgugauccgcggggacgagguccggcagaucgcccccggccagaccgggaagaucgccgacuacaacuacaagcugccggacgacuucacgggcugcgugaucgcguggaacagcaacaaccucgacuccaaggucgggggcaacuacaacuaccuguaccgccuguuccgcaagagcaaccucaagcccuucgagcgggacaucuccaccgagaucuaccaggccggcagcacccccugcaacgggguggagggcuucaacugcuacuucccccugcaguccuacggguuccagccgaccaacggcgugggguaccagcccuaccggguggucgugcugagcuucgagcuccugcacgcccccgccacggugugcggccccaagaaguccaccaaccuggucaagaacaagugcgugaacuucaacuucaacggccucaccgggaccggcgugcugaccgagagcaacaagaaguuccugccguuccagcaguucgggcgcgacaucgccgacacgaccgacgcgguccgcgacccccagacccuggagauccucgacaucacccccugcagcuucggcgggguguccgugaucacgccgggcaccaacaccagcaaccaggucgccgugcuguaccaggacgugaacugcaccgagguccccguggccauccacgccgaccagcugacgcccaccuggcggguguacuccaccggcagcaacgucuuccagacccgcgccgggugccucaucggcgcggagcacgugaacaacuccuacgagugcgacauccccaucggggccggcaucugcgccagcuaccagacgcagaccaacuccccgcggcgcgcccggagcguggcgucccagagcaucaucgccuacaccaugucccugggcgccgagaacagcgucgccuacuccaacaacagcaucgccauccccaccaacuucacgaucuccgugaccaccgagauccugcccgugagcaugaccaagacgagcgucgacugcaccauguacaucugcggggacuccaccgagugcagcaaccuccugcugcaguacggcuccuucugcacccagcucaaccgcgcgcugacggggaucgccguggagcaggacaagaacacccaggagguguucgcccaggucaagcagaucuacaagacgcccccgaucaaggacuucggcggguucaacuucagccagauccugcccgaccccuccaagcccagcaagcgguccuucaucgaggaccuccuguucaacaaggugacccuggccgacgccggcuucaucaagcaguacggcgacugccucggggacaucgcggcccgcgaccugaucugcgcccagaaguucaacggccugaccgugcucccgccccugcugaccgacgagaugaucgcccaguacugcagcgcccuccuggcggggaccaucacguccggcuggaccuucggggccggcgccgcccugcagauccccuucgcgaugcagauggccuaccgguucaacggcaucggggucacccagaacgugcucuacgagaaccagaagcugaucgccaaccaguucaacagcgccaucggcaagauccaggacucccugagcuccaccgccagcgcgcucgggaagcugcaggacguggucaaccagaacgcccaggcccugaacacgcucgugaagcagcuguccagcaacuucggcgccaucuccagcgugcugaacgacauccucucccgccuggacaaggucgaggccgaggugcagaucgaccggcugaucaccgggcgccuccagagccugcagaccuacgugacccagcagcugauccgggcggccgagauccgcgccagcgccaaccucgccgcgaccaagauguccgagugcguccugggccagagcaagcggguggacuucugcggcaagggguaccaccugauguccuucccccagugcgccccgcacggcguggucuuccuccacgugacguacguccccgcccaggagaagaacuucaccaccgcccccgcgaucugccacgacgggaaggcccacuucccccgcgagggcguguucguguccaacgggacccacugguucgucacgcagcggaacuucuacgagccgcagaucaucaccaccgacaacaccuucgugagcggcaacugcgacguggucaucggcaucgugaacaacacgguguacgacccccugcagcccgagcuggacuccuucaaggaggagcucgacaaguacuucaagaaccacaccagccccgacgucgaccugggggacaucuccggcaucaacgccagcguggugaacauccagaaggagaucgaccgccugaacgaggucgccaagaaccucaacgagucccugaucgaccugcaggagcucgggaaguacgagcaguacaucaagggcggcgggagcgggggcgggcagaucuacgagggcaagcugaccgccgaggggcuccgcuucggcaucguggccagccgguucaaccacgcgcuggucgaccgccugguggagggggccaucgacgccaucgugcggcacggcgggcgcgaggaggacaucacccucguccgggugcccggcuccugggagaucccgguggccgccggcgagcuggcccgcaaggaggacaucgacgcggucaucgccaucggggugcugauccggggcgccacgccccacuucgacuacaucgccagcgagguguccaaggggcucgcggaccugagccuggagcuccgcaagcccaucaccuucggcgucaucaccgccgacacccuggagcaggccaucgagcgggccgggacgaagcacggcaacaagggcugggaggccgcgcuguccgccaucgagauggccaaccucuucaagagccugcgcugaggacuagucccuguucccagagcccacuuuuuuuucuuuuuuugaaauaaaauagccugucuuucagaucucaaaggcucuuuucagagccaccaaaaaaaaaaaaaaaaaaaaaaaaaaaaaaaaaaaaaaaaaaaaaaaaaaaaaaaaaaaaaaaaaaaaaaaaaaaaaaaaaaaaaaaaaaaaaaaaaaaaa

SEQ ID NO: 12368 - RNA, 4412 nt, Artificial Sequence
  SARS-CoV-2/Wuhan/WIV05/2019__EPI_ISL_402128 spike protein mRNA gc (1-1211) Ferritin construct
aggagagucccgcagucggcguccagcggcucugcuuguucgugugugugucguugcaggccuuauucaagcuuaccauguucguguuccugguccuccugccccuggugagcucccagugcgugaaccucaccacccgcacgcagcugccgcccgccuacaccaacagcuucacccggggcgucuacuaccccgacaagguguuccgcuccagcgugcugcacuccacccaggaccucuuccugcccuucuucagcaacgucacgugguuccacgccauccacguguccgggaccaacggcaccaagcgguucgacaacccggugcugcccuucaacgacggggucuacuucgcgagcaccgagaaguccaacaucauccgcggcuggaucuucgggacgacccucgacagcaagacccagucccugcugaucgugaacaacgccaccaacguggucaucaaggugugcgaguuccaguucugcaacgaccccuuccucggcguguacuaccacaagaacaacaagagcuggauggaguccgaguuccgggucuacagcuccgccaacaacugcacguucgaguacgugagccagcccuuccugauggaccuggagggcaagcaggggaacuucaagaaccuccgcgaguucguguucaagaacaucgacggcuacuucaagaucuacuccaagcacaccccgaucaaccugguccgggaccugccccagggguucagcgcccucgagccccugguggaccugcccaucggcaucaacaucacccgcuuccagacccuccuggcccugcaccgguccuaccucacgccgggggacagcagcuccggcuggaccgcgggcgccgccgccuacuacgugggguaccugcagccccgcaccuuccugcucaaguacaacgagaacggcaccaucacggacgcggucgacugcgcccuggacccccugagcgagaccaagugcacccucaaguccuucaccguggagaaggggaucuaccagacgagcaacuuccgggugcagcccaccgaguccaucguccgcuucccgaacaucaccaaccugugccccuucggcgagguguucaacgccacccgguucgccagcgucuacgccuggaaccgcaagcggaucuccaacugcguggcggacuacagcgugcuguacaacuccgccagcuucuccacguucaagugcuacggcgucagccccaccaagcucaacgaccugugcuucaccaacguguacgccgacuccuucgugauccgcggggacgagguccggcagaucgcccccggccagaccgggaagaucgccgacuacaacuacaagcugccggacgacuucacgggcugcgugaucgcguggaacagcaacaaccucgacuccaaggucgggggcaacuacaacuaccuguaccgccuguuccgcaagagcaaccucaagcccuucgagcgggacaucuccaccgagaucuaccaggccggcagcacccccugcaacgggguggagggcuucaacugcuacuucccccugcaguccuacggguuccagccgaccaacggcgugggguaccagcccuaccggguggucgugcugagcuucgagcuccugcacgcccccgccacggugugcggccccaagaaguccaccaaccuggucaagaacaagugcgugaacuucaacuucaacggccucaccgggaccggcgugcugaccgagagcaacaagaaguuccugccguuccagcaguucgggcgcgacaucgccgacacgaccgacgcgguccgcgacccccagacccuggagauccucgacaucacccccugcagcuucggcgggguguccgugaucacgccgggcaccaacaccagcaaccaggucgccgugcuguaccaggacgugaacugcaccgagguccccguggccauccacgccgaccagcugacgcccaccuggcggguguacuccaccggcagcaacgucuuccagacccgcgccgggugccucaucggcgcggagcacgugaacaacuccuacgagugcgacauccccaucggggccggcaucugcgccagcuaccagacgcagaccaacuccccgcggcgcgcccggagcguggcgucccagagcaucaucgccuacaccaugucccugggcgccgagaacagcgucgccuacuccaacaacagcaucgccauccccaccaacuucacgaucuccgugaccaccgagauccugcccgugagcaugaccaagacgagcgucgacugcaccauguacaucugcggggacuccaccgagugcagcaaccuccugcugcaguacggcuccuucugcacccagcucaaccgcgcgcugacggggaucgccguggagcaggacaagaacacccaggagguguucgcccaggucaagcagaucuacaagacgcccccgaucaaggacuucggcggguucaacuucagccagauccugcccgaccccuccaagcccagcaagcgguccuucaucgaggaccuccuguucaacaaggugacccuggccgacgccggcuucaucaagcaguacggcgacugccucggggacaucgcggcccgcgaccugaucugcgcccagaaguucaacggccugaccgugcucccgccccugcugaccgacgagaugaucgcccaguacaccagcgcccuccuggcggggaccaucacguccggcuggaccuucggggccggcgccgcccugcagauccccuucgcgaugcagauggccuaccgguucaacggcaucggggucacccagaacgugcucuacgagaaccagaagcugaucgccaaccaguucaacagcgccaucggcaagauccaggacucccugagcuccaccgccagcgcgcucgggaagcugcaggacguggucaaccagaacgcccaggcccugaacacgcucgugaagcagcuguccagcaacuucggcgccaucuccagcgugcugaacgacauccucucccgccuggacaaggucgaggccgaggugcagaucgaccggcugaucaccgggcgccuccagagccugcagaccuacgugacccagcagcugauccgggcggccgagauccgcgccagcgccaaccucgccgcgaccaagauguccgagugcguccugggccagagcaagcggguggacuucugcggcaagggguaccaccugauguccuucccccagagcgccccgcacggcguggucuuccuccacgugacguacguccccgcccaggagaagaacuucaccaccgcccccgcgaucugccacgacgggaaggcccacuucccccgcgagggcguguucguguccaacgggacccacugguucgucacgcagcggaacuucuacgagccgcagaucaucaccaccgacaacaccuucgugagcggcaacugcgacguggucaucggcaucgugaacaacacgguguacgacccccugcagcccgagcuggacuccuucaaggaggagcucgacaaguacuucaagaaccacaccagccccgacgucgaccugggggacaucuccggcaucaacgccagcguggugaacauccagaaggagaucgaccgccugaacgaggucgccaagaaccucaacgagucccugaucgaccugcaggagcucgggaaguacgagcaguacaucaagggcgggggcgggagcgacaucaucaagcuccugaacgagcaggucaacaaggagaugcaguccagcaaccuguacauguccaugagcuccuggugcuacacccacagccucgacggcgccgggcuguuccuguucgaccacgccgcggaggaguacgagcacgccaagaagcucaucaucuuccugaacgagaacaacgugcccgugcagcugaccuccaucagcgccccggagcacaaguucgagggccucacgcagaucuuccagaaggccuacgagcacgagcagcacaucuccgagagcaucaacaacaucguggaccacgccaucaaguccaaggaccacgcgaccuucaacuuccugcagugguacgucgccgagcagcacgaggaggaggugcuguucaaggacauccucgacaagaucgagcugaucgggaacgagaaccacggccuguaccucgccgaccaguacgugaaggggaucgccaagagccgcaaguccugaggacuagucccuguucccagagcccacuuuuuuuucuuuuuuugaaauaaaauagccugucuuucagaucucaaaggcucuuuucagagccaccaaaaaaaaaaaaaaaaaaaaaaaaaaaaaaaaaaaaaaaaaaaaaaaaaaaaaaaaaaaaaaaaaaaaaaaaaaaaaaaaaaaaaaaaaaaaaaaaaaaaa

SEQ ID NO: 12369 - RNA, 4412 nt, Artificial Sequence
  SARS-CoV-2/Wuhan/WIV05/2019__EPI_ISL_402128 spike protein mRNA gc (1-1211)(K986P_V987P) Ferritin construct
aggagagucccgcagucggcguccagcggcucugcuuguucgugugugugucguugcaggccuuauucaagcuuaccauguucguguuccugguccuccugccccuggugagcucccagugcgugaaccucaccacccgcacgcagcugccgcccgccuacaccaacagcuucacccggggcgucuacuaccccgacaagguguuccgcuccagcgugcugcacuccacccaggaccucuuccugcccuucuucagcaacgucacgugguuccacgccauccacguguccgggaccaacggcaccaagcgguucgacaacccggugcugcccuucaacgacggggucuacuucgcgagcaccgagaaguccaacaucauccgcggcuggaucuucgggacgacccucgacagcaagacccagucccugcugaucgugaacaacgccaccaacguggucaucaaggugugcgaguuccaguucugcaacgaccccuuccucggcguguacuaccacaagaacaacaagagcuggauggaguccgaguuccgggucuacagcuccgccaacaacugcacguucgaguacgugagccagcccuuccugauggaccuggagggcaagcaggggaacuucaagaaccuccgcgaguucguguucaagaacaucgacggcuacuucaagaucuacuccaagcacaccccgaucaaccugguccgggaccugccccagggguucagcgcccucgagccccugguggaccugcccaucggcaucaacaucacccgcuuccagacccuccuggcccugcaccgguccuaccucacgccgggggacagcagcuccggcuggaccgcgggcgccgccgccuacuacgugggguaccugcagccccgcaccuuccugcucaaguacaacgagaacggcaccaucacggacgcggucgacugcgcccuggacccccugagcgagaccaagugcacccucaaguccuucaccguggagaaggggaucuaccagacgagcaacuuccgggugcagcccaccgaguccaucguccgcuucccgaacaucaccaaccugugccccuucggcgagguguucaacgccacccgguucgccagcgucuacgccuggaaccgcaagcggaucuccaacugcguggcggacuacagcgugcuguacaacuccgccagcuucuccacguucaagugcuacggcgucagccccaccaagcucaacgaccugugcuucaccaacguguacgccgacuccuucgugauccgcggggacgagguccggcagaucgcccccggccagaccgggaagaucgccgacuacaacuacaagcugccggacgacuucacgggcugcgugaucgcguggaacagcaacaaccucgacuccaaggucgggggcaacuacaacuaccuguaccgccuguuccgcaagagcaaccucaagcccuucgagcgggacaucuccaccgagaucuaccaggccggcagcacccccugcaacgggguggagggcuucaacugcuacuucccccugcaguccuacggguuccagccgaccaacggcgugggguaccagcccuaccggguggucgugcugagcuucgagcuccugcacgcccccgccacggugugcggccccaagaaguccaccaaccuggucaagaacaagugcgugaacuucaacuucaacggccucaccgggaccggcgugcugaccgagagcaacaagaaguuccugccguuccagcaguucgggcgcgacaucgccgacacgaccgacgcgguccgcgacccccagacccuggagauccucgacaucacccccugcagcuucggcgggguguccgugaucacgccgggcaccaacaccagcaaccaggucgccgugcuguaccaggacgugaacugcaccgagguccccguggccauccacgccgaccagcugacgcccaccuggcggguguacuccaccggcagcaacgucuuccagacccgcgccgggugccucaucggcgcggagcacgugaacaacuccuacgagugcgacauccccaucggggccggcaucugcgccagcuaccagacgcagaccaacuccccgcggcgcgcccggagcguggcgucccagagcaucaucgccuacaccaugucccugggcgccgagaacagcgucgccuacuccaacaacagcaucgccauccccaccaacuucacgaucuccgugaccaccgagauccugcccgugagcaugaccaagacgagcgucgacugcaccauguacaucugcggggacuccaccgagugcagcaaccuccugcugcaguacggcuccuucugcacccagcucaaccgcgcgcugacggggaucgccguggagcaggacaagaacacccaggagguguucgcccaggucaagcagaucuacaagacgcccccgaucaaggacuucggcggguucaacuucagccagauccugcccgaccccuccaagcccagcaagcgguccuucaucgaggaccuccuguucaacaaggugacccuggccgacgccggcuucaucaagcaguacggcgacugccucggggacaucgcggcccgcgaccugaucugcgcccagaaguucaacggccugaccgugcucccgccccugcugaccgacgagaugaucgcccaguacaccagcgcccuccuggcggggaccaucacguccggcuggaccuucggggccggcgccgcccugcagauccccuucgcgaugcagauggccuaccgguucaacggcaucggggucacccagaacgugcucuacgagaaccagaagcugaucgccaaccaguucaacagcgccaucggcaagauccaggacucccugagcuccaccgccagcgcgcucgggaagcugcaggacguggucaaccagaacgcccaggcccugaacacgcucgugaagcagcuguccagcaacuucggcgccaucuccagcgugcugaacgacauccucucccgccuggacccgcccgaggccgaggugcagaucgaccggcugaucaccgggcgccuccagagccugcagaccuacgugacccagcagcugauccgggcggccgagauccgcgccagcgccaaccucgccgcgaccaagauguccgagugcguccugggccagagcaagcggguggacuucugcggcaagggguaccaccugauguccuucccccagagcgccccgcacggcguggucuuccuccacgugacguacguccccgcccaggagaagaacuucaccaccgcccccgcgaucugccacgacgggaaggcccacuucccccgcgagggcguguucguguccaacgggacccacugguucgucacgcagcggaacuucuacgagccgcagaucaucaccaccgacaacaccuucgugagcggcaacugcgacguggucaucggcaucgugaacaacacgguguacgacccccugcagcccgagcuggacuccuucaaggaggagcucgacaaguacuucaagaaccacaccagccccgacgucgaccugggggacaucuccggcaucaacgccagcguggugaacauccagaaggagaucgaccgccugaacgaggucgccaagaaccucaacgagucccugaucgaccugcaggagcucgggaaguacgagcaguacaucaagggcgggggcgggagcgacaucaucaagcuccugaacgagcaggucaacaaggagaugcaguccagcaaccuguacauguccaugagcuccuggugcuacacccacagccucgacggcgccgggcuguuccuguucgaccacgccgcggaggaguacgagcacgccaagaagcucaucaucuuccugaacgagaacaacgugcccgugcagcugaccuccaucagcgccccggagcacaaguucgagggccucacgcagaucuuccagaaggccuacgagcacgagcagcacaucuccgagagcaucaacaacaucguggaccacgccaucaaguccaaggaccacgcgaccuucaacuuccugcagugguacgucgccgagcagcacgaggaggaggugcuguucaaggacauccucgacaagaucgagcugaucgggaacgagaaccacggccuguaccucgccgaccaguacgugaaggggaucgccaagagccgcaaguccugaggacuagucccuguucccagagcccacuuuuuuuucuuuuuuugaaauaaaauagccugucuuucagaucucaaaggcucuuuucagagccaccaaaaaaaaaaaaaaaaaaaaaaaaaaaaaaaaaaaaaaaaaaaaaaaaaaaaaaaaaaaaaaaaaaaaaaaaaaaaaaaaaaaaaaaaaaaaaaaaaaaaa

SEQ ID NO: 12370 - RNA, 4412 nt, Artificial Sequence
  SARS-CoV-2/Wuhan/WIV05/2019__EPI_ISL_402128 spike protein mRNA gc (1-1211)(K986P_V987P_T887WN_A1020W) Ferritin construct
aggagagucccgcagucggcguccagcggcucugcuuguucgugugugugucguugcaggccuuauucaagcuuaccauguucguguuccugguccuccugccccuggugagcucccagugcgugaaccucaccacccgcacgcagcugccgcccgccuacaccaacagcuucacccggggcgucuacuaccccgacaagguguuccgcuccagcgugcugcacuccacccaggaccucuuccugcccuucuucagcaacgucacgugguuccacgccauccacguguccgggaccaacggcaccaagcgguucgacaacccggugcugcccuucaacgacggggucuacuucgcgagcaccgagaaguccaacaucauccgcggcuggaucuucgggacgacccucgacagcaagacccagucccugcugaucgugaacaacgccaccaacguggucaucaaggugugcgaguuccaguucugcaacgaccccuuccucggcguguacuaccacaagaacaacaagagcuggauggaguccgaguuccgggucuacagcuccgccaacaacugcacguucgaguacgugagccagcccuuccugauggaccuggagggcaagcaggggaacuucaagaaccuccgcgaguucguguucaagaacaucgacggcuacuucaagaucuacuccaagcacaccccgaucaaccugguccgggaccugccccagggguucagcgcccucgagccccugguggaccugcccaucggcaucaacaucacccgcuuccagacccuccuggcccugcaccgguccuaccucacgccgggggacagcagcuccggcuggaccgcgggcgccgccgccuacuacgugggguaccugcagccccgcaccuuccugcucaaguacaacgagaacggcaccaucacggacgcggucgacugcgcccuggacccccugagcgagaccaagugcacccucaaguccuucaccguggagaaggggaucuaccagacgagcaacuuccgggugcagcccaccgaguccaucguccgcuucccgaacaucaccaaccugugccccuucggcgagguguucaacgccacccgguucgccagcgucuacgccuggaaccgcaagcggaucuccaacugcguggcggacuacagcgugcuguacaacuccgccagcuucuccacguucaagugcuacggcgucagccccaccaagcucaacgaccugugcuucaccaacguguacgccgacuccuucgugauccgcggggacgagguccggcagaucgcccccggccagaccgggaagaucgccgacuacaacuacaagcugccggacgacuucacgggcugcgugaucgcguggaacagcaacaaccucgacuccaaggucgggggcaacuacaacuaccuguaccgccuguuccgcaagagcaaccucaagcccuucgagcgggacaucuccaccgagaucuaccaggccggcagcacccccugcaacgggguggagggcuucaacugcuacuucccccugcaguccuacggguuccagccgaccaacggcgugggguaccagcccuaccggguggucgugcugagcuucgagcuccugcacgcccccgccacggugugcggccccaagaaguccaccaaccuggucaagaacaagugcgugaacuucaacuucaacggccucaccgggaccggcgugcugaccgagagcaacaagaaguuccugccguuccagcaguucgggcgcgacaucgccgacacgaccgacgcgguccgcgacccccagacccuggagauccucgacaucacccccugcagcuucggcgggguguccgugaucacgccgggcaccaacaccagcaaccaggucgccgugcuguaccaggacgugaacugcaccgagguccccguggccauccacgccgaccagcugacgcccaccuggcggguguacuccaccggcagcaacgucuuccagacccgcgccgggugccucaucggcgcggagcacgugaacaacuccuacgagugcgacauccccaucggggccggcaucugcgccagcuaccagacgcagaccaacuccccgcggcgcgcccggagcguggcgucccagagcaucaucgccuacaccaugucccugggcgccgagaacagcgucgccuacuccaacaacagcaucgccauccccaccaacuucacgaucuccgugaccaccgagauccugcccgugagcaugaccaagacgagcgucgacugcaccauguacaucugcggggacuccaccgagugcagcaaccuccugcugcaguacggcuccuucugcacccagcucaaccgcgcgcugacggggaucgccguggagcaggacaagaacacccaggagguguucgcccaggucaagcagaucuacaagacgcccccgaucaaggacuucggcggguucaacuucagccagauccugcccgaccccuccaagcccagcaagcgguccuucaucgaggaccuccuguucaacaaggugacccuggccgacgccggcuucaucaagcaguacggcgacugccucggggacaucgcggcccgcgaccugaucugcgcccagaaguucaacggccugaccgugcucccgccccugcugaccgacgagaugaucgcccaguacaccagcgcccuccuggcggggaccaucacguccggcuggugguucggggccggcgccgcccugcagauccccuucgcgaugcagauggccuaccgguucaacggcaucggggucacccagaacgugcucuacgagaaccagaagcugaucgccaaccaguucaacagcgccaucggcaagauccaggacucccugagcuccaccgccagcgcgcucgggaagcugcaggacguggucaaccagaacgcccaggcccugaacacgcucgugaagcagcuguccagcaacuucggcgccaucuccagcgugcugaacgacauccucucccgccuggacccgcccgaggccgaggugcagaucgaccggcugaucaccgggcgccuccagagccugcagaccuacgugacccagcagcugauccgggcggccgagauccgcuggagcgccaaccucgccgcgaccaagauguccgagugcguccugggccagagcaagcggguggacuucugcggcaagggguaccaccugauguccuucccccagagcgccccgcacggcguggucuuccuccacgugacguacguccccgcccaggagaagaacuucaccaccgcccccgcgaucugccacgacgggaaggcccacuucccccgcgagggcguguucguguccaacgggacccacugguucgucacgcagcggaacuucuacgagccgcagaucaucaccaccgacaacaccuucgugagcggcaacugcgacguggucaucggcaucgugaacaacacgguguacgacccccugcagcccgagcuggacuccuucaaggaggagcucgacaaguacuucaagaaccacaccagccccgacgucgaccugggggacaucuccggcaucaacgccagcguggugaacauccagaaggagaucgaccgccugaacgaggucgccaagaaccucaacgagucccugaucgaccugcaggagcucgggaaguacgagcaguacaucaagggcgggggcgggagcgacaucaucaagcuccugaacgagcaggucaacaaggagaugcaguccagcaaccuguacauguccaugagcuccuggugcuacacccacagccucgacggcgccgggcuguuccuguucgaccacgccgcggaggaguacgagcacgccaagaagcucaucaucuuccugaacgagaacaacgugcccgugcagcugaccuccaucagcgccccggagcacaaguucgagggccucacgcagaucuuccagaaggccuacgagcacgagcagcacaucuccgagagcaucaacaacaucguggaccacgccaucaaguccaaggaccacgcgaccuucaacuuccugcagugguacgucgccgagcagcacgaggaggaggugcuguucaaggacauccucgacaagaucgagcugaucgggaacgagaaccacggccuguaccucgccgaccaguacgugaaggggaucgccaagagccgcaaguccugaggacuagucccuguucccagagcccacuuuuuuuucuuuuuuugaaauaaaauagccugucuuucagaucucaaaggcucuuuucagagccaccaaaaaaaaaaaaaaaaaaaaaaaaaaaaaaaaaaaaaaaaaaaaaaaaaaaaaaaaaaaaaaaaaaaaaaaaaaaaaaaaaaaaaaaaaaaaaaaaaaaaa

SEQ ID NO: 12371 - RNA, 4412 nt, Artificial Sequence
  SARS-CoV-2/Wuhan/WIV05/2019__EPI_ISL_402128 spike protein mRNA gc (1-1211)(K986P_V987P_P1069F) Ferritin construct
aggagagucccgcagucggcguccagcggcucugcuuguucgugugugugucguugcaggccuuauucaagcuuaccauguucguguuccugguccuccugccccuggugagcucccagugcgugaaccucaccacccgcacgcagcugccgcccgccuacaccaacagcuucacccggggcgucuacuaccccgacaagguguuccgcuccagcgugcugcacuccacccaggaccucuuccugcccuucuucagcaacgucacgugguuccacgccauccacguguccgggaccaacggcaccaagcgguucgacaacccggugcugcccuucaacgacggggucuacuucgcgagcaccgagaaguccaacaucauccgcggcuggaucuucgggacgacccucgacagcaagacccagucccugcugaucgugaacaacgccaccaacguggucaucaaggugugcgaguuccaguucugcaacgaccccuuccucggcguguacuaccacaagaacaacaagagcuggauggaguccgaguuccgggucuacagcuccgccaacaacugcacguucgaguacgugagccagcccuuccugauggaccuggagggcaagcaggggaacuucaagaaccuccgcgaguucguguucaagaacaucgacggcuacuucaagaucuacuccaagcacaccccgaucaaccugguccgggaccugccccagggguucagcgcccucgagccccugguggaccugcccaucggcaucaacaucacccgcuuccagacccuccuggcccugcaccgguccuaccucacgccgggggacagcagcuccggcuggaccgcgggcgccgccgccuacuacgugggguaccugcagccccgcaccuuccugcucaaguacaacgagaacggcaccaucacggacgcggucgacugcgcccuggacccccugagcgagaccaagugcacccucaaguccuucaccguggagaaggggaucuaccagacgagcaacuuccgggugcagcccaccgaguccaucguccgcuucccgaacaucaccaaccugugccccuucggcgagguguucaacgccacccgguucgccagcgucuacgccuggaaccgcaagcggaucuccaacugcguggcggacuacagcgugcuguacaacuccgccagcuucuccacguucaagugcuacggcgucagccccaccaagcucaacgaccugugcuucaccaacguguacgccgacuccuucgugauccgcggggacgagguccggcagaucgcccccggccagaccgggaagaucgccgacuacaacuacaagcugccggacgacuucacgggcugcgugaucgcguggaacagcaacaaccucgacuccaaggucgggggcaacuacaacuaccuguaccgccuguuccgcaagagcaaccucaagcccuucgagcgggacaucuccaccgagaucuaccaggccggcagcacccccugcaacgggguggagggcuucaacugcuacuucccccugcaguccuacggguuccagccgaccaacggcgugggguaccagcccuaccggguggucgugcugagcuucgagcuccugcacgcccccgccacggugugcggccccaagaaguccaccaaccuggucaagaacaagugcgugaacuucaacuucaacggccucaccgggaccggcgugcugaccgagagcaacaagaaguuccugccguuccagcaguucgggcgcgacaucgccgacacgaccgacgcgguccgcgacccccagacccuggagauccucgacaucacccccugcagcuucggcgggguguccgugaucacgccgggcaccaacaccagcaaccaggucgccgugcuguaccaggacgugaacugcaccgagguccccguggccauccacgccgaccagcugacgcccaccuggcggguguacuccaccggcagcaacgucuuccagacccgcgccgggugccucaucggcgcggagcacgugaacaacuccuacgagugcgacauccccaucggggccggcaucugcgccagcuaccagacgcagaccaacuccccgcggcgcgcccggagcguggcgucccagagcaucaucgccuacaccaugucccugggcgccgagaacagcgucgccuacuccaacaacagcaucgccauccccaccaacuucacgaucuccgugaccaccgagauccugcccgugagcaugaccaagacgagcgucgacugcaccauguacaucugcggggacuccaccgagugcagcaaccuccugcugcaguacggcuccuucugcacccagcucaaccgcgcgcugacggggaucgccguggagcaggacaagaacacccaggagguguucgcccaggucaagcagaucuacaagacgcccccgaucaaggacuucggcggguucaacuucagccagauccugcccgaccccuccaagcccagcaagcgguccuucaucgaggaccuccuguucaacaaggugacccuggccgacgccggcuucaucaagcaguacggcgacugccucggggacaucgcggcccgcgaccugaucugcgcccagaaguucaacggccugaccgugcucccgccccugcugaccgacgagaugaucgcccaguacaccagcgcccuccuggcggggaccaucacguccggcuggaccuucggggccggcgccgcccugcagauccccuucgcgaugcagauggccuaccgguucaacggcaucggggucacccagaacgugcucuacgagaaccagaagcugaucgccaaccaguucaacagcgccaucggcaagauccaggacucccugagcuccaccgccagcgcgcucgggaagcugcaggacguggucaaccagaacgcccaggcccugaacacgcucgugaagcagcuguccagcaacuucggcgccaucuccagcgugcugaacgacauccucucccgccuggacccgcccgaggccgaggugcagaucgaccggcugaucaccgggcgccuccagagccugcagaccuacgugacccagcagcugauccgggcggccgagauccgcgccagcgccaaccucgccgcgaccaagauguccgagugcguccugggccagagcaagcggguggacuucugcggcaagggguaccaccugauguccuucccccagagcgccccgcacggcguggucuuccuccacgugacguacgucuucgcccaggagaagaacuucaccaccgcccccgcgaucugccacgacgggaaggcccacuucccccgcgagggcguguucguguccaacgggacccacugguucgucacgcagcggaacuucuacgagccgcagaucaucaccaccgacaacaccuucgugagcggcaacugcgacguggucaucggcaucgugaacaacacgguguacgacccccugcagcccgagcuggacuccuucaaggaggagcucgacaaguacuucaagaaccacaccagccccgacgucgaccugggggacaucuccggcaucaacgccagcguggugaacauccagaaggagaucgaccgccugaacgaggucgccaagaaccucaacgagucccugaucgaccugcaggagcucgggaaguacgagcaguacaucaagggcgggggcgggagcgacaucaucaagcuccugaacgagcaggucaacaaggagaugcaguccagcaaccuguacauguccaugagcuccuggugcuacacccacagccucgacggcgccgggcuguuccuguucgaccacgccgcggaggaguacgagcacgccaagaagcucaucaucuuccugaacgagaacaacgugcccgugcagcugaccuccaucagcgccccggagcacaaguucgagggccucacgcagaucuuccagaaggccuacgagcacgagcagcacaucuccgagagcaucaacaacaucguggaccacgccaucaaguccaaggaccacgcgaccuucaacuuccugcagugguacgucgccgagcagcacgaggaggaggugcuguucaaggacauccucgacaagaucgagcugaucgggaacgagaaccacggccuguaccucgccgaccaguacgugaaggggaucgccaagagccgcaaguccugaggacuagucccuguucccagagcccacuuuuuuuucuuuuuuugaaauaaaauagccugucuuucagaucucaaaggcucuuuucagagccaccaaaaaaaaaaaaaaaaaaaaaaaaaaaaaaaaaaaaaaaaaaaaaaaaaaaaaaaaaaaaaaaaaaaaaaaaaaaaaaaaaaaaaaaaaaaaaaaaaaaaa

SEQ ID NO: 12372 - RNA, 4412 nt, Artificial Sequence
  SARS-CoV-2/Wuhan/WIV05/2019__EPI_ISL_402128 spike protein mRNA gc (1-1211)(K986P_V987P_ H1048Q_H1064N_ H1083N_H1101N) Ferritin construct
aggagagucccgcagucggcguccagcggcucugcuuguucgugugugugucguugcaggccuuauucaagcuuaccauguucguguuccugguccuccugccccuggugagcucccagugcgugaaccucaccacccgcacgcagcugccgcccgccuacaccaacagcuucacccggggcgucuacuaccccgacaagguguuccgcuccagcgugcugcacuccacccaggaccucuuccugcccuucuucagcaacgucacgugguuccacgccauccacguguccgggaccaacggcaccaagcgguucgacaacccggugcugcccuucaacgacggggucuacuucgcgagcaccgagaaguccaacaucauccgcggcuggaucuucgggacgacccucgacagcaagacccagucccugcugaucgugaacaacgccaccaacguggucaucaaggugugcgaguuccaguucugcaacgaccccuuccucggcguguacuaccacaagaacaacaagagcuggauggaguccgaguuccgggucuacagcuccgccaacaacugcacguucgaguacgugagccagcccuuccugauggaccuggagggcaagcaggggaacuucaagaaccuccgcgaguucguguucaagaacaucgacggcuacuucaagaucuacuccaagcacaccccgaucaaccugguccgggaccugccccagggguucagcgcccucgagccccugguggaccugcccaucggcaucaacaucacccgcuuccagacccuccuggcccugcaccgguccuaccucacgccgggggacagcagcuccggcuggaccgcgggcgccgccgccuacuacgugggguaccugcagccccgcaccuuccugcucaaguacaacgagaacggcaccaucacggacgcggucgacugcgcccuggacccccugagcgagaccaagugcacccucaaguccuucaccguggagaaggggaucuaccagacgagcaacuuccgggugcagcccaccgaguccaucguccgcuucccgaacaucaccaaccugugccccuucggcgagguguucaacgccacccgguucgccagcgucuacgccuggaaccgcaagcggaucuccaacugcguggcggacuacagcgugcuguacaacuccgccagcuucuccacguucaagugcuacggcgucagccccaccaagcucaacgaccugugcuucaccaacguguacgccgacuccuucgugauccgcggggacgagguccggcagaucgcccccggccagaccgggaagaucgccgacuacaacuacaagcugccggacgacuucacgggcugcgugaucgcguggaacagcaacaaccucgacuccaaggucgggggcaacuacaacuaccuguaccgccuguuccgcaagagcaaccucaagcccuucgagcgggacaucuccaccgagaucuaccaggccggcagcacccccugcaacgggguggagggcuucaacugcuacuucccccugcaguccuacggguuccagccgaccaacggcgugggguaccagcccuaccggguggucgugcugagcuucgagcuccugcacgcccccgccacggugugcggccccaagaaguccaccaaccuggucaagaacaagugcgugaacuucaacuucaacggccucaccgggaccggcgugcugaccgagagcaacaagaaguuccugccguuccagcaguucgggcgcgacaucgccgacacgaccgacgcgguccgcgacccccagacccuggagauccucgacaucacccccugcagcuucggcgggguguccgugaucacgccgggcaccaacaccagcaaccaggucgccgugcuguaccaggacgugaacugcaccgagguccccguggccauccacgccgaccagcugacgcccaccuggcggguguacuccaccggcagcaacgucuuccagacccgcgccgggugccucaucggcgcggagcacgugaacaacuccuacgagugcgacauccccaucggggccggcaucugcgccagcuaccagacgcagaccaacuccccgcggcgcgcccggagcguggcgucccagagcaucaucgccuacaccaugucccugggcgccgagaacagcgucgccuacuccaacaacagcaucgccauccccaccaacuucacgaucuccgugaccaccgagauccugcccgugagcaugaccaagacgagcgucgacugcaccauguacaucugcggggacuccaccgagugcagcaaccuccugcugcaguacggcuccuucugcacccagcucaaccgcgcgcugacggggaucgccguggagcaggacaagaacacccaggagguguucgcccaggucaagcagaucuacaagacgcccccgaucaaggacuucggcggguucaacuucagccagauccugcccgaccccuccaagcccagcaagcgguccuucaucgaggaccuccuguucaacaaggugacccuggccgacgccggcuucaucaagcaguacggcgacugccucggggacaucgcggcccgcgaccugaucugcgcccagaaguucaacggccugaccgugcucccgccccugcugaccgacgagaugaucgcccaguacaccagcgcccuccuggcggggaccaucacguccggcuggaccuucggggccggcgccgcccugcagauccccuucgcgaugcagauggccuaccgguucaacggcaucggggucacccagaacgugcucuacgagaaccagaagcugaucgccaaccaguucaacagcgccaucggcaagauccaggacucccugagcuccaccgccagcgcgcucgggaagcugcaggacguggucaaccagaacgcccaggcccugaacacgcucgugaagcagcuguccagcaacuucggcgccaucuccagcgugcugaacgacauccucucccgccuggacccgcccgaggccgaggugcagaucgaccggcugaucaccgggcgccuccagagccugcagaccuacgugacccagcagcugauccgggcggccgagauccgcgccagcgccaaccucgccgcgaccaagauguccgagugcguccugggccagagcaagcggguggacuucugcggcaagggguaccagcugauguccuucccccagagcgccccgcacggcguggucuuccucaacgugacguacguccccgcccaggagaagaacuucaccaccgcccccgcgaucugcaacgacgggaaggcccacuucccccgcgagggcguguucguguccaacgggaccaacugguucgucacgcagcggaacuucuacgagccgcagaucaucaccaccgacaacaccuucgugagcggcaacugcgacguggucaucggcaucgugaacaacacgguguacgacccccugcagcccgagcuggacuccuucaaggaggagcucgacaaguacuucaagaaccacaccagccccgacgucgaccugggggacaucuccggcaucaacgccagcguggugaacauccagaaggagaucgaccgccugaacgaggucgccaagaaccucaacgagucccugaucgaccugcaggagcucgggaaguacgagcaguacaucaagggcgggggcgggagcgacaucaucaagcuccugaacgagcaggucaacaaggagaugcaguccagcaaccuguacauguccaugagcuccuggugcuacacccacagccucgacggcgccgggcuguuccuguucgaccacgccgcggaggaguacgagcacgccaagaagcucaucaucuuccugaacgagaacaacgugcccgugcagcugaccuccaucagcgccccggagcacaaguucgagggccucacgcagaucuuccagaaggccuacgagcacgagcagcacaucuccgagagcaucaacaacaucguggaccacgccaucaaguccaaggaccacgcgaccuucaacuuccugcagugguacgucgccgagcagcacgaggaggaggugcuguucaaggacauccucgacaagaucgagcugaucgggaacgagaaccacggccuguaccucgccgaccaguacgugaaggggaucgccaagagccgcaaguccugaggacuagucccuguucccagagcccacuuuuuuuucuuuuuuugaaauaaaauagccugucuuucagaucucaaaggcucuuuucagagccaccaaaaaaaaaaaaaaaaaaaaaaaaaaaaaaaaaaaaaaaaaaaaaaaaaaaaaaaaaaaaaaaaaaaaaaaaaaaaaaaaaaaaaaaaaaaaaaaaaaaaa

SEQ ID NO: 12373 - RNA, 4412 nt, Artificial Sequence
  SARS-CoV-2/Wuhan/WIV05/2019__EPI_ISL_402128 spike protein mRNA gc (1-1211)(I712C_T1077C) Ferritin construct
aggagagucccgcagucggcguccagcggcucugcuuguucgugugugugucguugcaggccuuauucaagcuuaccauguucguguuccugguccuccugccccuggugagcucccagugcgugaaccucaccacccgcacgcagcugccgcccgccuacaccaacagcuucacccggggcgucuacuaccccgacaagguguuccgcuccagcgugcugcacuccacccaggaccucuuccugcccuucuucagcaacgucacgugguuccacgccauccacguguccgggaccaacggcaccaagcgguucgacaacccggugcugcccuucaacgacggggucuacuucgcgagcaccgagaaguccaacaucauccgcggcuggaucuucgggacgacccucgacagcaagacccagucccugcugaucgugaacaacgccaccaacguggucaucaaggugugcgaguuccaguucugcaacgaccccuuccucggcguguacuaccacaagaacaacaagagcuggauggaguccgaguuccgggucuacagcuccgccaacaacugcacguucgaguacgugagccagcccuuccugauggaccuggagggcaagcaggggaacuucaagaaccuccgcgaguucguguucaagaacaucgacggcuacuucaagaucuacuccaagcacaccccgaucaaccugguccgggaccugccccagggguucagcgcccucgagccccugguggaccugcccaucggcaucaacaucacccgcuuccagacccuccuggcccugcaccgguccuaccucacgccgggggacagcagcuccggcuggaccgcgggcgccgccgccuacuacgugggguaccugcagccccgcaccuuccugcucaaguacaacgagaacggcaccaucacggacgcggucgacugcgcccuggacccccugagcgagaccaagugcacccucaaguccuucaccguggagaaggggaucuaccagacgagcaacuuccgggugcagcccaccgaguccaucguccgcuucccgaacaucaccaaccugugccccuucggcgagguguucaacgccacccgguucgccagcgucuacgccuggaaccgcaagcggaucuccaacugcguggcggacuacagcgugcuguacaacuccgccagcuucuccacguucaagugcuacggcgucagccccaccaagcucaacgaccugugcuucaccaacguguacgccgacuccuucgugauccgcggggacgagguccggcagaucgcccccggccagaccgggaagaucgccgacuacaacuacaagcugccggacgacuucacgggcugcgugaucgcguggaacagcaacaaccucgacuccaaggucgggggcaacuacaacuaccuguaccgccuguuccgcaagagcaaccucaagcccuucgagcgggacaucuccaccgagaucuaccaggccggcagcacccccugcaacgggguggagggcuucaacugcuacuucccccugcaguccuacggguuccagccgaccaacggcgugggguaccagcccuaccggguggucgugcugagcuucgagcuccugcacgcccccgccacggugugcggccccaagaaguccaccaaccuggucaagaacaagugcgugaacuucaacuucaacggccucaccgggaccggcgugcugaccgagagcaacaagaaguuccugccguuccagcaguucgggcgcgacaucgccgacacgaccgacgcgguccgcgacccccagacccuggagauccucgacaucacccccugcagcuucggcgggguguccgugaucacgccgggcaccaacaccagcaaccaggucgccgugcuguaccaggacgugaacugcaccgagguccccguggccauccacgccgaccagcugacgcccaccuggcggguguacuccaccggcagcaacgucuuccagacccgcgccgggugccucaucggcgcggagcacgugaacaacuccuacgagugcgacauccccaucggggccggcaucugcgccagcuaccagacgcagaccaacuccccgcggcgcgcccggagcguggcgucccagagcaucaucgccuacaccaugucccugggcgccgagaacagcgucgccuacuccaacaacagcugcgccauccccaccaacuucacgaucuccgugaccaccgagauccugcccgugagcaugaccaagacgagcgucgacugcaccauguacaucugcggggacuccaccgagugcagcaaccuccugcugcaguacggcuccuucugcacccagcucaaccgcgcgcugacggggaucgccguggagcaggacaagaacacccaggagguguucgcccaggucaagcagaucuacaagacgcccccgaucaaggacuucggcggguucaacuucagccagauccugcccgaccccuccaagcccagcaagcgguccuucaucgaggaccuccuguucaacaaggugacccuggccgacgccggcuucaucaagcaguacggcgacugccucggggacaucgcggcccgcgaccugaucugcgcccagaaguucaacggccugaccgugcucccgccccugcugaccgacgagaugaucgcccaguacaccagcgcccuccuggcggggaccaucacguccggcuggaccuucggggccggcgccgcccugcagauccccuucgcgaugcagauggccuaccgguucaacggcaucggggucacccagaacgugcucuacgagaaccagaagcugaucgccaaccaguucaacagcgccaucggcaagauccaggacucccugagcuccaccgccagcgcgcucgggaagcugcaggacguggucaaccagaacgcccaggcccugaacacgcucgugaagcagcuguccagcaacuucggcgccaucuccagcgugcugaacgacauccucucccgccuggacaaggucgaggccgaggugcagaucgaccggcugaucaccgggcgccuccagagccugcagaccuacgugacccagcagcugauccgggcggccgagauccgcgccagcgccaaccucgccgcgaccaagauguccgagugcguccugggccagagcaagcggguggacuucugcggcaagggguaccaccugauguccuucccccagagcgccccgcacggcguggucuuccuccacgugacguacguccccgcccaggagaagaacuucaccugcgcccccgcgaucugccacgacgggaaggcccacuucccccgcgagggcguguucguguccaacgggacccacugguucgucacgcagcggaacuucuacgagccgcagaucaucaccaccgacaacaccuucgugagcggcaacugcgacguggucaucggcaucgugaacaacacgguguacgacccccugcagcccgagcuggacuccuucaaggaggagcucgacaaguacuucaagaaccacaccagccccgacgucgaccugggggacaucuccggcaucaacgccagcguggugaacauccagaaggagaucgaccgccugaacgaggucgccaagaaccucaacgagucccugaucgaccugcaggagcucgggaaguacgagcaguacaucaagggcgggggcgggagcgacaucaucaagcuccugaacgagcaggucaacaaggagaugcaguccagcaaccuguacauguccaugagcuccuggugcuacacccacagccucgacggcgccgggcuguuccuguucgaccacgccgcggaggaguacgagcacgccaagaagcucaucaucuuccugaacgagaacaacgugcccgugcagcugaccuccaucagcgccccggagcacaaguucgagggccucacgcagaucuuccagaaggccuacgagcacgagcagcacaucuccgagagcaucaacaacaucguggaccacgccaucaaguccaaggaccacgcgaccuucaacuuccugcagugguacgucgccgagcagcacgaggaggaggugcuguucaaggacauccucgacaagaucgagcugaucgggaacgagaaccacggccuguaccucgccgaccaguacgugaaggggaucgccaagagccgcaaguccugaggacuagucccuguucccagagcccacuuuuuuuucuuuuuuugaaauaaaauagccugucuuucagaucucaaaggcucuuuucagagccaccaaaaaaaaaaaaaaaaaaaaaaaaaaaaaaaaaaaaaaaaaaaaaaaaaaaaaaaaaaaaaaaaaaaaaaaaaaaaaaaaaaaaaaaaaaaaaaaaaaaaa

SEQ ID NO: 12374 - RNA, 4412 nt, Artificial Sequence
  SARS-CoV-2/Wuhan/WIV05/2019__EPI_ISL_402128 spike protein mRNA gc (1-1211)(I714C_Y1110C) Ferritin construct
aggagagucccgcagucggcguccagcggcucugcuuguucgugugugugucguugcaggccuuauucaagcuuaccauguucguguuccugguccuccugccccuggugagcucccagugcgugaaccucaccacccgcacgcagcugccgcccgccuacaccaacagcuucacccggggcgucuacuaccccgacaagguguuccgcuccagcgugcugcacuccacccaggaccucuuccugcccuucuucagcaacgucacgugguuccacgccauccacguguccgggaccaacggcaccaagcgguucgacaacccggugcugcccuucaacgacggggucuacuucgcgagcaccgagaaguccaacaucauccgcggcuggaucuucgggacgacccucgacagcaagacccagucccugcugaucgugaacaacgccaccaacguggucaucaaggugugcgaguuccaguucugcaacgaccccuuccucggcguguacuaccacaagaacaacaagagcuggauggaguccgaguuccgggucuacagcuccgccaacaacugcacguucgaguacgugagccagcccuuccugauggaccuggagggcaagcaggggaacuucaagaaccuccgcgaguucguguucaagaacaucgacggcuacuucaagaucuacuccaagcacaccccgaucaaccugguccgggaccugccccagggguucagcgcccucgagccccugguggaccugcccaucggcaucaacaucacccgcuuccagacccuccuggcccugcaccgguccuaccucacgccgggggacagcagcuccggcuggaccgcgggcgccgccgccuacuacgugggguaccugcagccccgcaccuuccugcucaaguacaacgagaacggcaccaucacggacgcggucgacugcgcccuggacccccugagcgagaccaagugcacccucaaguccuucaccguggagaaggggaucuaccagacgagcaacuuccgggugcagcccaccgaguccaucguccgcuucccgaacaucaccaaccugugccccuucggcgagguguucaacgccacccgguucgccagcgucuacgccuggaaccgcaagcggaucuccaacugcguggcggacuacagcgugcuguacaacuccgccagcuucuccacguucaagugcuacggcgucagccccaccaagcucaacgaccugugcuucaccaacguguacgccgacuccuucgugauccgcggggacgagguccggcagaucgcccccggccagaccgggaagaucgccgacuacaacuacaagcugccggacgacuucacgggcugcgugaucgcguggaacagcaacaaccucgacuccaaggucgggggcaacuacaacuaccuguaccgccuguuccgcaagagcaaccucaagcccuucgagcgggacaucuccaccgagaucuaccaggccggcagcacccccugcaacgggguggagggcuucaacugcuacuucccccugcaguccuacggguuccagccgaccaacggcgugggguaccagcccuaccggguggucgugcugagcuucgagcuccugcacgcccccgccacggugugcggccccaagaaguccaccaaccuggucaagaacaagugcgugaacuucaacuucaacggccucaccgggaccggcgugcugaccgagagcaacaagaaguuccugccguuccagcaguucgggcgcgacaucgccgacacgaccgacgcgguccgcgacccccagacccuggagauccucgacaucacccccugcagcuucggcgggguguccgugaucacgccgggcaccaacaccagcaaccaggucgccgugcuguaccaggacgugaacugcaccgagguccccguggccauccacgccgaccagcugacgcccaccuggcggguguacuccaccggcagcaacgucuuccagacccgcgccgggugccucaucggcgcggagcacgugaacaacuccuacgagugcgacauccccaucggggccggcaucugcgccagcuaccagacgcagaccaacuccccgcggcgcgcccggagcguggcgucccagagcaucaucgccuacaccaugucccugggcgccgagaacagcgucgccuacuccaacaacagcaucgccugccccaccaacuucacgaucuccgugaccaccgagauccugcccgugagcaugaccaagacgagcgucgacugcaccauguacaucugcggggacuccaccgagugcagcaaccuccugcugcaguacggcuccuucugcacccagcucaaccgcgcgcugacggggaucgccguggagcaggacaagaacacccaggagguguucgcccaggucaagcagaucuacaagacgcccccgaucaaggacuucggcggguucaacuucagccagauccugcccgaccccuccaagcccagcaagcgguccuucaucgaggaccuccuguucaacaaggugacccuggccgacgccggcuucaucaagcaguacggcgacugccucggggacaucgcggcccgcgaccugaucugcgcccagaaguucaacggccugaccgugcucccgccccugcugaccgacgagaugaucgcccaguacaccagcgcccuccuggcggggaccaucacguccggcuggaccuucggggccggcgccgcccugcagauccccuucgcgaugcagauggccuaccgguucaacggcaucggggucacccagaacgugcucuacgagaaccagaagcugaucgccaaccaguucaacagcgccaucggcaagauccaggacucccugagcuccaccgccagcgcgcucgggaagcugcaggacguggucaaccagaacgcccaggcccugaacacgcucgugaagcagcuguccagcaacuucggcgccaucuccagcgugcugaacgacauccucucccgccuggacaaggucgaggccgaggugcagaucgaccggcugaucaccgggcgccuccagagccugcagaccuacgugacccagcagcugauccgggcggccgagauccgcgccagcgccaaccucgccgcgaccaagauguccgagugcguccugggccagagcaagcggguggacuucugcggcaagggguaccaccugauguccuucccccagagcgccccgcacggcguggucuuccuccacgugacguacguccccgcccaggagaagaacuucaccaccgcccccgcgaucugccacgacgggaaggcccacuucccccgcgagggcguguucguguccaacgggacccacugguucgucacgcagcggaacuucugcgagccgcagaucaucaccaccgacaacaccuucgugagcggcaacugcgacguggucaucggcaucgugaacaacacgguguacgacccccugcagcccgagcuggacuccuucaaggaggagcucgacaaguacuucaagaaccacaccagccccgacgucgaccugggggacaucuccggcaucaacgccagcguggugaacauccagaaggagaucgaccgccugaacgaggucgccaagaaccucaacgagucccugaucgaccugcaggagcucgggaaguacgagcaguacaucaagggcgggggcgggagcgacaucaucaagcuccugaacgagcaggucaacaaggagaugcaguccagcaaccuguacauguccaugagcuccuggugcuacacccacagccucgacggcgccgggcuguuccuguucgaccacgccgcggaggaguacgagcacgccaagaagcucaucaucuuccugaacgagaacaacgugcccgugcagcugaccuccaucagcgccccggagcacaaguucgagggccucacgcagaucuuccagaaggccuacgagcacgagcagcacaucuccgagagcaucaacaacaucguggaccacgccaucaaguccaaggaccacgcgaccuucaacuuccugcagugguacgucgccgagcagcacgaggaggaggugcuguucaaggacauccucgacaagaucgagcugaucgggaacgagaaccacggccuguaccucgccgaccaguacgugaaggggaucgccaagagccgcaaguccugaggacuagucccuguucccagagcccacuuuuuuuucuuuuuuugaaauaaaauagccugucuuucagaucucaaaggcucuuuucagagccaccaaaaaaaaaaaaaaaaaaaaaaaaaaaaaaaaaaaaaaaaaaaaaaaaaaaaaaaaaaaaaaaaaaaaaaaaaaaaaaaaaaaaaaaaaaaaaaaaaaaaa

SEQ ID NO: 12375 - RNA, 4412 nt, Artificial Sequence
  SARS-CoV-2/Wuhan/WIV05/2019__EPI_ISL_402128 spike protein mRNA gc (1-1211)(P715C_P1069C) Ferritin construct
aggagagucccgcagucggcguccagcggcucugcuuguucgugugugugucguugcaggccuuauucaagcuuaccauguucguguuccugguccuccugccccuggugagcucccagugcgugaaccucaccacccgcacgcagcugccgcccgccuacaccaacagcuucacccggggcgucuacuaccccgacaagguguuccgcuccagcgugcugcacuccacccaggaccucuuccugcccuucuucagcaacgucacgugguuccacgccauccacguguccgggaccaacggcaccaagcgguucgacaacccggugcugcccuucaacgacggggucuacuucgcgagcaccgagaaguccaacaucauccgcggcuggaucuucgggacgacccucgacagcaagacccagucccugcugaucgugaacaacgccaccaacguggucaucaaggugugcgaguuccaguucugcaacgaccccuuccucggcguguacuaccacaagaacaacaagagcuggauggaguccgaguuccgggucuacagcuccgccaacaacugcacguucgaguacgugagccagcccuuccugauggaccuggagggcaagcaggggaacuucaagaaccuccgcgaguucguguucaagaacaucgacggcuacuucaagaucuacuccaagcacaccccgaucaaccugguccgggaccugccccagggguucagcgcccucgagccccugguggaccugcccaucggcaucaacaucacccgcuuccagacccuccuggcccugcaccgguccuaccucacgccgggggacagcagcuccggcuggaccgcgggcgccgccgccuacuacgugggguaccugcagccccgcaccuuccugcucaaguacaacgagaacggcaccaucacggacgcggucgacugcgcccuggacccccugagcgagaccaagugcacccucaaguccuucaccguggagaaggggaucuaccagacgagcaacuuccgggugcagcccaccgaguccaucguccgcuucccgaacaucaccaaccugugccccuucggcgagguguucaacgccacccgguucgccagcgucuacgccuggaaccgcaagcggaucuccaacugcguggcggacuacagcgugcuguacaacuccgccagcuucuccacguucaagugcuacggcgucagccccaccaagcucaacgaccugugcuucaccaacguguacgccgacuccuucgugauccgcggggacgagguccggcagaucgcccccggccagaccgggaagaucgccgacuacaacuacaagcugccggacgacuucacgggcugcgugaucgcguggaacagcaacaaccucgacuccaaggucgggggcaacuacaacuaccuguaccgccuguuccgcaagagcaaccucaagcccuucgagcgggacaucuccaccgagaucuaccaggccggcagcacccccugcaacgggguggagggcuucaacugcuacuucccccugcaguccuacggguuccagccgaccaacggcgugggguaccagcccuaccggguggucgugcugagcuucgagcuccugcacgcccccgccacggugugcggccccaagaaguccaccaaccuggucaagaacaagugcgugaacuucaacuucaacggccucaccgggaccggcgugcugaccgagagcaacaagaaguuccugccguuccagcaguucgggcgcgacaucgccgacacgaccgacgcgguccgcgacccccagacccuggagauccucgacaucacccccugcagcuucggcgggguguccgugaucacgccgggcaccaacaccagcaaccaggucgccgugcuguaccaggacgugaacugcaccgagguccccguggccauccacgccgaccagcugacgcccaccuggcggguguacuccaccggcagcaacgucuuccagacccgcgccgggugccucaucggcgcggagcacgugaacaacuccuacgagugcgacauccccaucggggccggcaucugcgccagcuaccagacgcagaccaacuccccgcggcgcgcccggagcguggcgucccagagcaucaucgccuacaccaugucccugggcgccgagaacagcgucgccuacuccaacaacagcaucgccaucugcaccaacuucacgaucuccgugaccaccgagauccugcccgugagcaugaccaagacgagcgucgacugcaccauguacaucugcggggacuccaccgagugcagcaaccuccugcugcaguacggcuccuucugcacccagcucaaccgcgcgcugacggggaucgccguggagcaggacaagaacacccaggagguguucgcccaggucaagcagaucuacaagacgcccccgaucaaggacuucggcggguucaacuucagccagauccugcccgaccccuccaagcccagcaagcgguccuucaucgaggaccuccuguucaacaaggugacccuggccgacgccggcuucaucaagcaguacggcgacugccucggggacaucgcggcccgcgaccugaucugcgcccagaaguucaacggccugaccgugcucccgccccugcugaccgacgagaugaucgcccaguacaccagcgcccuccuggcggggaccaucacguccggcuggaccuucggggccggcgccgcccugcagauccccuucgcgaugcagauggccuaccgguucaacggcaucggggucacccagaacgugcucuacgagaaccagaagcugaucgccaaccaguucaacagcgccaucggcaagauccaggacucccugagcuccaccgccagcgcgcucgggaagcugcaggacguggucaaccagaacgcccaggcccugaacacgcucgugaagcagcuguccagcaacuucggcgccaucuccagcgugcugaacgacauccucucccgccuggacaaggucgaggccgaggugcagaucgaccggcugaucaccgggcgccuccagagccugcagaccuacgugacccagcagcugauccgggcggccgagauccgcgccagcgccaaccucgccgcgaccaagauguccgagugcguccugggccagagcaagcggguggacuucugcggcaagggguaccaccugauguccuucccccagagcgccccgcacggcguggucuuccuccacgugacguacgucugcgcccaggagaagaacuucaccaccgcccccgcgaucugccacgacgggaaggcccacuucccccgcgagggcguguucguguccaacgggacccacugguucgucacgcagcggaacuucuacgagccgcagaucaucaccaccgacaacaccuucgugagcggcaacugcgacguggucaucggcaucgugaacaacacgguguacgacccccugcagcccgagcuggacuccuucaaggaggagcucgacaaguacuucaagaaccacaccagccccgacgucgaccugggggacaucuccggcaucaacgccagcguggugaacauccagaaggagaucgaccgccugaacgaggucgccaagaaccucaacgagucccugaucgaccugcaggagcucgggaaguacgagcaguacaucaagggcgggggcgggagcgacaucaucaagcuccugaacgagcaggucaacaaggagaugcaguccagcaaccuguacauguccaugagcuccuggugcuacacccacagccucgacggcgccgggcuguuccuguucgaccacgccgcggaggaguacgagcacgccaagaagcucaucaucuuccugaacgagaacaacgugcccgugcagcugaccuccaucagcgccccggagcacaaguucgagggccucacgcagaucuuccagaaggccuacgagcacgagcagcacaucuccgagagcaucaacaacaucguggaccacgccaucaaguccaaggaccacgcgaccuucaacuuccugcagugguacgucgccgagcagcacgaggaggaggugcuguucaaggacauccucgacaagaucgagcugaucgggaacgagaaccacggccuguaccucgccgaccaguacgugaaggggaucgccaagagccgcaaguccugaggacuagucccuguucccagagcccacuuuuuuuucuuuuuuugaaauaaaauagccugucuuucagaucucaaaggcucuuuucagagccaccaaaaaaaaaaaaaaaaaaaaaaaaaaaaaaaaaaaaaaaaaaaaaaaaaaaaaaaaaaaaaaaaaaaaaaaaaaaaaaaaaaaaaaaaaaaaaaaaaaaaa

SEQ ID NO: 12376 - RNA, 4412 nt, Artificial Sequence
  SARS-CoV-2/Wuhan/WIV05/2019__EPI_ISL_402128 spike protein mRNA gc (1-1211)(G889C_L1034C) Ferritin construct
aggagagucccgcagucggcguccagcggcucugcuuguucgugugugugucguugcaggccuuauucaagcuuaccauguucguguuccugguccuccugccccuggugagcucccagugcgugaaccucaccacccgcacgcagcugccgcccgccuacaccaacagcuucacccggggcgucuacuaccccgacaagguguuccgcuccagcgugcugcacuccacccaggaccucuuccugcccuucuucagcaacgucacgugguuccacgccauccacguguccgggaccaacggcaccaagcgguucgacaacccggugcugcccuucaacgacggggucuacuucgcgagcaccgagaaguccaacaucauccgcggcuggaucuucgggacgacccucgacagcaagacccagucccugcugaucgugaacaacgccaccaacguggucaucaaggugugcgaguuccaguucugcaacgaccccuuccucggcguguacuaccacaagaacaacaagagcuggauggaguccgaguuccgggucuacagcuccgccaacaacugcacguucgaguacgugagccagcccuuccugauggaccuggagggcaagcaggggaacuucaagaaccuccgcgaguucguguucaagaacaucgacggcuacuucaagaucuacuccaagcacaccccgaucaaccugguccgggaccugccccagggguucagcgcccucgagccccugguggaccugcccaucggcaucaacaucacccgcuuccagacccuccuggcccugcaccgguccuaccucacgccgggggacagcagcuccggcuggaccgcgggcgccgccgccuacuacgugggguaccugcagccccgcaccuuccugcucaaguacaacgagaacggcaccaucacggacgcggucgacugcgcccuggacccccugagcgagaccaagugcacccucaaguccuucaccguggagaaggggaucuaccagacgagcaacuuccgggugcagcccaccgaguccaucguccgcuucccgaacaucaccaaccugugccccuucggcgagguguucaacgccacccgguucgccagcgucuacgccuggaaccgcaagcggaucuccaacugcguggcggacuacagcgugcuguacaacuccgccagcuucuccacguucaagugcuacggcgucagccccaccaagcucaacgaccugugcuucaccaacguguacgccgacuccuucgugauccgcggggacgagguccggcagaucgcccccggccagaccgggaagaucgccgacuacaacuacaagcugccggacgacuucacgggcugcgugaucgcguggaacagcaacaaccucgacuccaaggucgggggcaacuacaacuaccuguaccgccuguuccgcaagagcaaccucaagcccuucgagcgggacaucuccaccgagaucuaccaggccggcagcacccccugcaacgggguggagggcuucaacugcuacuucccccugcaguccuacggguuccagccgaccaacggcgugggguaccagcccuaccggguggucgugcugagcuucgagcuccugcacgcccccgccacggugugcggccccaagaaguccaccaaccuggucaagaacaagugcgugaacuucaacuucaacggccucaccgggaccggcgugcugaccgagagcaacaagaaguuccugccguuccagcaguucgggcgcgacaucgccgacacgaccgacgcgguccgcgacccccagacccuggagauccucgacaucacccccugcagcuucggcgggguguccgugaucacgccgggcaccaacaccagcaaccaggucgccgugcuguaccaggacgugaacugcaccgagguccccguggccauccacgccgaccagcugacgcccaccuggcggguguacuccaccggcagcaacgucuuccagacccgcgccgggugccucaucggcgcggagcacgugaacaacuccuacgagugcgacauccccaucggggccggcaucugcgccagcuaccagacgcagaccaacuccccgcggcgcgcccggagcguggcgucccagagcaucaucgccuacaccaugucccugggcgccgagaacagcgucgccuacuccaacaacagcaucgccauccccaccaacuucacgaucuccgugaccaccgagauccugcccgugagcaugaccaagacgagcgucgacugcaccauguacaucugcggggacuccaccgagugcagcaaccuccugcugcaguacggcuccuucugcacccagcucaaccgcgcgcugacggggaucgccguggagcaggacaagaacacccaggagguguucgcccaggucaagcagaucuacaagacgcccccgaucaaggacuucggcggguucaacuucagccagauccugcccgaccccuccaagcccagcaagcgguccuucaucgaggaccuccuguucaacaaggugacccuggccgacgccggcuucaucaagcaguacggcgacugccucggggacaucgcggcccgcgaccugaucugcgcccagaaguucaacggccugaccgugcucccgccccugcugaccgacgagaugaucgcccaguacaccagcgcccuccuggcggggaccaucacguccggcuggaccuucugcgccggcgccgcccugcagauccccuucgcgaugcagauggccuaccgguucaacggcaucggggucacccagaacgugcucuacgagaaccagaagcugaucgccaaccaguucaacagcgccaucggcaagauccaggacucccugagcuccaccgccagcgcgcucgggaagcugcaggacguggucaaccagaacgcccaggcccugaacacgcucgugaagcagcuguccagcaacuucggcgccaucuccagcgugcugaacgacauccucucccgccuggacaaggucgaggccgaggugcagaucgaccggcugaucaccgggcgccuccagagccugcagaccuacgugacccagcagcugauccgggcggccgagauccgcgccagcgccaaccucgccgcgaccaagauguccgagugcgucugcggccagagcaagcggguggacuucugcggcaagggguaccaccugauguccuucccccagagcgccccgcacggcguggucuuccuccacgugacguacguccccgcccaggagaagaacuucaccaccgcccccgcgaucugccacgacgggaaggcccacuucccccgcgagggcguguucguguccaacgggacccacugguucgucacgcagcggaacuucuacgagccgcagaucaucaccaccgacaacaccuucgugagcggcaacugcgacguggucaucggcaucgugaacaacacgguguacgacccccugcagcccgagcuggacuccuucaaggaggagcucgacaaguacuucaagaaccacaccagccccgacgucgaccugggggacaucuccggcaucaacgccagcguggugaacauccagaaggagaucgaccgccugaacgaggucgccaagaaccucaacgagucccugaucgaccugcaggagcucgggaaguacgagcaguacaucaagggcgggggcgggagcgacaucaucaagcuccugaacgagcaggucaacaaggagaugcaguccagcaaccuguacauguccaugagcuccuggugcuacacccacagccucgacggcgccgggcuguuccuguucgaccacgccgcggaggaguacgagcacgccaagaagcucaucaucuuccugaacgagaacaacgugcccgugcagcugaccuccaucagcgccccggagcacaaguucgagggccucacgcagaucuuccagaaggccuacgagcacgagcagcacaucuccgagagcaucaacaacaucguggaccacgccaucaaguccaaggaccacgcgaccuucaacuuccugcagugguacgucgccgagcagcacgaggaggaggugcuguucaaggacauccucgacaagaucgagcugaucgggaacgagaaccacggccuguaccucgccgaccaguacgugaaggggaucgccaagagccgcaaguccugaggacuagucccuguucccagagcccacuuuuuuuucuuuuuuugaaauaaaauagccugucuuucagaucucaaaggcucuuuucagagccaccaaaaaaaaaaaaaaaaaaaaaaaaaaaaaaaaaaaaaaaaaaaaaaaaaaaaaaaaaaaaaaaaaaaaaaaaaaaaaaaaaaaaaaaaaaaaaaaaaaaaa

SEQ ID NO: 12377 - RNA, 4412 nt, Artificial Sequence
  SARS-CoV-2/Wuhan/WIV05/2019__EPI_ISL_402128 spike protein mRNA gc (1-1211)(I909C_Y1047C) Ferritin construct
aggagagucccgcagucggcguccagcggcucugcuuguucgugugugugucguugcaggccuuauucaagcuuaccauguucguguuccugguccuccugccccuggugagcucccagugcgugaaccucaccacccgcacgcagcugccgcccgccuacaccaacagcuucacccggggcgucuacuaccccgacaagguguuccgcuccagcgugcugcacuccacccaggaccucuuccugcccuucuucagcaacgucacgugguuccacgccauccacguguccgggaccaacggcaccaagcgguucgacaacccggugcugcccuucaacgacggggucuacuucgcgagcaccgagaaguccaacaucauccgcggcuggaucuucgggacgacccucgacagcaagacccagucccugcugaucgugaacaacgccaccaacguggucaucaaggugugcgaguuccaguucugcaacgaccccuuccucggcguguacuaccacaagaacaacaagagcuggauggaguccgaguuccgggucuacagcuccgccaacaacugcacguucgaguacgugagccagcccuuccugauggaccuggagggcaagcaggggaacuucaagaaccuccgcgaguucguguucaagaacaucgacggcuacuucaagaucuacuccaagcacaccccgaucaaccugguccgggaccugccccagggguucagcgcccucgagccccugguggaccugcccaucggcaucaacaucacccgcuuccagacccuccuggcccugcaccgguccuaccucacgccgggggacagcagcuccggcuggaccgcgggcgccgccgccuacuacgugggguaccugcagccccgcaccuuccugcucaaguacaacgagaacggcaccaucacggacgcggucgacugcgcccuggacccccugagcgagaccaagugcacccucaaguccuucaccguggagaaggggaucuaccagacgagcaacuuccgggugcagcccaccgaguccaucguccgcuucccgaacaucaccaaccugugccccuucggcgagguguucaacgccacccgguucgccagcgucuacgccuggaaccgcaagcggaucuccaacugcguggcggacuacagcgugcuguacaacuccgccagcuucuccacguucaagugcuacggcgucagccccaccaagcucaacgaccugugcuucaccaacguguacgccgacuccuucgugauccgcggggacgagguccggcagaucgcccccggccagaccgggaagaucgccgacuacaacuacaagcugccggacgacuucacgggcugcgugaucgcguggaacagcaacaaccucgacuccaaggucgggggcaacuacaacuaccuguaccgccuguuccgcaagagcaaccucaagcccuucgagcgggacaucuccaccgagaucuaccaggccggcagcacccccugcaacgggguggagggcuucaacugcuacuucccccugcaguccuacggguuccagccgaccaacggcgugggguaccagcccuaccggguggucgugcugagcuucgagcuccugcacgcccccgccacggugugcggccccaagaaguccaccaaccuggucaagaacaagugcgugaacuucaacuucaacggccucaccgggaccggcgugcugaccgagagcaacaagaaguuccugccguuccagcaguucgggcgcgacaucgccgacacgaccgacgcgguccgcgacccccagacccuggagauccucgacaucacccccugcagcuucggcgggguguccgugaucacgccgggcaccaacaccagcaaccaggucgccgugcuguaccaggacgugaacugcaccgagguccccguggccauccacgccgaccagcugacgcccaccuggcggguguacuccaccggcagcaacgucuuccagacccgcgccgggugccucaucggcgcggagcacgugaacaacuccuacgagugcgacauccccaucggggccggcaucugcgccagcuaccagacgcagaccaacuccccgcggcgcgcccggagcguggcgucccagagcaucaucgccuacaccaugucccugggcgccgagaacagcgucgccuacuccaacaacagcaucgccauccccaccaacuucacgaucuccgugaccaccgagauccugcccgugagcaugaccaagacgagcgucgacugcaccauguacaucugcggggacuccaccgagugcagcaaccuccugcugcaguacggcuccuucugcacccagcucaaccgcgcgcugacggggaucgccguggagcaggacaagaacacccaggagguguucgcccaggucaagcagaucuacaagacgcccccgaucaaggacuucggcggguucaacuucagccagauccugcccgaccccuccaagcccagcaagcgguccuucaucgaggaccuccuguucaacaaggugacccuggccgacgccggcuucaucaagcaguacggcgacugccucggggacaucgcggcccgcgaccugaucugcgcccagaaguucaacggccugaccgugcucccgccccugcugaccgacgagaugaucgcccaguacaccagcgcccuccuggcggggaccaucacguccggcuggaccuucggggccggcgccgcccugcagauccccuucgcgaugcagauggccuaccgguucaacggcugcggggucacccagaacgugcucuacgagaaccagaagcugaucgccaaccaguucaacagcgccaucggcaagauccaggacucccugagcuccaccgccagcgcgcucgggaagcugcaggacguggucaaccagaacgcccaggcccugaacacgcucgugaagcagcuguccagcaacuucggcgccaucuccagcgugcugaacgacauccucucccgccuggacaaggucgaggccgaggugcagaucgaccggcugaucaccgggcgccuccagagccugcagaccuacgugacccagcagcugauccgggcggccgagauccgcgccagcgccaaccucgccgcgaccaagauguccgagugcguccugggccagagcaagcggguggacuucugcggcaaggggugccaccugauguccuucccccagagcgccccgcacggcguggucuuccuccacgugacguacguccccgcccaggagaagaacuucaccaccgcccccgcgaucugccacgacgggaaggcccacuucccccgcgagggcguguucguguccaacgggacccacugguucgucacgcagcggaacuucuacgagccgcagaucaucaccaccgacaacaccuucgugagcggcaacugcgacguggucaucggcaucgugaacaacacgguguacgacccccugcagcccgagcuggacuccuucaaggaggagcucgacaaguacuucaagaaccacaccagccccgacgucgaccugggggacaucuccggcaucaacgccagcguggugaacauccagaaggagaucgaccgccugaacgaggucgccaagaaccucaacgagucccugaucgaccugcaggagcucgggaaguacgagcaguacaucaagggcgggggcgggagcgacaucaucaagcuccugaacgagcaggucaacaaggagaugcaguccagcaaccuguacauguccaugagcuccuggugcuacacccacagccucgacggcgccgggcuguuccuguucgaccacgccgcggaggaguacgagcacgccaagaagcucaucaucuuccugaacgagaacaacgugcccgugcagcugaccuccaucagcgccccggagcacaaguucgagggccucacgcagaucuuccagaaggccuacgagcacgagcagcacaucuccgagagcaucaacaacaucguggaccacgccaucaaguccaaggaccacgcgaccuucaacuuccugcagugguacgucgccgagcagcacgaggaggaggugcuguucaaggacauccucgacaagaucgagcugaucgggaacgagaaccacggccuguaccucgccgaccaguacgugaaggggaucgccaagagccgcaaguccugaggacuagucccuguucccagagcccacuuuuuuuucuuuuuuugaaauaaaauagccugucuuucagaucucaaaggcucuuuucagagccaccaaaaaaaaaaaaaaaaaaaaaaaaaaaaaaaaaaaaaaaaaaaaaaaaaaaaaaaaaaaaaaaaaaaaaaaaaaaaaaaaaaaaaaaaaaaaaaaaaaaaa

SEQ ID NO: 12378 - RNA, 4412 nt, Artificial Sequence
  SARS-CoV-2/Wuhan/WIV05/2019__EPI_ISL_402128 spike protein mRNA gc (1-1211)(Q965C_S1003C) Ferritin construct
aggagagucccgcagucggcguccagcggcucugcuuguucgugugugugucguugcaggccuuauucaagcuuaccauguucguguuccugguccuccugccccuggugagcucccagugcgugaaccucaccacccgcacgcagcugccgcccgccuacaccaacagcuucacccggggcgucuacuaccccgacaagguguuccgcuccagcgugcugcacuccacccaggaccucuuccugcccuucuucagcaacgucacgugguuccacgccauccacguguccgggaccaacggcaccaagcgguucgacaacccggugcugcccuucaacgacggggucuacuucgcgagcaccgagaaguccaacaucauccgcggcuggaucuucgggacgacccucgacagcaagacccagucccugcugaucgugaacaacgccaccaacguggucaucaaggugugcgaguuccaguucugcaacgaccccuuccucggcguguacuaccacaagaacaacaagagcuggauggaguccgaguuccgggucuacagcuccgccaacaacugcacguucgaguacgugagccagcccuuccugauggaccuggagggcaagcaggggaacuucaagaaccuccgcgaguucguguucaagaacaucgacggcuacuucaagaucuacuccaagcacaccccgaucaaccugguccgggaccugccccagggguucagcgcccucgagccccugguggaccugcccaucggcaucaacaucacccgcuuccagacccuccuggcccugcaccgguccuaccucacgccgggggacagcagcuccggcuggaccgcgggcgccgccgccuacuacgugggguaccugcagccccgcaccuuccugcucaaguacaacgagaacggcaccaucacggacgcggucgacugcgcccuggacccccugagcgagaccaagugcacccucaaguccuucaccguggagaaggggaucuaccagacgagcaacuuccgggugcagcccaccgaguccaucguccgcuucccgaacaucaccaaccugugccccuucggcgagguguucaacgccacccgguucgccagcgucuacgccuggaaccgcaagcggaucuccaacugcguggcggacuacagcgugcuguacaacuccgccagcuucuccacguucaagugcuacggcgucagccccaccaagcucaacgaccugugcuucaccaacguguacgccgacuccuucgugauccgcggggacgagguccggcagaucgcccccggccagaccgggaagaucgccgacuacaacuacaagcugccggacgacuucacgggcugcgugaucgcguggaacagcaacaaccucgacuccaaggucgggggcaacuacaacuaccuguaccgccuguuccgcaagagcaaccucaagcccuucgagcgggacaucuccaccgagaucuaccaggccggcagcacccccugcaacgggguggagggcuucaacugcuacuucccccugcaguccuacggguuccagccgaccaacggcgugggguaccagcccuaccggguggucgugcugagcuucgagcuccugcacgcccccgccacggugugcggccccaagaaguccaccaaccuggucaagaacaagugcgugaacuucaacuucaacggccucaccgggaccggcgugcugaccgagagcaacaagaaguuccugccguuccagcaguucgggcgcgacaucgccgacacgaccgacgcgguccgcgacccccagacccuggagauccucgacaucacccccugcagcuucggcgggguguccgugaucacgccgggcaccaacaccagcaaccaggucgccgugcuguaccaggacgugaacugcaccgagguccccguggccauccacgccgaccagcugacgcccaccuggcggguguacuccaccggcagcaacgucuuccagacccgcgccgggugccucaucggcgcggagcacgugaacaacuccuacgagugcgacauccccaucggggccggcaucugcgccagcuaccagacgcagaccaacuccccgcggcgcgcccggagcguggcgucccagagcaucaucgccuacaccaugucccugggcgccgagaacagcgucgccuacuccaacaacagcaucgccauccccaccaacuucacgaucuccgugaccaccgagauccugcccgugagcaugaccaagacgagcgucgacugcaccauguacaucugcggggacuccaccgagugcagcaaccuccugcugcaguacggcuccuucugcacccagcucaaccgcgcgcugacggggaucgccguggagcaggacaagaacacccaggagguguucgcccaggucaagcagaucuacaagacgcccccgaucaaggacuucggcggguucaacuucagccagauccugcccgaccccuccaagcccagcaagcgguccuucaucgaggaccuccuguucaacaaggugacccuggccgacgccggcuucaucaagcaguacggcgacugccucggggacaucgcggcccgcgaccugaucugcgcccagaaguucaacggccugaccgugcucccgccccugcugaccgacgagaugaucgcccaguacaccagcgcccuccuggcggggaccaucacguccggcuggaccuucggggccggcgccgcccugcagauccccuucgcgaugcagauggccuaccgguucaacggcaucggggucacccagaacgugcucuacgagaaccagaagcugaucgccaaccaguucaacagcgccaucggcaagauccaggacucccugagcuccaccgccagcgcgcucgggaagcugcaggacguggucaaccagaacgcccaggcccugaacacgcucgugaagugccuguccagcaacuucggcgccaucuccagcgugcugaacgacauccucucccgccuggacaaggucgaggccgaggugcagaucgaccggcugaucaccgggcgccuccagugccugcagaccuacgugacccagcagcugauccgggcggccgagauccgcgccagcgccaaccucgccgcgaccaagauguccgagugcguccugggccagagcaagcggguggacuucugcggcaagggguaccaccugauguccuucccccagagcgccccgcacggcguggucuuccuccacgugacguacguccccgcccaggagaagaacuucaccaccgcccccgcgaucugccacgacgggaaggcccacuucccccgcgagggcguguucguguccaacgggacccacugguucgucacgcagcggaacuucuacgagccgcagaucaucaccaccgacaacaccuucgugagcggcaacugcgacguggucaucggcaucgugaacaacacgguguacgacccccugcagcccgagcuggacuccuucaaggaggagcucgacaaguacuucaagaaccacaccagccccgacgucgaccugggggacaucuccggcaucaacgccagcguggugaacauccagaaggagaucgaccgccugaacgaggucgccaagaaccucaacgagucccugaucgaccugcaggagcucgggaaguacgagcaguacaucaagggcgggggcgggagcgacaucaucaagcuccugaacgagcaggucaacaaggagaugcaguccagcaaccuguacauguccaugagcuccuggugcuacacccacagccucgacggcgccgggcuguuccuguucgaccacgccgcggaggaguacgagcacgccaagaagcucaucaucuuccugaacgagaacaacgugcccgugcagcugaccuccaucagcgccccggagcacaaguucgagggccucacgcagaucuuccagaaggccuacgagcacgagcagcacaucuccgagagcaucaacaacaucguggaccacgccaucaaguccaaggaccacgcgaccuucaacuuccugcagugguacgucgccgagcagcacgaggaggaggugcuguucaaggacauccucgacaagaucgagcugaucgggaacgagaaccacggccuguaccucgccgaccaguacgugaaggggaucgccaagagccgcaaguccugaggacuagucccuguucccagagcccacuuuuuuuucuuuuuuugaaauaaaauagccugucuuucagaucucaaaggcucuuuucagagccaccaaaaaaaaaaaaaaaaaaaaaaaaaaaaaaaaaaaaaaaaaaaaaaaaaaaaaaaaaaaaaaaaaaaaaaaaaaaaaaaaaaaaaaaaaaaaaaaaaaaaa

SEQ ID NO: 12379 - RNA, 4412 nt, Artificial Sequence
  SARS-CoV-2/Wuhan/WIV05/2019__EPI_ISL_402128 spike protein mRNA gc (1-1211)(F970C_G999C) Ferritin construct
aggagagucccgcagucggcguccagcggcucugcuuguucgugugugugucguugcaggccuuauucaagcuuaccauguucguguuccugguccuccugccccuggugagcucccagugcgugaaccucaccacccgcacgcagcugccgcccgccuacaccaacagcuucacccggggcgucuacuaccccgacaagguguuccgcuccagcgugcugcacuccacccaggaccucuuccugcccuucuucagcaacgucacgugguuccacgccauccacguguccgggaccaacggcaccaagcgguucgacaacccggugcugcccuucaacgacggggucuacuucgcgagcaccgagaaguccaacaucauccgcggcuggaucuucgggacgacccucgacagcaagacccagucccugcugaucgugaacaacgccaccaacguggucaucaaggugugcgaguuccaguucugcaacgaccccuuccucggcguguacuaccacaagaacaacaagagcuggauggaguccgaguuccgggucuacagcuccgccaacaacugcacguucgaguacgugagccagcccuuccugauggaccuggagggcaagcaggggaacuucaagaaccuccgcgaguucguguucaagaacaucgacggcuacuucaagaucuacuccaagcacaccccgaucaaccugguccgggaccugccccagggguucagcgcccucgagccccugguggaccugcccaucggcaucaacaucacccgcuuccagacccuccuggcccugcaccgguccuaccucacgccgggggacagcagcuccggcuggaccgcgggcgccgccgccuacuacgugggguaccugcagccccgcaccuuccugcucaaguacaacgagaacggcaccaucacggacgcggucgacugcgcccuggacccccugagcgagaccaagugcacccucaaguccuucaccguggagaaggggaucuaccagacgagcaacuuccgggugcagcccaccgaguccaucguccgcuucccgaacaucaccaaccugugccccuucggcgagguguucaacgccacccgguucgccagcgucuacgccuggaaccgcaagcggaucuccaacugcguggcggacuacagcgugcuguacaacuccgccagcuucuccacguucaagugcuacggcgucagccccaccaagcucaacgaccugugcuucaccaacguguacgccgacuccuucgugauccgcggggacgagguccggcagaucgcccccggccagaccgggaagaucgccgacuacaacuacaagcugccggacgacuucacgggcugcgugaucgcguggaacagcaacaaccucgacuccaaggucgggggcaacuacaacuaccuguaccgccuguuccgcaagagcaaccucaagcccuucgagcgggacaucuccaccgagaucuaccaggccggcagcacccccugcaacgggguggagggcuucaacugcuacuucccccugcaguccuacggguuccagccgaccaacggcgugggguaccagcccuaccggguggucgugcugagcuucgagcuccugcacgcccccgccacggugugcggccccaagaaguccaccaaccuggucaagaacaagugcgugaacuucaacuucaacggccucaccgggaccggcgugcugaccgagagcaacaagaaguuccugccguuccagcaguucgggcgcgacaucgccgacacgaccgacgcgguccgcgacccccagacccuggagauccucgacaucacccccugcagcuucggcgggguguccgugaucacgccgggcaccaacaccagcaaccaggucgccgugcuguaccaggacgugaacugcaccgagguccccguggccauccacgccgaccagcugacgcccaccuggcggguguacuccaccggcagcaacgucuuccagacccgcgccgggugccucaucggcgcggagcacgugaacaacuccuacgagugcgacauccccaucggggccggcaucugcgccagcuaccagacgcagaccaacuccccgcggcgcgcccggagcguggcgucccagagcaucaucgccuacaccaugucccugggcgccgagaacagcgucgccuacuccaacaacagcaucgccauccccaccaacuucacgaucuccgugaccaccgagauccugcccgugagcaugaccaagacgagcgucgacugcaccauguacaucugcggggacuccaccgagugcagcaaccuccugcugcaguacggcuccuucugcacccagcucaaccgcgcgcugacggggaucgccguggagcaggacaagaacacccaggagguguucgcccaggucaagcagaucuacaagacgcccccgaucaaggacuucggcggguucaacuucagccagauccugcccgaccccuccaagcccagcaagcgguccuucaucgaggaccuccuguucaacaaggugacccuggccgacgccggcuucaucaagcaguacggcgacugccucggggacaucgcggcccgcgaccugaucugcgcccagaaguucaacggccugaccgugcucccgccccugcugaccgacgagaugaucgcccaguacaccagcgcccuccuggcggggaccaucacguccggcuggaccuucggggccggcgccgcccugcagauccccuucgcgaugcagauggccuaccgguucaacggcaucggggucacccagaacgugcucuacgagaaccagaagcugaucgccaaccaguucaacagcgccaucggcaagauccaggacucccugagcuccaccgccagcgcgcucgggaagcugcaggacguggucaaccagaacgcccaggcccugaacacgcucgugaagcagcuguccagcaacugcggcgccaucuccagcgugcugaacgacauccucucccgccuggacaaggucgaggccgaggugcagaucgaccggcugaucaccugucgccuccagagccugcagaccuacgugacccagcagcugauccgggcggccgagauccgcgccagcgccaaccucgccgcgaccaagauguccgagugcguccugggccagagcaagcggguggacuucugcggcaagggguaccaccugauguccuucccccagagcgccccgcacggcguggucuuccuccacgugacguacguccccgcccaggagaagaacuucaccaccgcccccgcgaucugccacgacgggaaggcccacuucccccgcgagggcguguucguguccaacgggacccacugguucgucacgcagcggaacuucuacgagccgcagaucaucaccaccgacaacaccuucgugagcggcaacugcgacguggucaucggcaucgugaacaacacgguguacgacccccugcagcccgagcuggacuccuucaaggaggagcucgacaaguacuucaagaaccacaccagccccgacgucgaccugggggacaucuccggcaucaacgccagcguggugaacauccagaaggagaucgaccgccugaacgaggucgccaagaaccucaacgagucccugaucgaccugcaggagcucgggaaguacgagcaguacaucaagggcgggggcgggagcgacaucaucaagcuccugaacgagcaggucaacaaggagaugcaguccagcaaccuguacauguccaugagcuccuggugcuacacccacagccucgacggcgccgggcuguuccuguucgaccacgccgcggaggaguacgagcacgccaagaagcucaucaucuuccugaacgagaacaacgugcccgugcagcugaccuccaucagcgccccggagcacaaguucgagggccucacgcagaucuuccagaaggccuacgagcacgagcagcacaucuccgagagcaucaacaacaucguggaccacgccaucaaguccaaggaccacgcgaccuucaacuuccugcagugguacgucgccgagcagcacgaggaggaggugcuguucaaggacauccucgacaagaucgagcugaucgggaacgagaaccacggccuguaccucgccgaccaguacgugaaggggaucgccaagagccgcaaguccugaggacuagucccuguucccagagcccacuuuuuuuucuuuuuuugaaauaaaauagccugucuuucagaucucaaaggcucuuuucagagccaccaaaaaaaaaaaaaaaaaaaaaaaaaaaaaaaaaaaaaaaaaaaaaaaaaaaaaaaaaaaaaaaaaaaaaaaaaaaaaaaaaaaaaaaaaaaaaaaaaaaaa

SEQ ID NO: 12380 - RNA, 4412 nt, Artificial Sequence
  SARS-CoV-2/Wuhan/WIV05/2019__EPI_ISL_402128 spike protein mRNA gc (1-1211)(A972C_R995C) Ferritin construct
aggagagucccgcagucggcguccagcggcucugcuuguucgugugugugucguugcaggccuuauucaagcuuaccauguucguguuccugguccuccugccccuggugagcucccagugcgugaaccucaccacccgcacgcagcugccgcccgccuacaccaacagcuucacccggggcgucuacuaccccgacaagguguuccgcuccagcgugcugcacuccacccaggaccucuuccugcccuucuucagcaacgucacgugguuccacgccauccacguguccgggaccaacggcaccaagcgguucgacaacccggugcugcccuucaacgacggggucuacuucgcgagcaccgagaaguccaacaucauccgcggcuggaucuucgggacgacccucgacagcaagacccagucccugcugaucgugaacaacgccaccaacguggucaucaaggugugcgaguuccaguucugcaacgaccccuuccucggcguguacuaccacaagaacaacaagagcuggauggaguccgaguuccgggucuacagcuccgccaacaacugcacguucgaguacgugagccagcccuuccugauggaccuggagggcaagcaggggaacuucaagaaccuccgcgaguucguguucaagaacaucgacggcuacuucaagaucuacuccaagcacaccccgaucaaccugguccgggaccugccccagggguucagcgcccucgagccccugguggaccugcccaucggcaucaacaucacccgcuuccagacccuccuggcccugcaccgguccuaccucacgccgggggacagcagcuccggcuggaccgcgggcgccgccgccuacuacgugggguaccugcagccccgcaccuuccugcucaaguacaacgagaacggcaccaucacggacgcggucgacugcgcccuggacccccugagcgagaccaagugcacccucaaguccuucaccguggagaaggggaucuaccagacgagcaacuuccgggugcagcccaccgaguccaucguccgcuucccgaacaucaccaaccugugccccuucggcgagguguucaacgccacccgguucgccagcgucuacgccuggaaccgcaagcggaucuccaacugcguggcggacuacagcgugcuguacaacuccgccagcuucuccacguucaagugcuacggcgucagccccaccaagcucaacgaccugugcuucaccaacguguacgccgacuccuucgugauccgcggggacgagguccggcagaucgcccccggccagaccgggaagaucgccgacuacaacuacaagcugccggacgacuucacgggcugcgugaucgcguggaacagcaacaaccucgacuccaaggucgggggcaacuacaacuaccuguaccgccuguuccgcaagagcaaccucaagcccuucgagcgggacaucuccaccgagaucuaccaggccggcagcacccccugcaacgggguggagggcuucaacugcuacuucccccugcaguccuacggguuccagccgaccaacggcgugggguaccagcccuaccggguggucgugcugagcuucgagcuccugcacgcccccgccacggugugcggccccaagaaguccaccaaccuggucaagaacaagugcgugaacuucaacuucaacggccucaccgggaccggcgugcugaccgagagcaacaagaaguuccugccguuccagcaguucgggcgcgacaucgccgacacgaccgacgcgguccgcgacccccagacccuggagauccucgacaucacccccugcagcuucggcgggguguccgugaucacgccgggcaccaacaccagcaaccaggucgccgugcuguaccaggacgugaacugcaccgagguccccguggccauccacgccgaccagcugacgcccaccuggcggguguacuccaccggcagcaacgucuuccagacccgcgccgggugccucaucggcgcggagcacgugaacaacuccuacgagugcgacauccccaucggggccggcaucugcgccagcuaccagacgcagaccaacuccccgcggcgcgcccggagcguggcgucccagagcaucaucgccuacaccaugucccugggcgccgagaacagcgucgccuacuccaacaacagcaucgccauccccaccaacuucacgaucuccgugaccaccgagauccugcccgugagcaugaccaagacgagcgucgacugcaccauguacaucugcggggacuccaccgagugcagcaaccuccugcugcaguacggcuccuucugcacccagcucaaccgcgcgcugacggggaucgccguggagcaggacaagaacacccaggagguguucgcccaggucaagcagaucuacaagacgcccccgaucaaggacuucggcggguucaacuucagccagauccugcccgaccccuccaagcccagcaagcgguccuucaucgaggaccuccuguucaacaaggugacccuggccgacgccggcuucaucaagcaguacggcgacugccucggggacaucgcggcccgcgaccugaucugcgcccagaaguucaacggccugaccgugcucccgccccugcugaccgacgagaugaucgcccaguacaccagcgcccuccuggcggggaccaucacguccggcuggaccuucggggccggcgccgcccugcagauccccuucgcgaugcagauggccuaccgguucaacggcaucggggucacccagaacgugcucuacgagaaccagaagcugaucgccaaccaguucaacagcgccaucggcaagauccaggacucccugagcuccaccgccagcgcgcucgggaagcugcaggacguggucaaccagaacgcccaggcccugaacacgcucgugaagcagcuguccagcaacuucggcugcaucuccagcgugcugaacgacauccucucccgccuggacaaggucgaggccgaggugcagaucgacugccugaucaccgggcgccuccagagccugcagaccuacgugacccagcagcugauccgggcggccgagauccgcgccagcgccaaccucgccgcgaccaagauguccgagugcguccugggccagagcaagcggguggacuucugcggcaagggguaccaccugauguccuucccccagagcgccccgcacggcguggucuuccuccacgugacguacguccccgcccaggagaagaacuucaccaccgcccccgcgaucugccacgacgggaaggcccacuucccccgcgagggcguguucguguccaacgggacccacugguucgucacgcagcggaacuucuacgagccgcagaucaucaccaccgacaacaccuucgugagcggcaacugcgacguggucaucggcaucgugaacaacacgguguacgacccccugcagcccgagcuggacuccuucaaggaggagcucgacaaguacuucaagaaccacaccagccccgacgucgaccugggggacaucuccggcaucaacgccagcguggugaacauccagaaggagaucgaccgccugaacgaggucgccaagaaccucaacgagucccugaucgaccugcaggagcucgggaaguacgagcaguacaucaagggcgggggcgggagcgacaucaucaagcuccugaacgagcaggucaacaaggagaugcaguccagcaaccuguacauguccaugagcuccuggugcuacacccacagccucgacggcgccgggcuguuccuguucgaccacgccgcggaggaguacgagcacgccaagaagcucaucaucuuccugaacgagaacaacgugcccgugcagcugaccuccaucagcgccccggagcacaaguucgagggccucacgcagaucuuccagaaggccuacgagcacgagcagcacaucuccgagagcaucaacaacaucguggaccacgccaucaaguccaaggaccacgcgaccuucaacuuccugcagugguacgucgccgagcagcacgaggaggaggugcuguucaaggacauccucgacaagaucgagcugaucgggaacgagaaccacggccuguaccucgccgaccaguacgugaaggggaucgccaagagccgcaaguccugaggacuagucccuguucccagagcccacuuuuuuuucuuuuuuugaaauaaaauagccugucuuucagaucucaaaggcucuuuucagagccaccaaaaaaaaaaaaaaaaaaaaaaaaaaaaaaaaaaaaaaaaaaaaaaaaaaaaaaaaaaaaaaaaaaaaaaaaaaaaaaaaaaaaaaaaaaaaaaaaaaaaa

SEQ ID NO: 12381 - RNA, 4412 nt, Artificial Sequence
  SARS-CoV-2/Wuhan/WIV05/2019__EPI_ISL_402128 spike protein mRNA gc (1-1211)(A890C_V1040C) Ferritin construct
aggagagucccgcagucggcguccagcggcucugcuuguucgugugugugucguugcaggccuuauucaagcuuaccauguucguguuccugguccuccugccccuggugagcucccagugcgugaaccucaccacccgcacgcagcugccgcccgccuacaccaacagcuucacccggggcgucuacuaccccgacaagguguuccgcuccagcgugcugcacuccacccaggaccucuuccugcccuucuucagcaacgucacgugguuccacgccauccacguguccgggaccaacggcaccaagcgguucgacaacccggugcugcccuucaacgacggggucuacuucgcgagcaccgagaaguccaacaucauccgcggcuggaucuucgggacgacccucgacagcaagacccagucccugcugaucgugaacaacgccaccaacguggucaucaaggugugcgaguuccaguucugcaacgaccccuuccucggcguguacuaccacaagaacaacaagagcuggauggaguccgaguuccgggucuacagcuccgccaacaacugcacguucgaguacgugagccagcccuuccugauggaccuggagggcaagcaggggaacuucaagaaccuccgcgaguucguguucaagaacaucgacggcuacuucaagaucuacuccaagcacaccccgaucaaccugguccgggaccugccccagggguucagcgcccucgagccccugguggaccugcccaucggcaucaacaucacccgcuuccagacccuccuggcccugcaccgguccuaccucacgccgggggacagcagcuccggcuggaccgcgggcgccgccgccuacuacgugggguaccugcagccccgcaccuuccugcucaaguacaacgagaacggcaccaucacggacgcggucgacugcgcccuggacccccugagcgagaccaagugcacccucaaguccuucaccguggagaaggggaucuaccagacgagcaacuuccgggugcagcccaccgaguccaucguccgcuucccgaacaucaccaaccugugccccuucggcgagguguucaacgccacccgguucgccagcgucuacgccuggaaccgcaagcggaucuccaacugcguggcggacuacagcgugcuguacaacuccgccagcuucuccacguucaagugcuacggcgucagccccaccaagcucaacgaccugugcuucaccaacguguacgccgacuccuucgugauccgcggggacgagguccggcagaucgcccccggccagaccgggaagaucgccgacuacaacuacaagcugccggacgacuucacgggcugcgugaucgcguggaacagcaacaaccucgacuccaaggucgggggcaacuacaacuaccuguaccgccuguuccgcaagagcaaccucaagcccuucgagcgggacaucuccaccgagaucuaccaggccggcagcacccccugcaacgggguggagggcuucaacugcuacuucccccugcaguccuacggguuccagccgaccaacggcgugggguaccagcccuaccggguggucgugcugagcuucgagcuccugcacgcccccgccacggugugcggccccaagaaguccaccaaccuggucaagaacaagugcgugaacuucaacuucaacggccucaccgggaccggcgugcugaccgagagcaacaagaaguuccugccguuccagcaguucgggcgcgacaucgccgacacgaccgacgcgguccgcgacccccagacccuggagauccucgacaucacccccugcagcuucggcgggguguccgugaucacgccgggcaccaacaccagcaaccaggucgccgugcuguaccaggacgugaacugcaccgagguccccguggccauccacgccgaccagcugacgcccaccuggcggguguacuccaccggcagcaacgucuuccagacccgcgccgggugccucaucggcgcggagcacgugaacaacuccuacgagugcgacauccccaucggggccggcaucugcgccagcuaccagacgcagaccaacuccccgcggcgcgcccggagcguggcgucccagagcaucaucgccuacaccaugucccugggcgccgagaacagcgucgccuacuccaacaacagcaucgccauccccaccaacuucacgaucuccgugaccaccgagauccugcccgugagcaugaccaagacgagcgucgacugcaccauguacaucugcggggacuccaccgagugcagcaaccuccugcugcaguacggcuccuucugcacccagcucaaccgcgcgcugacggggaucgccguggagcaggacaagaacacccaggagguguucgcccaggucaagcagaucuacaagacgcccccgaucaaggacuucggcggguucaacuucagccagauccugcccgaccccuccaagcccagcaagcgguccuucaucgaggaccuccuguucaacaaggugacccuggccgacgccggcuucaucaagcaguacggcgacugccucggggacaucgcggcccgcgaccugaucugcgcccagaaguucaacggccugaccgugcucccgccccugcugaccgacgagaugaucgcccaguacaccagcgcccuccuggcggggaccaucacguccggcuggaccuucgggugcggcgccgcccugcagauccccuucgcgaugcagauggccuaccgguucaacggcaucggggucacccagaacgugcucuacgagaaccagaagcugaucgccaaccaguucaacagcgccaucggcaagauccaggacucccugagcuccaccgccagcgcgcucgggaagcugcaggacguggucaaccagaacgcccaggcccugaacacgcucgugaagcagcuguccagcaacuucggcgccaucuccagcgugcugaacgacauccucucccgccuggacaaggucgaggccgaggugcagaucgaccggcugaucaccgggcgccuccagagccugcagaccuacgugacccagcagcugauccgggcggccgagauccgcgccagcgccaaccucgccgcgaccaagauguccgagugcguccugggccagagcaagcggugcgacuucugcggcaagggguaccaccugauguccuucccccagagcgccccgcacggcguggucuuccuccacgugacguacguccccgcccaggagaagaacuucaccaccgcccccgcgaucugccacgacgggaaggcccacuucccccgcgagggcguguucguguccaacgggacccacugguucgucacgcagcggaacuucuacgagccgcagaucaucaccaccgacaacaccuucgugagcggcaacugcgacguggucaucggcaucgugaacaacacgguguacgacccccugcagcccgagcuggacuccuucaaggaggagcucgacaaguacuucaagaaccacaccagccccgacgucgaccugggggacaucuccggcaucaacgccagcguggugaacauccagaaggagaucgaccgccugaacgaggucgccaagaaccucaacgagucccugaucgaccugcaggagcucgggaaguacgagcaguacaucaagggcgggggcgggagcgacaucaucaagcuccugaacgagcaggucaacaaggagaugcaguccagcaaccuguacauguccaugagcuccuggugcuacacccacagccucgacggcgccgggcuguuccuguucgaccacgccgcggaggaguacgagcacgccaagaagcucaucaucuuccugaacgagaacaacgugcccgugcagcugaccuccaucagcgccccggagcacaaguucgagggccucacgcagaucuuccagaaggccuacgagcacgagcagcacaucuccgagagcaucaacaacaucguggaccacgccaucaaguccaaggaccacgcgaccuucaacuuccugcagugguacgucgccgagcagcacgaggaggaggugcuguucaaggacauccucgacaagaucgagcugaucgggaacgagaaccacggccuguaccucgccgaccaguacgugaaggggaucgccaagagccgcaaguccugaggacuagucccuguucccagagcccacuuuuuuuucuuuuuuugaaauaaaauagccugucuuucagaucucaaaggcucuuuucagagccaccaaaaaaaaaaaaaaaaaaaaaaaaaaaaaaaaaaaaaaaaaaaaaaaaaaaaaaaaaaaaaaaaaaaaaaaaaaaaaaaaaaaaaaaaaaaaaaaaaaaaa

SEQ ID NO: 12382 - RNA, 4412 nt, Artificial Sequence
  SARS-CoV-2/Wuhan/WIV05/2019__EPI_ISL_402128 spike protein mRNA gc (1-1211)(T874C_S1055C) Ferritin construct
aggagagucccgcagucggcguccagcggcucugcuuguucgugugugugucguugcaggccuuauucaagcuuaccauguucguguuccugguccuccugccccuggugagcucccagugcgugaaccucaccacccgcacgcagcugccgcccgccuacaccaacagcuucacccggggcgucuacuaccccgacaagguguuccgcuccagcgugcugcacuccacccaggaccucuuccugcccuucuucagcaacgucacgugguuccacgccauccacguguccgggaccaacggcaccaagcgguucgacaacccggugcugcccuucaacgacggggucuacuucgcgagcaccgagaaguccaacaucauccgcggcuggaucuucgggacgacccucgacagcaagacccagucccugcugaucgugaacaacgccaccaacguggucaucaaggugugcgaguuccaguucugcaacgaccccuuccucggcguguacuaccacaagaacaacaagagcuggauggaguccgaguuccgggucuacagcuccgccaacaacugcacguucgaguacgugagccagcccuuccugauggaccuggagggcaagcaggggaacuucaagaaccuccgcgaguucguguucaagaacaucgacggcuacuucaagaucuacuccaagcacaccccgaucaaccugguccgggaccugccccagggguucagcgcccucgagccccugguggaccugcccaucggcaucaacaucacccgcuuccagacccuccuggcccugcaccgguccuaccucacgccgggggacagcagcuccggcuggaccgcgggcgccgccgccuacuacgugggguaccugcagccccgcaccuuccugcucaaguacaacgagaacggcaccaucacggacgcggucgacugcgcccuggacccccugagcgagaccaagugcacccucaaguccuucaccguggagaaggggaucuaccagacgagcaacuuccgggugcagcccaccgaguccaucguccgcuucccgaacaucaccaaccugugccccuucggcgagguguucaacgccacccgguucgccagcgucuacgccuggaaccgcaagcggaucuccaacugcguggcggacuacagcgugcuguacaacuccgccagcuucuccacguucaagugcuacggcgucagccccaccaagcucaacgaccugugcuucaccaacguguacgccgacuccuucgugauccgcggggacgagguccggcagaucgcccccggccagaccgggaagaucgccgacuacaacuacaagcugccggacgacuucacgggcugcgugaucgcguggaacagcaacaaccucgacuccaaggucgggggcaacuacaacuaccuguaccgccuguuccgcaagagcaaccucaagcccuucgagcgggacaucuccaccgagaucuaccaggccggcagcacccccugcaacgggguggagggcuucaacugcuacuucccccugcaguccuacggguuccagccgaccaacggcgugggguaccagcccuaccggguggucgugcugagcuucgagcuccugcacgcccccgccacggugugcggccccaagaaguccaccaaccuggucaagaacaagugcgugaacuucaacuucaacggccucaccgggaccggcgugcugaccgagagcaacaagaaguuccugccguuccagcaguucgggcgcgacaucgccgacacgaccgacgcgguccgcgacccccagacccuggagauccucgacaucacccccugcagcuucggcgggguguccgugaucacgccgggcaccaacaccagcaaccaggucgccgugcuguaccaggacgugaacugcaccgagguccccguggccauccacgccgaccagcugacgcccaccuggcggguguacuccaccggcagcaacgucuuccagacccgcgccgggugccucaucggcgcggagcacgugaacaacuccuacgagugcgacauccccaucggggccggcaucugcgccagcuaccagacgcagaccaacuccccgcggcgcgcccggagcguggcgucccagagcaucaucgccuacaccaugucccugggcgccgagaacagcgucgccuacuccaacaacagcaucgccauccccaccaacuucacgaucuccgugaccaccgagauccugcccgugagcaugaccaagacgagcgucgacugcaccauguacaucugcggggacuccaccgagugcagcaaccuccugcugcaguacggcuccuucugcacccagcucaaccgcgcgcugacggggaucgccguggagcaggacaagaacacccaggagguguucgcccaggucaagcagaucuacaagacgcccccgaucaaggacuucggcggguucaacuucagccagauccugcccgaccccuccaagcccagcaagcgguccuucaucgaggaccuccuguucaacaaggugacccuggccgacgccggcuucaucaagcaguacggcgacugccucggggacaucgcggcccgcgaccugaucugcgcccagaaguucaacggccugaccgugcucccgccccugcugaccgacgagaugaucgcccaguacugcagcgcccuccuggcggggaccaucacguccggcuggaccuucggggccggcgccgcccugcagauccccuucgcgaugcagauggccuaccgguucaacggcaucggggucacccagaacgugcucuacgagaaccagaagcugaucgccaaccaguucaacagcgccaucggcaagauccaggacucccugagcuccaccgccagcgcgcucgggaagcugcaggacguggucaaccagaacgcccaggcccugaacacgcucgugaagcagcuguccagcaacuucggcgccaucuccagcgugcugaacgacauccucucccgccuggacaaggucgaggccgaggugcagaucgaccggcugaucaccgggcgccuccagagccugcagaccuacgugacccagcagcugauccgggcggccgagauccgcgccagcgccaaccucgccgcgaccaagauguccgagugcguccugggccagagcaagcggguggacuucugcggcaagggguaccaccugauguccuucccccagugcgccccgcacggcguggucuuccuccacgugacguacguccccgcccaggagaagaacuucaccaccgcccccgcgaucugccacgacgggaaggcccacuucccccgcgagggcguguucguguccaacgggacccacugguucgucacgcagcggaacuucuacgagccgcagaucaucaccaccgacaacaccuucgugagcggcaacugcgacguggucaucggcaucgugaacaacacgguguacgacccccugcagcccgagcuggacuccuucaaggaggagcucgacaaguacuucaagaaccacaccagccccgacgucgaccugggggacaucuccggcaucaacgccagcguggugaacauccagaaggagaucgaccgccugaacgaggucgccaagaaccucaacgagucccugaucgaccugcaggagcucgggaaguacgagcaguacaucaagggcgggggcgggagcgacaucaucaagcuccugaacgagcaggucaacaaggagaugcaguccagcaaccuguacauguccaugagcuccuggugcuacacccacagccucgacggcgccgggcuguuccuguucgaccacgccgcggaggaguacgagcacgccaagaagcucaucaucuuccugaacgagaacaacgugcccgugcagcugaccuccaucagcgccccggagcacaaguucgagggccucacgcagaucuuccagaaggccuacgagcacgagcagcacaucuccgagagcaucaacaacaucguggaccacgccaucaaguccaaggaccacgcgaccuucaacuuccugcagugguacgucgccgagcagcacgaggaggaggugcuguucaaggacauccucgacaagaucgagcugaucgggaacgagaaccacggccuguaccucgccgaccaguacgugaaggggaucgccaagagccgcaaguccugaggacuagucccuguucccagagcccacuuuuuuuucuuuuuuugaaauaaaauagccugucuuucagaucucaaaggcucuuuucagagccaccaaaaaaaaaaaaaaaaaaaaaaaaaaaaaaaaaaaaaaaaaaaaaaaaaaaaaaaaaaaaaaaaaaaaaaaaaaaaaaaaaaaaaaaaaaaaaaaaaaaaa

SEQ ID NO: 12383 - RNA, 3998 nt, Artificial Sequence
  SARS-CoV-2/Wuhan/WIV05/2019__EPI_ISL_402128 spike protein mRNA gc (1-1211) Foldon construct
aggagagucccgcagucggcguccagcggcucugcuuguucgugugugugucguugcaggccuuauucaagcuuaccauguucguguuccugguccuccugccccuggugagcucccagugcgugaaccucaccacccgcacgcagcugccgcccgccuacaccaacagcuucacccggggcgucuacuaccccgacaagguguuccgcuccagcgugcugcacuccacccaggaccucuuccugcccuucuucagcaacgucacgugguuccacgccauccacguguccgggaccaacggcaccaagcgguucgacaacccggugcugcccuucaacgacggggucuacuucgcgagcaccgagaaguccaacaucauccgcggcuggaucuucgggacgacccucgacagcaagacccagucccugcugaucgugaacaacgccaccaacguggucaucaaggugugcgaguuccaguucugcaacgaccccuuccucggcguguacuaccacaagaacaacaagagcuggauggaguccgaguuccgggucuacagcuccgccaacaacugcacguucgaguacgugagccagcccuuccugauggaccuggagggcaagcaggggaacuucaagaaccuccgcgaguucguguucaagaacaucgacggcuacuucaagaucuacuccaagcacaccccgaucaaccugguccgggaccugccccagggguucagcgcccucgagccccugguggaccugcccaucggcaucaacaucacccgcuuccagacccuccuggcccugcaccgguccuaccucacgccgggggacagcagcuccggcuggaccgcgggcgccgccgccuacuacgugggguaccugcagccccgcaccuuccugcucaaguacaacgagaacggcaccaucacggacgcggucgacugcgcccuggacccccugagcgagaccaagugcacccucaaguccuucaccguggagaaggggaucuaccagacgagcaacuuccgggugcagcccaccgaguccaucguccgcuucccgaacaucaccaaccugugccccuucggcgagguguucaacgccacccgguucgccagcgucuacgccuggaaccgcaagcggaucuccaacugcguggcggacuacagcgugcuguacaacuccgccagcuucuccacguucaagugcuacggcgucagccccaccaagcucaacgaccugugcuucaccaacguguacgccgacuccuucgugauccgcggggacgagguccggcagaucgcccccggccagaccgggaagaucgccgacuacaacuacaagcugccggacgacuucacgggcugcgugaucgcguggaacagcaacaaccucgacuccaaggucgggggcaacuacaacuaccuguaccgccuguuccgcaagagcaaccucaagcccuucgagcgggacaucuccaccgagaucuaccaggccggcagcacccccugcaacgggguggagggcuucaacugcuacuucccccugcaguccuacggguuccagccgaccaacggcgugggguaccagcccuaccggguggucgugcugagcuucgagcuccugcacgcccccgccacggugugcggccccaagaaguccaccaaccuggucaagaacaagugcgugaacuucaacuucaacggccucaccgggaccggcgugcugaccgagagcaacaagaaguuccugccguuccagcaguucgggcgcgacaucgccgacacgaccgacgcgguccgcgacccccagacccuggagauccucgacaucacccccugcagcuucggcgggguguccgugaucacgccgggcaccaacaccagcaaccaggucgccgugcuguaccaggacgugaacugcaccgagguccccguggccauccacgccgaccagcugacgcccaccuggcggguguacuccaccggcagcaacgucuuccagacccgcgccgggugccucaucggcgcggagcacgugaacaacuccuacgagugcgacauccccaucggggccggcaucugcgccagcuaccagacgcagaccaacuccccgcggcgcgcccggagcguggcgucccagagcaucaucgccuacaccaugucccugggcgccgagaacagcgucgccuacuccaacaacagcaucgccauccccaccaacuucacgaucuccgugaccaccgagauccugcccgugagcaugaccaagacgagcgucgacugcaccauguacaucugcggggacuccaccgagugcagcaaccuccugcugcaguacggcuccuucugcacccagcucaaccgcgcgcugacggggaucgccguggagcaggacaagaacacccaggagguguucgcccaggucaagcagaucuacaagacgcccccgaucaaggacuucggcggguucaacuucagccagauccugcccgaccccuccaagcccagcaagcgguccuucaucgaggaccuccuguucaacaaggugacccuggccgacgccggcuucaucaagcaguacggcgacugccucggggacaucgcggcccgcgaccugaucugcgcccagaaguucaacggccugaccgugcucccgccccugcugaccgacgagaugaucgcccaguacaccagcgcccuccuggcggggaccaucacguccggcuggaccuucggggccggcgccgcccugcagauccccuucgcgaugcagauggccuaccgguucaacggcaucggggucacccagaacgugcucuacgagaaccagaagcugaucgccaaccaguucaacagcgccaucggcaagauccaggacucccugagcuccaccgccagcgcgcucgggaagcugcaggacguggucaaccagaacgcccaggcccugaacacgcucgugaagcagcuguccagcaacuucggcgccaucuccagcgugcugaacgacauccucucccgccuggacaaggucgaggccgaggugcagaucgaccggcugaucaccgggcgccuccagagccugcagaccuacgugacccagcagcugauccgggcggccgagauccgcgccagcgccaaccucgccgcgaccaagauguccgagugcguccugggccagagcaagcggguggacuucugcggcaagggguaccaccugauguccuucccccagagcgccccgcacggcguggucuuccuccacgugacguacguccccgcccaggagaagaacuucaccaccgcccccgcgaucugccacgacgggaaggcccacuucccccgcgagggcguguucguguccaacgggacccacugguucgucacgcagcggaacuucuacgagccgcagaucaucaccaccgacaacaccuucgugagcggcaacugcgacguggucaucggcaucgugaacaacacgguguacgacccccugcagcccgagcuggacuccuucaaggaggagcucgacaaguacuucaagaaccacaccagccccgacgucgaccugggggacaucuccggcaucaacgccagcguggugaacauccagaaggagaucgaccgccugaacgaggucgccaagaaccucaacgagucccugaucgaccugcaggagcucgggaaguacgagcaguacaucaagggcgggagcggcuacauccccgaggccccgcgcgacgggcaggccuacgugcggaaggacggcgaguggguccugcucagcaccuuccugugaggacuagucccuguucccagagcccacuuuuuuuucuuuuuuugaaauaaaauagccugucuuucagaucucaaaggcucuuuucagagccaccaaaaaaaaaaaaaaaaaaaaaaaaaaaaaaaaaaaaaaaaaaaaaaaaaaaaaaaaaaaaaaaaaaaaaaaaaaaaaaaaaaaaaaaaaaaaaaaaaaaaa

SEQ ID NO: 12384 - RNA, 3998 nt, Artificial Sequence
  SARS-CoV-2/Wuhan/WIV05/2019__EPI_ISL_402128 spike protein mRNA gc (1-1211)(K986P_V987P) Foldon construct
aggagagucccgcagucggcguccagcggcucugcuuguucgugugugugucguugcaggccuuauucaagcuuaccauguucguguuccugguccuccugccccuggugagcucccagugcgugaaccucaccacccgcacgcagcugccgcccgccuacaccaacagcuucacccggggcgucuacuaccccgacaagguguuccgcuccagcgugcugcacuccacccaggaccucuuccugcccuucuucagcaacgucacgugguuccacgccauccacguguccgggaccaacggcaccaagcgguucgacaacccggugcugcccuucaacgacggggucuacuucgcgagcaccgagaaguccaacaucauccgcggcuggaucuucgggacgacccucgacagcaagacccagucccugcugaucgugaacaacgccaccaacguggucaucaaggugugcgaguuccaguucugcaacgaccccuuccucggcguguacuaccacaagaacaacaagagcuggauggaguccgaguuccgggucuacagcuccgccaacaacugcacguucgaguacgugagccagcccuuccugauggaccuggagggcaagcaggggaacuucaagaaccuccgcgaguucguguucaagaacaucgacggcuacuucaagaucuacuccaagcacaccccgaucaaccugguccgggaccugccccagggguucagcgcccucgagccccugguggaccugcccaucggcaucaacaucacccgcuuccagacccuccuggcccugcaccgguccuaccucacgccgggggacagcagcuccggcuggaccgcgggcgccgccgccuacuacgugggguaccugcagccccgcaccuuccugcucaaguacaacgagaacggcaccaucacggacgcggucgacugcgcccuggacccccugagcgagaccaagugcacccucaaguccuucaccguggagaaggggaucuaccagacgagcaacuuccgggugcagcccaccgaguccaucguccgcuucccgaacaucaccaaccugugccccuucggcgagguguucaacgccacccgguucgccagcgucuacgccuggaaccgcaagcggaucuccaacugcguggcggacuacagcgugcuguacaacuccgccagcuucuccacguucaagugcuacggcgucagccccaccaagcucaacgaccugugcuucaccaacguguacgccgacuccuucgugauccgcggggacgagguccggcagaucgcccccggccagaccgggaagaucgccgacuacaacuacaagcugccggacgacuucacgggcugcgugaucgcguggaacagcaacaaccucgacuccaaggucgggggcaacuacaacuaccuguaccgccuguuccgcaagagcaaccucaagcccuucgagcgggacaucuccaccgagaucuaccaggccggcagcacccccugcaacgggguggagggcuucaacugcuacuucccccugcaguccuacggguuccagccgaccaacggcgugggguaccagcccuaccggguggucgugcugagcuucgagcuccugcacgcccccgccacggugugcggccccaagaaguccaccaaccuggucaagaacaagugcgugaacuucaacuucaacggccucaccgggaccggcgugcugaccgagagcaacaagaaguuccugccguuccagcaguucgggcgcgacaucgccgacacgaccgacgcgguccgcgacccccagacccuggagauccucgacaucacccccugcagcuucggcgggguguccgugaucacgccgggcaccaacaccagcaaccaggucgccgugcuguaccaggacgugaacugcaccgagguccccguggccauccacgccgaccagcugacgcccaccuggcggguguacuccaccggcagcaacgucuuccagacccgcgccgggugccucaucggcgcggagcacgugaacaacuccuacgagugcgacauccccaucggggccggcaucugcgccagcuaccagacgcagaccaacuccccgcggcgcgcccggagcguggcgucccagagcaucaucgccuacaccaugucccugggcgccgagaacagcgucgccuacuccaacaacagcaucgccauccccaccaacuucacgaucuccgugaccaccgagauccugcccgugagcaugaccaagacgagcgucgacugcaccauguacaucugcggggacuccaccgagugcagcaaccuccugcugcaguacggcuccuucugcacccagcucaaccgcgcgcugacggggaucgccguggagcaggacaagaacacccaggagguguucgcccaggucaagcagaucuacaagacgcccccgaucaaggacuucggcggguucaacuucagccagauccugcccgaccccuccaagcccagcaagcgguccuucaucgaggaccuccuguucaacaaggugacccuggccgacgccggcuucaucaagcaguacggcgacugccucggggacaucgcggcccgcgaccugaucugcgcccagaaguucaacggccugaccgugcucccgccccugcugaccgacgagaugaucgcccaguacaccagcgcccuccuggcggggaccaucacguccggcuggaccuucggggccggcgccgcccugcagauccccuucgcgaugcagauggccuaccgguucaacggcaucggggucacccagaacgugcucuacgagaaccagaagcugaucgccaaccaguucaacagcgccaucggcaagauccaggacucccugagcuccaccgccagcgcgcucgggaagcugcaggacguggucaaccagaacgcccaggcccugaacacgcucgugaagcagcuguccagcaacuucggcgccaucuccagcgugcugaacgacauccucucccgccuggacccgcccgaggccgaggugcagaucgaccggcugaucaccgggcgccuccagagccugcagaccuacgugacccagcagcugauccgggcggccgagauccgcgccagcgccaaccucgccgcgaccaagauguccgagugcguccugggccagagcaagcggguggacuucugcggcaagggguaccaccugauguccuucccccagagcgccccgcacggcguggucuuccuccacgugacguacguccccgcccaggagaagaacuucaccaccgcccccgcgaucugccacgacgggaaggcccacuucccccgcgagggcguguucguguccaacgggacccacugguucgucacgcagcggaacuucuacgagccgcagaucaucaccaccgacaacaccuucgugagcggcaacugcgacguggucaucggcaucgugaacaacacgguguacgacccccugcagcccgagcuggacuccuucaaggaggagcucgacaaguacuucaagaaccacaccagccccgacgucgaccugggggacaucuccggcaucaacgccagcguggugaacauccagaaggagaucgaccgccugaacgaggucgccaagaaccucaacgagucccugaucgaccugcaggagcucgggaaguacgagcaguacaucaagggcgggagcggcuacauccccgaggccccgcgcgacgggcaggccuacgugcggaaggacggcgaguggguccugcucagcaccuuccugugaggacuagucccuguucccagagcccacuuuuuuuucuuuuuuugaaauaaaauagccugucuuucagaucucaaaggcucuuuucagagccaccaaaaaaaaaaaaaaaaaaaaaaaaaaaaaaaaaaaaaaaaaaaaaaaaaaaaaaaaaaaaaaaaaaaaaaaaaaaaaaaaaaaaaaaaaaaaaaaaaaaaa

SEQ ID NO: 12385 - RNA, 3998 nt, Artificial Sequence
  SARS-CoV-2/Wuhan/WIV05/2019__EPI_ISL_402128 spike protein mRNA gc (1-1211)(K986P_V987P_T887WN_A1020W) Foldon construct
aggagagucccgcagucggcguccagcggcucugcuuguucgugugugugucguugcaggccuuauucaagcuuaccauguucguguuccugguccuccugccccuggugagcucccagugcgugaaccucaccacccgcacgcagcugccgcccgccuacaccaacagcuucacccggggcgucuacuaccccgacaagguguuccgcuccagcgugcugcacuccacccaggaccucuuccugcccuucuucagcaacgucacgugguuccacgccauccacguguccgggaccaacggcaccaagcgguucgacaacccggugcugcccuucaacgacggggucuacuucgcgagcaccgagaaguccaacaucauccgcggcuggaucuucgggacgacccucgacagcaagacccagucccugcugaucgugaacaacgccaccaacguggucaucaaggugugcgaguuccaguucugcaacgaccccuuccucggcguguacuaccacaagaacaacaagagcuggauggaguccgaguuccgggucuacagcuccgccaacaacugcacguucgaguacgugagccagcccuuccugauggaccuggagggcaagcaggggaacuucaagaaccuccgcgaguucguguucaagaacaucgacggcuacuucaagaucuacuccaagcacaccccgaucaaccugguccgggaccugccccagggguucagcgcccucgagccccugguggaccugcccaucggcaucaacaucacccgcuuccagacccuccuggcccugcaccgguccuaccucacgccgggggacagcagcuccggcuggaccgcgggcgccgccgccuacuacgugggguaccugcagccccgcaccuuccugcucaaguacaacgagaacggcaccaucacggacgcggucgacugcgcccuggacccccugagcgagaccaagugcacccucaaguccuucaccguggagaaggggaucuaccagacgagcaacuuccgggugcagcccaccgaguccaucguccgcuucccgaacaucaccaaccugugccccuucggcgagguguucaacgccacccgguucgccagcgucuacgccuggaaccgcaagcggaucuccaacugcguggcggacuacagcgugcuguacaacuccgccagcuucuccacguucaagugcuacggcgucagccccaccaagcucaacgaccugugcuucaccaacguguacgccgacuccuucgugauccgcggggacgagguccggcagaucgcccccggccagaccgggaagaucgccgacuacaacuacaagcugccggacgacuucacgggcugcgugaucgcguggaacagcaacaaccucgacuccaaggucgggggcaacuacaacuaccuguaccgccuguuccgcaagagcaaccucaagcccuucgagcgggacaucuccaccgagaucuaccaggccggcagcacccccugcaacgggguggagggcuucaacugcuacuucccccugcaguccuacggguuccagccgaccaacggcgugggguaccagcccuaccggguggucgugcugagcuucgagcuccugcacgcccccgccacggugugcggccccaagaaguccaccaaccuggucaagaacaagugcgugaacuucaacuucaacggccucaccgggaccggcgugcugaccgagagcaacaagaaguuccugccguuccagcaguucgggcgcgacaucgccgacacgaccgacgcgguccgcgacccccagacccuggagauccucgacaucacccccugcagcuucggcgggguguccgugaucacgccgggcaccaacaccagcaaccaggucgccgugcuguaccaggacgugaacugcaccgagguccccguggccauccacgccgaccagcugacgcccaccuggcggguguacuccaccggcagcaacgucuuccagacccgcgccgggugccucaucggcgcggagcacgugaacaacuccuacgagugcgacauccccaucggggccggcaucugcgccagcuaccagacgcagaccaacuccccgcggcgcgcccggagcguggcgucccagagcaucaucgccuacaccaugucccugggcgccgagaacagcgucgccuacuccaacaacagcaucgccauccccaccaacuucacgaucuccgugaccaccgagauccugcccgugagcaugaccaagacgagcgucgacugcaccauguacaucugcggggacuccaccgagugcagcaaccuccugcugcaguacggcuccuucugcacccagcucaaccgcgcgcugacggggaucgccguggagcaggacaagaacacccaggagguguucgcccaggucaagcagaucuacaagacgcccccgaucaaggacuucggcggguucaacuucagccagauccugcccgaccccuccaagcccagcaagcgguccuucaucgaggaccuccuguucaacaaggugacccuggccgacgccggcuucaucaagcaguacggcgacugccucggggacaucgcggcccgcgaccugaucugcgcccagaaguucaacggccugaccgugcucccgccccugcugaccgacgagaugaucgcccaguacaccagcgcccuccuggcggggaccaucacguccggcuggugguucggggccggcgccgcccugcagauccccuucgcgaugcagauggccuaccgguucaacggcaucggggucacccagaacgugcucuacgagaaccagaagcugaucgccaaccaguucaacagcgccaucggcaagauccaggacucccugagcuccaccgccagcgcgcucgggaagcugcaggacguggucaaccagaacgcccaggcccugaacacgcucgugaagcagcuguccagcaacuucggcgccaucuccagcgugcugaacgacauccucucccgccuggacccgcccgaggccgaggugcagaucgaccggcugaucaccgggcgccuccagagccugcagaccuacgugacccagcagcugauccgggcggccgagauccgcuggagcgccaaccucgccgcgaccaagauguccgagugcguccugggccagagcaagcggguggacuucugcggcaagggguaccaccugauguccuucccccagagcgccccgcacggcguggucuuccuccacgugacguacguccccgcccaggagaagaacuucaccaccgcccccgcgaucugccacgacgggaaggcccacuucccccgcgagggcguguucguguccaacgggacccacugguucgucacgcagcggaacuucuacgagccgcagaucaucaccaccgacaacaccuucgugagcggcaacugcgacguggucaucggcaucgugaacaacacgguguacgacccccugcagcccgagcuggacuccuucaaggaggagcucgacaaguacuucaagaaccacaccagccccgacgucgaccugggggacaucuccggcaucaacgccagcguggugaacauccagaaggagaucgaccgccugaacgaggucgccaagaaccucaacgagucccugaucgaccugcaggagcucgggaaguacgagcaguacaucaagggcgggagcggcuacauccccgaggccccgcgcgacgggcaggccuacgugcggaaggacggcgaguggguccugcucagcaccuuccugugaggacuagucccuguucccagagcccacuuuuuuuucuuuuuuugaaauaaaauagccugucuuucagaucucaaaggcucuuuucagagccaccaaaaaaaaaaaaaaaaaaaaaaaaaaaaaaaaaaaaaaaaaaaaaaaaaaaaaaaaaaaaaaaaaaaaaaaaaaaaaaaaaaaaaaaaaaaaaaaaaaaaa

SEQ ID NO: 12386 - RNA, 3998 nt, Artificial Sequence
  SARS-CoV-2/Wuhan/WIV05/2019__EPI_ISL_402128 spike protein mRNA gc (1-1211)(K986P_V987P_P1069F) Foldon construct
aggagagucccgcagucggcguccagcggcucugcuuguucgugugugugucguugcaggccuuauucaagcuuaccauguucguguuccugguccuccugccccuggugagcucccagugcgugaaccucaccacccgcacgcagcugccgcccgccuacaccaacagcuucacccggggcgucuacuaccccgacaagguguuccgcuccagcgugcugcacuccacccaggaccucuuccugcccuucuucagcaacgucacgugguuccacgccauccacguguccgggaccaacggcaccaagcgguucgacaacccggugcugcccuucaacgacggggucuacuucgcgagcaccgagaaguccaacaucauccgcggcuggaucuucgggacgacccucgacagcaagacccagucccugcugaucgugaacaacgccaccaacguggucaucaaggugugcgaguuccaguucugcaacgaccccuuccucggcguguacuaccacaagaacaacaagagcuggauggaguccgaguuccgggucuacagcuccgccaacaacugcacguucgaguacgugagccagcccuuccugauggaccuggagggcaagcaggggaacuucaagaaccuccgcgaguucguguucaagaacaucgacggcuacuucaagaucuacuccaagcacaccccgaucaaccugguccgggaccugccccagggguucagcgcccucgagccccugguggaccugcccaucggcaucaacaucacccgcuuccagacccuccuggcccugcaccgguccuaccucacgccgggggacagcagcuccggcuggaccgcgggcgccgccgccuacuacgugggguaccugcagccccgcaccuuccugcucaaguacaacgagaacggcaccaucacggacgcggucgacugcgcccuggacccccugagcgagaccaagugcacccucaaguccuucaccguggagaaggggaucuaccagacgagcaacuuccgggugcagcccaccgaguccaucguccgcuucccgaacaucaccaaccugugccccuucggcgagguguucaacgccacccgguucgccagcgucuacgccuggaaccgcaagcggaucuccaacugcguggcggacuacagcgugcuguacaacuccgccagcuucuccacguucaagugcuacggcgucagccccaccaagcucaacgaccugugcuucaccaacguguacgccgacuccuucgugauccgcggggacgagguccggcagaucgcccccggccagaccgggaagaucgccgacuacaacuacaagcugccggacgacuucacgggcugcgugaucgcguggaacagcaacaaccucgacuccaaggucgggggcaacuacaacuaccuguaccgccuguuccgcaagagcaaccucaagcccuucgagcgggacaucuccaccgagaucuaccaggccggcagcacccccugcaacgggguggagggcuucaacugcuacuucccccugcaguccuacggguuccagccgaccaacggcgugggguaccagcccuaccggguggucgugcugagcuucgagcuccugcacgcccccgccacggugugcggccccaagaaguccaccaaccuggucaagaacaagugcgugaacuucaacuucaacggccucaccgggaccggcgugcugaccgagagcaacaagaaguuccugccguuccagcaguucgggcgcgacaucgccgacacgaccgacgcgguccgcgacccccagacccuggagauccucgacaucacccccugcagcuucggcgggguguccgugaucacgccgggcaccaacaccagcaaccaggucgccgugcuguaccaggacgugaacugcaccgagguccccguggccauccacgccgaccagcugacgcccaccuggcggguguacuccaccggcagcaacgucuuccagacccgcgccgggugccucaucggcgcggagcacgugaacaacuccuacgagugcgacauccccaucggggccggcaucugcgccagcuaccagacgcagaccaacuccccgcggcgcgcccggagcguggcgucccagagcaucaucgccuacaccaugucccugggcgccgagaacagcgucgccuacuccaacaacagcaucgccauccccaccaacuucacgaucuccgugaccaccgagauccugcccgugagcaugaccaagacgagcgucgacugcaccauguacaucugcggggacuccaccgagugcagcaaccuccugcugcaguacggcuccuucugcacccagcucaaccgcgcgcugacggggaucgccguggagcaggacaagaacacccaggagguguucgcccaggucaagcagaucuacaagacgcccccgaucaaggacuucggcggguucaacuucagccagauccugcccgaccccuccaagcccagcaagcgguccuucaucgaggaccuccuguucaacaaggugacccuggccgacgccggcuucaucaagcaguacggcgacugccucggggacaucgcggcccgcgaccugaucugcgcccagaaguucaacggccugaccgugcucccgccccugcugaccgacgagaugaucgcccaguacaccagcgcccuccuggcggggaccaucacguccggcuggaccuucggggccggcgccgcccugcagauccccuucgcgaugcagauggccuaccgguucaacggcaucggggucacccagaacgugcucuacgagaaccagaagcugaucgccaaccaguucaacagcgccaucggcaagauccaggacucccugagcuccaccgccagcgcgcucgggaagcugcaggacguggucaaccagaacgcccaggcccugaacacgcucgugaagcagcuguccagcaacuucggcgccaucuccagcgugcugaacgacauccucucccgccuggacccgcccgaggccgaggugcagaucgaccggcugaucaccgggcgccuccagagccugcagaccuacgugacccagcagcugauccgggcggccgagauccgcgccagcgccaaccucgccgcgaccaagauguccgagugcguccugggccagagcaagcggguggacuucugcggcaagggguaccaccugauguccuucccccagagcgccccgcacggcguggucuuccuccacgugacguacgucuucgcccaggagaagaacuucaccaccgcccccgcgaucugccacgacgggaaggcccacuucccccgcgagggcguguucguguccaacgggacccacugguucgucacgcagcggaacuucuacgagccgcagaucaucaccaccgacaacaccuucgugagcggcaacugcgacguggucaucggcaucgugaacaacacgguguacgacccccugcagcccgagcuggacuccuucaaggaggagcucgacaaguacuucaagaaccacaccagccccgacgucgaccugggggacaucuccggcaucaacgccagcguggugaacauccagaaggagaucgaccgccugaacgaggucgccaagaaccucaacgagucccugaucgaccugcaggagcucgggaaguacgagcaguacaucaagggcgggagcggcuacauccccgaggccccgcgcgacgggcaggccuacgugcggaaggacggcgaguggguccugcucagcaccuuccugugaggacuagucccuguucccagagcccacuuuuuuuucuuuuuuugaaauaaaauagccugucuuucagaucucaaaggcucuuuucagagccaccaaaaaaaaaaaaaaaaaaaaaaaaaaaaaaaaaaaaaaaaaaaaaaaaaaaaaaaaaaaaaaaaaaaaaaaaaaaaaaaaaaaaaaaaaaaaaaaaaaaaa

SEQ ID NO: 12387 - RNA, 3998 nt, Artificial Sequence
  SARS-CoV-2/Wuhan/WIV05/2019__EPI_ISL_402128 spike protein mRNA gc (1-1211)(K986P_V987P_ H1048Q_H1064N_ H1083N_H1101N) Foldon construct
aggagagucccgcagucggcguccagcggcucugcuuguucgugugugugucguugcaggccuuauucaagcuuaccauguucguguuccugguccuccugccccuggugagcucccagugcgugaaccucaccacccgcacgcagcugccgcccgccuacaccaacagcuucacccggggcgucuacuaccccgacaagguguuccgcuccagcgugcugcacuccacccaggaccucuuccugcccuucuucagcaacgucacgugguuccacgccauccacguguccgggaccaacggcaccaagcgguucgacaacccggugcugcccuucaacgacggggucuacuucgcgagcaccgagaaguccaacaucauccgcggcuggaucuucgggacgacccucgacagcaagacccagucccugcugaucgugaacaacgccaccaacguggucaucaaggugugcgaguuccaguucugcaacgaccccuuccucggcguguacuaccacaagaacaacaagagcuggauggaguccgaguuccgggucuacagcuccgccaacaacugcacguucgaguacgugagccagcccuuccugauggaccuggagggcaagcaggggaacuucaagaaccuccgcgaguucguguucaagaacaucgacggcuacuucaagaucuacuccaagcacaccccgaucaaccugguccgggaccugccccagggguucagcgcccucgagccccugguggaccugcccaucggcaucaacaucacccgcuuccagacccuccuggcccugcaccgguccuaccucacgccgggggacagcagcuccggcuggaccgcgggcgccgccgccuacuacgugggguaccugcagccccgcaccuuccugcucaaguacaacgagaacggcaccaucacggacgcggucgacugcgcccuggacccccugagcgagaccaagugcacccucaaguccuucaccguggagaaggggaucuaccagacgagcaacuuccgggugcagcccaccgaguccaucguccgcuucccgaacaucaccaaccugugccccuucggcgagguguucaacgccacccgguucgccagcgucuacgccuggaaccgcaagcggaucuccaacugcguggcggacuacagcgugcuguacaacuccgccagcuucuccacguucaagugcuacggcgucagccccaccaagcucaacgaccugugcuucaccaacguguacgccgacuccuucgugauccgcggggacgagguccggcagaucgcccccggccagaccgggaagaucgccgacuacaacuacaagcugccggacgacuucacgggcugcgugaucgcguggaacagcaacaaccucgacuccaaggucgggggcaacuacaacuaccuguaccgccuguuccgcaagagcaaccucaagcccuucgagcgggacaucuccaccgagaucuaccaggccggcagcacccccugcaacgggguggagggcuucaacugcuacuucccccugcaguccuacggguuccagccgaccaacggcgugggguaccagcccuaccggguggucgugcugagcuucgagcuccugcacgcccccgccacggugugcggccccaagaaguccaccaaccuggucaagaacaagugcgugaacuucaacuucaacggccucaccgggaccggcgugcugaccgagagcaacaagaaguuccugccguuccagcaguucgggcgcgacaucgccgacacgaccgacgcgguccgcgacccccagacccuggagauccucgacaucacccccugcagcuucggcgggguguccgugaucacgccgggcaccaacaccagcaaccaggucgccgugcuguaccaggacgugaacugcaccgagguccccguggccauccacgccgaccagcugacgcccaccuggcggguguacuccaccggcagcaacgucuuccagacccgcgccgggugccucaucggcgcggagcacgugaacaacuccuacgagugcgacauccccaucggggccggcaucugcgccagcuaccagacgcagaccaacuccccgcggcgcgcccggagcguggcgucccagagcaucaucgccuacaccaugucccugggcgccgagaacagcgucgccuacuccaacaacagcaucgccauccccaccaacuucacgaucuccgugaccaccgagauccugcccgugagcaugaccaagacgagcgucgacugcaccauguacaucugcggggacuccaccgagugcagcaaccuccugcugcaguacggcuccuucugcacccagcucaaccgcgcgcugacggggaucgccguggagcaggacaagaacacccaggagguguucgcccaggucaagcagaucuacaagacgcccccgaucaaggacuucggcggguucaacuucagccagauccugcccgaccccuccaagcccagcaagcgguccuucaucgaggaccuccuguucaacaaggugacccuggccgacgccggcuucaucaagcaguacggcgacugccucggggacaucgcggcccgcgaccugaucugcgcccagaaguucaacggccugaccgugcucccgccccugcugaccgacgagaugaucgcccaguacaccagcgcccuccuggcggggaccaucacguccggcuggaccuucggggccggcgccgcccugcagauccccuucgcgaugcagauggccuaccgguucaacggcaucggggucacccagaacgugcucuacgagaaccagaagcugaucgccaaccaguucaacagcgccaucggcaagauccaggacucccugagcuccaccgccagcgcgcucgggaagcugcaggacguggucaaccagaacgcccaggcccugaacacgcucgugaagcagcuguccagcaacuucggcgccaucuccagcgugcugaacgacauccucucccgccuggacccgcccgaggccgaggugcagaucgaccggcugaucaccgggcgccuccagagccugcagaccuacgugacccagcagcugauccgggcggccgagauccgcgccagcgccaaccucgccgcgaccaagauguccgagugcguccugggccagagcaagcggguggacuucugcggcaagggguaccagcugauguccuucccccagagcgccccgcacggcguggucuuccucaacgugacguacguccccgcccaggagaagaacuucaccaccgcccccgcgaucugcaacgacgggaaggcccacuucccccgcgagggcguguucguguccaacgggaccaacugguucgucacgcagcggaacuucuacgagccgcagaucaucaccaccgacaacaccuucgugagcggcaacugcgacguggucaucggcaucgugaacaacacgguguacgacccccugcagcccgagcuggacuccuucaaggaggagcucgacaaguacuucaagaaccacaccagccccgacgucgaccugggggacaucuccggcaucaacgccagcguggugaacauccagaaggagaucgaccgccugaacgaggucgccaagaaccucaacgagucccugaucgaccugcaggagcucgggaaguacgagcaguacaucaagggcgggagcggcuacauccccgaggccccgcgcgacgggcaggccuacgugcggaaggacggcgaguggguccugcucagcaccuuccugugaggacuagucccuguucccagagcccacuuuuuuuucuuuuuuugaaauaaaauagccugucuuucagaucucaaaggcucuuuucagagccaccaaaaaaaaaaaaaaaaaaaaaaaaaaaaaaaaaaaaaaaaaaaaaaaaaaaaaaaaaaaaaaaaaaaaaaaaaaaaaaaaaaaaaaaaaaaaaaaaaaaaa

SEQ ID NO: 12388 - RNA, 3998 nt, Artificial Sequence
  SARS-CoV-2/Wuhan/WIV05/2019__EPI_ISL_402128 spike protein mRNA gc (1-1211)(I712C_T1077C) Foldon construct
aggagagucccgcagucggcguccagcggcucugcuuguucgugugugugucguugcaggccuuauucaagcuuaccauguucguguuccugguccuccugccccuggugagcucccagugcgugaaccucaccacccgcacgcagcugccgcccgccuacaccaacagcuucacccggggcgucuacuaccccgacaagguguuccgcuccagcgugcugcacuccacccaggaccucuuccugcccuucuucagcaacgucacgugguuccacgccauccacguguccgggaccaacggcaccaagcgguucgacaacccggugcugcccuucaacgacggggucuacuucgcgagcaccgagaaguccaacaucauccgcggcuggaucuucgggacgacccucgacagcaagacccagucccugcugaucgugaacaacgccaccaacguggucaucaaggugugcgaguuccaguucugcaacgaccccuuccucggcguguacuaccacaagaacaacaagagcuggauggaguccgaguuccgggucuacagcuccgccaacaacugcacguucgaguacgugagccagcccuuccugauggaccuggagggcaagcaggggaacuucaagaaccuccgcgaguucguguucaagaacaucgacggcuacuucaagaucuacuccaagcacaccccgaucaaccugguccgggaccugccccagggguucagcgcccucgagccccugguggaccugcccaucggcaucaacaucacccgcuuccagacccuccuggcccugcaccgguccuaccucacgccgggggacagcagcuccggcuggaccgcgggcgccgccgccuacuacgugggguaccugcagccccgcaccuuccugcucaaguacaacgagaacggcaccaucacggacgcggucgacugcgcccuggacccccugagcgagaccaagugcacccucaaguccuucaccguggagaaggggaucuaccagacgagcaacuuccgggugcagcccaccgaguccaucguccgcuucccgaacaucaccaaccugugccccuucggcgagguguucaacgccacccgguucgccagcgucuacgccuggaaccgcaagcggaucuccaacugcguggcggacuacagcgugcuguacaacuccgccagcuucuccacguucaagugcuacggcgucagccccaccaagcucaacgaccugugcuucaccaacguguacgccgacuccuucgugauccgcggggacgagguccggcagaucgcccccggccagaccgggaagaucgccgacuacaacuacaagcugccggacgacuucacgggcugcgugaucgcguggaacagcaacaaccucgacuccaaggucgggggcaacuacaacuaccuguaccgccuguuccgcaagagcaaccucaagcccuucgagcgggacaucuccaccgagaucuaccaggccggcagcacccccugcaacgggguggagggcuucaacugcuacuucccccugcaguccuacggguuccagccgaccaacggcgugggguaccagcccuaccggguggucgugcugagcuucgagcuccugcacgcccccgccacggugugcggccccaagaaguccaccaaccuggucaagaacaagugcgugaacuucaacuucaacggccucaccgggaccggcgugcugaccgagagcaacaagaaguuccugccguuccagcaguucgggcgcgacaucgccgacacgaccgacgcgguccgcgacccccagacccuggagauccucgacaucacccccugcagcuucggcgggguguccgugaucacgccgggcaccaacaccagcaaccaggucgccgugcuguaccaggacgugaacugcaccgagguccccguggccauccacgccgaccagcugacgcccaccuggcggguguacuccaccggcagcaacgucuuccagacccgcgccgggugccucaucggcgcggagcacgugaacaacuccuacgagugcgacauccccaucggggccggcaucugcgccagcuaccagacgcagaccaacuccccgcggcgcgcccggagcguggcgucccagagcaucaucgccuacaccaugucccugggcgccgagaacagcgucgccuacuccaacaacagcugcgccauccccaccaacuucacgaucuccgugaccaccgagauccugcccgugagcaugaccaagacgagcgucgacugcaccauguacaucugcggggacuccaccgagugcagcaaccuccugcugcaguacggcuccuucugcacccagcucaaccgcgcgcugacggggaucgccguggagcaggacaagaacacccaggagguguucgcccaggucaagcagaucuacaagacgcccccgaucaaggacuucggcggguucaacuucagccagauccugcccgaccccuccaagcccagcaagcgguccuucaucgaggaccuccuguucaacaaggugacccuggccgacgccggcuucaucaagcaguacggcgacugccucggggacaucgcggcccgcgaccugaucugcgcccagaaguucaacggccugaccgugcucccgccccugcugaccgacgagaugaucgcccaguacaccagcgcccuccuggcggggaccaucacguccggcuggaccuucggggccggcgccgcccugcagauccccuucgcgaugcagauggccuaccgguucaacggcaucggggucacccagaacgugcucuacgagaaccagaagcugaucgccaaccaguucaacagcgccaucggcaagauccaggacucccugagcuccaccgccagcgcgcucgggaagcugcaggacguggucaaccagaacgcccaggcccugaacacgcucgugaagcagcuguccagcaacuucggcgccaucuccagcgugcugaacgacauccucucccgccuggacaaggucgaggccgaggugcagaucgaccggcugaucaccgggcgccuccagagccugcagaccuacgugacccagcagcugauccgggcggccgagauccgcgccagcgccaaccucgccgcgaccaagauguccgagugcguccugggccagagcaagcggguggacuucugcggcaagggguaccaccugauguccuucccccagagcgccccgcacggcguggucuuccuccacgugacguacguccccgcccaggagaagaacuucaccugcgcccccgcgaucugccacgacgggaaggcccacuucccccgcgagggcguguucguguccaacgggacccacugguucgucacgcagcggaacuucuacgagccgcagaucaucaccaccgacaacaccuucgugagcggcaacugcgacguggucaucggcaucgugaacaacacgguguacgacccccugcagcccgagcuggacuccuucaaggaggagcucgacaaguacuucaagaaccacaccagccccgacgucgaccugggggacaucuccggcaucaacgccagcguggugaacauccagaaggagaucgaccgccugaacgaggucgccaagaaccucaacgagucccugaucgaccugcaggagcucgggaaguacgagcaguacaucaagggcgggagcggcuacauccccgaggccccgcgcgacgggcaggccuacgugcggaaggacggcgaguggguccugcucagcaccuuccugugaggacuagucccuguucccagagcccacuuuuuuuucuuuuuuugaaauaaaauagccugucuuucagaucucaaaggcucuuuucagagccaccaaaaaaaaaaaaaaaaaaaaaaaaaaaaaaaaaaaaaaaaaaaaaaaaaaaaaaaaaaaaaaaaaaaaaaaaaaaaaaaaaaaaaaaaaaaaaaaaaaaaa

SEQ ID NO: 12389 - RNA, 3998 nt, Artificial Sequence
  SARS-CoV-2/Wuhan/WIV05/2019__EPI_ISL_402128 spike protein mRNA gc (1-1211)(I714C_Y1110C) Foldon construct
aggagagucccgcagucggcguccagcggcucugcuuguucgugugugugucguugcaggccuuauucaagcuuaccauguucguguuccugguccuccugccccuggugagcucccagugcgugaaccucaccacccgcacgcagcugccgcccgccuacaccaacagcuucacccggggcgucuacuaccccgacaagguguuccgcuccagcgugcugcacuccacccaggaccucuuccugcccuucuucagcaacgucacgugguuccacgccauccacguguccgggaccaacggcaccaagcgguucgacaacccggugcugcccuucaacgacggggucuacuucgcgagcaccgagaaguccaacaucauccgcggcuggaucuucgggacgacccucgacagcaagacccagucccugcugaucgugaacaacgccaccaacguggucaucaaggugugcgaguuccaguucugcaacgaccccuuccucggcguguacuaccacaagaacaacaagagcuggauggaguccgaguuccgggucuacagcuccgccaacaacugcacguucgaguacgugagccagcccuuccugauggaccuggagggcaagcaggggaacuucaagaaccuccgcgaguucguguucaagaacaucgacggcuacuucaagaucuacuccaagcacaccccgaucaaccugguccgggaccugccccagggguucagcgcccucgagccccugguggaccugcccaucggcaucaacaucacccgcuuccagacccuccuggcccugcaccgguccuaccucacgccgggggacagcagcuccggcuggaccgcgggcgccgccgccuacuacgugggguaccugcagccccgcaccuuccugcucaaguacaacgagaacggcaccaucacggacgcggucgacugcgcccuggacccccugagcgagaccaagugcacccucaaguccuucaccguggagaaggggaucuaccagacgagcaacuuccgggugcagcccaccgaguccaucguccgcuucccgaacaucaccaaccugugccccuucggcgagguguucaacgccacccgguucgccagcgucuacgccuggaaccgcaagcggaucuccaacugcguggcggacuacagcgugcuguacaacuccgccagcuucuccacguucaagugcuacggcgucagccccaccaagcucaacgaccugugcuucaccaacguguacgccgacuccuucgugauccgcggggacgagguccggcagaucgcccccggccagaccgggaagaucgccgacuacaacuacaagcugccggacgacuucacgggcugcgugaucgcguggaacagcaacaaccucgacuccaaggucgggggcaacuacaacuaccuguaccgccuguuccgcaagagcaaccucaagcccuucgagcgggacaucuccaccgagaucuaccaggccggcagcacccccugcaacgggguggagggcuucaacugcuacuucccccugcaguccuacggguuccagccgaccaacggcgugggguaccagcccuaccggguggucgugcugagcuucgagcuccugcacgcccccgccacggugugcggccccaagaaguccaccaaccuggucaagaacaagugcgugaacuucaacuucaacggccucaccgggaccggcgugcugaccgagagcaacaagaaguuccugccguuccagcaguucgggcgcgacaucgccgacacgaccgacgcgguccgcgacccccagacccuggagauccucgacaucacccccugcagcuucggcgggguguccgugaucacgccgggcaccaacaccagcaaccaggucgccgugcuguaccaggacgugaacugcaccgagguccccguggccauccacgccgaccagcugacgcccaccuggcggguguacuccaccggcagcaacgucuuccagacccgcgccgggugccucaucggcgcggagcacgugaacaacuccuacgagugcgacauccccaucggggccggcaucugcgccagcuaccagacgcagaccaacuccccgcggcgcgcccggagcguggcgucccagagcaucaucgccuacaccaugucccugggcgccgagaacagcgucgccuacuccaacaacagcaucgccugccccaccaacuucacgaucuccgugaccaccgagauccugcccgugagcaugaccaagacgagcgucgacugcaccauguacaucugcggggacuccaccgagugcagcaaccuccugcugcaguacggcuccuucugcacccagcucaaccgcgcgcugacggggaucgccguggagcaggacaagaacacccaggagguguucgcccaggucaagcagaucuacaagacgcccccgaucaaggacuucggcggguucaacuucagccagauccugcccgaccccuccaagcccagcaagcgguccuucaucgaggaccuccuguucaacaaggugacccuggccgacgccggcuucaucaagcaguacggcgacugccucggggacaucgcggcccgcgaccugaucugcgcccagaaguucaacggccugaccgugcucccgccccugcugaccgacgagaugaucgcccaguacaccagcgcccuccuggcggggaccaucacguccggcuggaccuucggggccggcgccgcccugcagauccccuucgcgaugcagauggccuaccgguucaacggcaucggggucacccagaacgugcucuacgagaaccagaagcugaucgccaaccaguucaacagcgccaucggcaagauccaggacucccugagcuccaccgccagcgcgcucgggaagcugcaggacguggucaaccagaacgcccaggcccugaacacgcucgugaagcagcuguccagcaacuucggcgccaucuccagcgugcugaacgacauccucucccgccuggacaaggucgaggccgaggugcagaucgaccggcugaucaccgggcgccuccagagccugcagaccuacgugacccagcagcugauccgggcggccgagauccgcgccagcgccaaccucgccgcgaccaagauguccgagugcguccugggccagagcaagcggguggacuucugcggcaagggguaccaccugauguccuucccccagagcgccccgcacggcguggucuuccuccacgugacguacguccccgcccaggagaagaacuucaccaccgcccccgcgaucugccacgacgggaaggcccacuucccccgcgagggcguguucguguccaacgggacccacugguucgucacgcagcggaacuucugcgagccgcagaucaucaccaccgacaacaccuucgugagcggcaacugcgacguggucaucggcaucgugaacaacacgguguacgacccccugcagcccgagcuggacuccuucaaggaggagcucgacaaguacuucaagaaccacaccagccccgacgucgaccugggggacaucuccggcaucaacgccagcguggugaacauccagaaggagaucgaccgccugaacgaggucgccaagaaccucaacgagucccugaucgaccugcaggagcucgggaaguacgagcaguacaucaagggcgggagcggcuacauccccgaggccccgcgcgacgggcaggccuacgugcggaaggacggcgaguggguccugcucagcaccuuccugugaggacuagucccuguucccagagcccacuuuuuuuucuuuuuuugaaauaaaauagccugucuuucagaucucaaaggcucuuuucagagccaccaaaaaaaaaaaaaaaaaaaaaaaaaaaaaaaaaaaaaaaaaaaaaaaaaaaaaaaaaaaaaaaaaaaaaaaaaaaaaaaaaaaaaaaaaaaaaaaaaaaaa

SEQ ID NO: 12390 - RNA, 3998 nt, Artificial Sequence
  SARS-CoV-2/Wuhan/WIV05/2019__EPI_ISL_402128 spike protein mRNA gc (1-1211)(P715C_P1069C) Foldon construct
aggagagucccgcagucggcguccagcggcucugcuuguucgugugugugucguugcaggccuuauucaagcuuaccauguucguguuccugguccuccugccccuggugagcucccagugcgugaaccucaccacccgcacgcagcugccgcccgccuacaccaacagcuucacccggggcgucuacuaccccgacaagguguuccgcuccagcgugcugcacuccacccaggaccucuuccugcccuucuucagcaacgucacgugguuccacgccauccacguguccgggaccaacggcaccaagcgguucgacaacccggugcugcccuucaacgacggggucuacuucgcgagcaccgagaaguccaacaucauccgcggcuggaucuucgggacgacccucgacagcaagacccagucccugcugaucgugaacaacgccaccaacguggucaucaaggugugcgaguuccaguucugcaacgaccccuuccucggcguguacuaccacaagaacaacaagagcuggauggaguccgaguuccgggucuacagcuccgccaacaacugcacguucgaguacgugagccagcccuuccugauggaccuggagggcaagcaggggaacuucaagaaccuccgcgaguucguguucaagaacaucgacggcuacuucaagaucuacuccaagcacaccccgaucaaccugguccgggaccugccccagggguucagcgcccucgagccccugguggaccugcccaucggcaucaacaucacccgcuuccagacccuccuggcccugcaccgguccuaccucacgccgggggacagcagcuccggcuggaccgcgggcgccgccgccuacuacgugggguaccugcagccccgcaccuuccugcucaaguacaacgagaacggcaccaucacggacgcggucgacugcgcccuggacccccugagcgagaccaagugcacccucaaguccuucaccguggagaaggggaucuaccagacgagcaacuuccgggugcagcccaccgaguccaucguccgcuucccgaacaucaccaaccugugccccuucggcgagguguucaacgccacccgguucgccagcgucuacgccuggaaccgcaagcggaucuccaacugcguggcggacuacagcgugcuguacaacuccgccagcuucuccacguucaagugcuacggcgucagccccaccaagcucaacgaccugugcuucaccaacguguacgccgacuccuucgugauccgcggggacgagguccggcagaucgcccccggccagaccgggaagaucgccgacuacaacuacaagcugccggacgacuucacgggcugcgugaucgcguggaacagcaacaaccucgacuccaaggucgggggcaacuacaacuaccuguaccgccuguuccgcaagagcaaccucaagcccuucgagcgggacaucuccaccgagaucuaccaggccggcagcacccccugcaacgggguggagggcuucaacugcuacuucccccugcaguccuacggguuccagccgaccaacggcgugggguaccagcccuaccggguggucgugcugagcuucgagcuccugcacgcccccgccacggugugcggccccaagaaguccaccaaccuggucaagaacaagugcgugaacuucaacuucaacggccucaccgggaccggcgugcugaccgagagcaacaagaaguuccugccguuccagcaguucgggcgcgacaucgccgacacgaccgacgcgguccgcgacccccagacccuggagauccucgacaucacccccugcagcuucggcgggguguccgugaucacgccgggcaccaacaccagcaaccaggucgccgugcuguaccaggacgugaacugcaccgagguccccguggccauccacgccgaccagcugacgcccaccuggcggguguacuccaccggcagcaacgucuuccagacccgcgccgggugccucaucggcgcggagcacgugaacaacuccuacgagugcgacauccccaucggggccggcaucugcgccagcuaccagacgcagaccaacuccccgcggcgcgcccggagcguggcgucccagagcaucaucgccuacaccaugucccugggcgccgagaacagcgucgccuacuccaacaacagcaucgccaucugcaccaacuucacgaucuccgugaccaccgagauccugcccgugagcaugaccaagacgagcgucgacugcaccauguacaucugcggggacuccaccgagugcagcaaccuccugcugcaguacggcuccuucugcacccagcucaaccgcgcgcugacggggaucgccguggagcaggacaagaacacccaggagguguucgcccaggucaagcagaucuacaagacgcccccgaucaaggacuucggcggguucaacuucagccagauccugcccgaccccuccaagcccagcaagcgguccuucaucgaggaccuccuguucaacaaggugacccuggccgacgccggcuucaucaagcaguacggcgacugccucggggacaucgcggcccgcgaccugaucugcgcccagaaguucaacggccugaccgugcucccgccccugcugaccgacgagaugaucgcccaguacaccagcgcccuccuggcggggaccaucacguccggcuggaccuucggggccggcgccgcccugcagauccccuucgcgaugcagauggccuaccgguucaacggcaucggggucacccagaacgugcucuacgagaaccagaagcugaucgccaaccaguucaacagcgccaucggcaagauccaggacucccugagcuccaccgccagcgcgcucgggaagcugcaggacguggucaaccagaacgcccaggcccugaacacgcucgugaagcagcuguccagcaacuucggcgccaucuccagcgugcugaacgacauccucucccgccuggacaaggucgaggccgaggugcagaucgaccggcugaucaccgggcgccuccagagccugcagaccuacgugacccagcagcugauccgggcggccgagauccgcgccagcgccaaccucgccgcgaccaagauguccgagugcguccugggccagagcaagcggguggacuucugcggcaagggguaccaccugauguccuucccccagagcgccccgcacggcguggucuuccuccacgugacguacgucugcgcccaggagaagaacuucaccaccgcccccgcgaucugccacgacgggaaggcccacuucccccgcgagggcguguucguguccaacgggacccacugguucgucacgcagcggaacuucuacgagccgcagaucaucaccaccgacaacaccuucgugagcggcaacugcgacguggucaucggcaucgugaacaacacgguguacgacccccugcagcccgagcuggacuccuucaaggaggagcucgacaaguacuucaagaaccacaccagccccgacgucgaccugggggacaucuccggcaucaacgccagcguggugaacauccagaaggagaucgaccgccugaacgaggucgccaagaaccucaacgagucccugaucgaccugcaggagcucgggaaguacgagcaguacaucaagggcgggagcggcuacauccccgaggccccgcgcgacgggcaggccuacgugcggaaggacggcgaguggguccugcucagcaccuuccugugaggacuagucccuguucccagagcccacuuuuuuuucuuuuuuugaaauaaaauagccugucuuucagaucucaaaggcucuuuucagagccaccaaaaaaaaaaaaaaaaaaaaaaaaaaaaaaaaaaaaaaaaaaaaaaaaaaaaaaaaaaaaaaaaaaaaaaaaaaaaaaaaaaaaaaaaaaaaaaaaaaaaa

SEQ ID NO: 12391 - RNA, 3998 nt, Artificial Sequence
  SARS-CoV-2/Wuhan/WIV05/2019__EPI_ISL_402128 spike protein mRNA gc (1-1211)(G889C_L1034C) Foldon construct
aggagagucccgcagucggcguccagcggcucugcuuguucgugugugugucguugcaggccuuauucaagcuuaccauguucguguuccugguccuccugccccuggugagcucccagugcgugaaccucaccacccgcacgcagcugccgcccgccuacaccaacagcuucacccggggcgucuacuaccccgacaagguguuccgcuccagcgugcugcacuccacccaggaccucuuccugcccuucuucagcaacgucacgugguuccacgccauccacguguccgggaccaacggcaccaagcgguucgacaacccggugcugcccuucaacgacggggucuacuucgcgagcaccgagaaguccaacaucauccgcggcuggaucuucgggacgacccucgacagcaagacccagucccugcugaucgugaacaacgccaccaacguggucaucaaggugugcgaguuccaguucugcaacgaccccuuccucggcguguacuaccacaagaacaacaagagcuggauggaguccgaguuccgggucuacagcuccgccaacaacugcacguucgaguacgugagccagcccuuccugauggaccuggagggcaagcaggggaacuucaagaaccuccgcgaguucguguucaagaacaucgacggcuacuucaagaucuacuccaagcacaccccgaucaaccugguccgggaccugccccagggguucagcgcccucgagccccugguggaccugcccaucggcaucaacaucacccgcuuccagacccuccuggcccugcaccgguccuaccucacgccgggggacagcagcuccggcuggaccgcgggcgccgccgccuacuacgugggguaccugcagccccgcaccuuccugcucaaguacaacgagaacggcaccaucacggacgcggucgacugcgcccuggacccccugagcgagaccaagugcacccucaaguccuucaccguggagaaggggaucuaccagacgagcaacuuccgggugcagcccaccgaguccaucguccgcuucccgaacaucaccaaccugugccccuucggcgagguguucaacgccacccgguucgccagcgucuacgccuggaaccgcaagcggaucuccaacugcguggcggacuacagcgugcuguacaacuccgccagcuucuccacguucaagugcuacggcgucagccccaccaagcucaacgaccugugcuucaccaacguguacgccgacuccuucgugauccgcggggacgagguccggcagaucgcccccggccagaccgggaagaucgccgacuacaacuacaagcugccggacgacuucacgggcugcgugaucgcguggaacagcaacaaccucgacuccaaggucgggggcaacuacaacuaccuguaccgccuguuccgcaagagcaaccucaagcccuucgagcgggacaucuccaccgagaucuaccaggccggcagcacccccugcaacgggguggagggcuucaacugcuacuucccccugcaguccuacggguuccagccgaccaacggcgugggguaccagcccuaccggguggucgugcugagcuucgagcuccugcacgcccccgccacggugugcggccccaagaaguccaccaaccuggucaagaacaagugcgugaacuucaacuucaacggccucaccgggaccggcgugcugaccgagagcaacaagaaguuccugccguuccagcaguucgggcgcgacaucgccgacacgaccgacgcgguccgcgacccccagacccuggagauccucgacaucacccccugcagcuucggcgggguguccgugaucacgccgggcaccaacaccagcaaccaggucgccgugcuguaccaggacgugaacugcaccgagguccccguggccauccacgccgaccagcugacgcccaccuggcggguguacuccaccggcagcaacgucuuccagacccgcgccgggugccucaucggcgcggagcacgugaacaacuccuacgagugcgacauccccaucggggccggcaucugcgccagcuaccagacgcagaccaacuccccgcggcgcgcccggagcguggcgucccagagcaucaucgccuacaccaugucccugggcgccgagaacagcgucgccuacuccaacaacagcaucgccauccccaccaacuucacgaucuccgugaccaccgagauccugcccgugagcaugaccaagacgagcgucgacugcaccauguacaucugcggggacuccaccgagugcagcaaccuccugcugcaguacggcuccuucugcacccagcucaaccgcgcgcugacggggaucgccguggagcaggacaagaacacccaggagguguucgcccaggucaagcagaucuacaagacgcccccgaucaaggacuucggcggguucaacuucagccagauccugcccgaccccuccaagcccagcaagcgguccuucaucgaggaccuccuguucaacaaggugacccuggccgacgccggcuucaucaagcaguacggcgacugccucggggacaucgcggcccgcgaccugaucugcgcccagaaguucaacggccugaccgugcucccgccccugcugaccgacgagaugaucgcccaguacaccagcgcccuccuggcggggaccaucacguccggcuggaccuucugcgccggcgccgcccugcagauccccuucgcgaugcagauggccuaccgguucaacggcaucggggucacccagaacgugcucuacgagaaccagaagcugaucgccaaccaguucaacagcgccaucggcaagauccaggacucccugagcuccaccgccagcgcgcucgggaagcugcaggacguggucaaccagaacgcccaggcccugaacacgcucgugaagcagcuguccagcaacuucggcgccaucuccagcgugcugaacgacauccucucccgccuggacaaggucgaggccgaggugcagaucgaccggcugaucaccgggcgccuccagagccugcagaccuacgugacccagcagcugauccgggcggccgagauccgcgccagcgccaaccucgccgcgaccaagauguccgagugcgucugcggccagagcaagcggguggacuucugcggcaagggguaccaccugauguccuucccccagagcgccccgcacggcguggucuuccuccacgugacguacguccccgcccaggagaagaacuucaccaccgcccccgcgaucugccacgacgggaaggcccacuucccccgcgagggcguguucguguccaacgggacccacugguucgucacgcagcggaacuucuacgagccgcagaucaucaccaccgacaacaccuucgugagcggcaacugcgacguggucaucggcaucgugaacaacacgguguacgacccccugcagcccgagcuggacuccuucaaggaggagcucgacaaguacuucaagaaccacaccagccccgacgucgaccugggggacaucuccggcaucaacgccagcguggugaacauccagaaggagaucgaccgccugaacgaggucgccaagaaccucaacgagucccugaucgaccugcaggagcucgggaaguacgagcaguacaucaagggcgggagcggcuacauccccgaggccccgcgcgacgggcaggccuacgugcggaaggacggcgaguggguccugcucagcaccuuccugugaggacuagucccuguucccagagcccacuuuuuuuucuuuuuuugaaauaaaauagccugucuuucagaucucaaaggcucuuuucagagccaccaaaaaaaaaaaaaaaaaaaaaaaaaaaaaaaaaaaaaaaaaaaaaaaaaaaaaaaaaaaaaaaaaaaaaaaaaaaaaaaaaaaaaaaaaaaaaaaaaaaaa

SEQ ID NO: 12392 - RNA, 3998 nt, Artificial Sequence
  SARS-CoV-2/Wuhan/WIV05/2019__EPI_ISL_402128 spike protein mRNA gc (1-1211)(I909C_Y1047C) Foldon construct
aggagagucccgcagucggcguccagcggcucugcuuguucgugugugugucguugcaggccuuauucaagcuuaccauguucguguuccugguccuccugccccuggugagcucccagugcgugaaccucaccacccgcacgcagcugccgcccgccuacaccaacagcuucacccggggcgucuacuaccccgacaagguguuccgcuccagcgugcugcacuccacccaggaccucuuccugcccuucuucagcaacgucacgugguuccacgccauccacguguccgggaccaacggcaccaagcgguucgacaacccggugcugcccuucaacgacggggucuacuucgcgagcaccgagaaguccaacaucauccgcggcuggaucuucgggacgacccucgacagcaagacccagucccugcugaucgugaacaacgccaccaacguggucaucaaggugugcgaguuccaguucugcaacgaccccuuccucggcguguacuaccacaagaacaacaagagcuggauggaguccgaguuccgggucuacagcuccgccaacaacugcacguucgaguacgugagccagcccuuccugauggaccuggagggcaagcaggggaacuucaagaaccuccgcgaguucguguucaagaacaucgacggcuacuucaagaucuacuccaagcacaccccgaucaaccugguccgggaccugccccagggguucagcgcccucgagccccugguggaccugcccaucggcaucaacaucacccgcuuccagacccuccuggcccugcaccgguccuaccucacgccgggggacagcagcuccggcuggaccgcgggcgccgccgccuacuacgugggguaccugcagccccgcaccuuccugcucaaguacaacgagaacggcaccaucacggacgcggucgacugcgcccuggacccccugagcgagaccaagugcacccucaaguccuucaccguggagaaggggaucuaccagacgagcaacuuccgggugcagcccaccgaguccaucguccgcuucccgaacaucaccaaccugugccccuucggcgagguguucaacgccacccgguucgccagcgucuacgccuggaaccgcaagcggaucuccaacugcguggcggacuacagcgugcuguacaacuccgccagcuucuccacguucaagugcuacggcgucagccccaccaagcucaacgaccugugcuucaccaacguguacgccgacuccuucgugauccgcggggacgagguccggcagaucgcccccggccagaccgggaagaucgccgacuacaacuacaagcugccggacgacuucacgggcugcgugaucgcguggaacagcaacaaccucgacuccaaggucgggggcaacuacaacuaccuguaccgccuguuccgcaagagcaaccucaagcccuucgagcgggacaucuccaccgagaucuaccaggccggcagcacccccugcaacgggguggagggcuucaacugcuacuucccccugcaguccuacggguuccagccgaccaacggcgugggguaccagcccuaccggguggucgugcugagcuucgagcuccugcacgcccccgccacggugugcggccccaagaaguccaccaaccuggucaagaacaagugcgugaacuucaacuucaacggccucaccgggaccggcgugcugaccgagagcaacaagaaguuccugccguuccagcaguucgggcgcgacaucgccgacacgaccgacgcgguccgcgacccccagacccuggagauccucgacaucacccccugcagcuucggcgggguguccgugaucacgccgggcaccaacaccagcaaccaggucgccgugcuguaccaggacgugaacugcaccgagguccccguggccauccacgccgaccagcugacgcccaccuggcggguguacuccaccggcagcaacgucuuccagacccgcgccgggugccucaucggcgcggagcacgugaacaacuccuacgagugcgacauccccaucggggccggcaucugcgccagcuaccagacgcagaccaacuccccgcggcgcgcccggagcguggcgucccagagcaucaucgccuacaccaugucccugggcgccgagaacagcgucgccuacuccaacaacagcaucgccauccccaccaacuucacgaucuccgugaccaccgagauccugcccgugagcaugaccaagacgagcgucgacugcaccauguacaucugcggggacuccaccgagugcagcaaccuccugcugcaguacggcuccuucugcacccagcucaaccgcgcgcugacggggaucgccguggagcaggacaagaacacccaggagguguucgcccaggucaagcagaucuacaagacgcccccgaucaaggacuucggcggguucaacuucagccagauccugcccgaccccuccaagcccagcaagcgguccuucaucgaggaccuccuguucaacaaggugacccuggccgacgccggcuucaucaagcaguacggcgacugccucggggacaucgcggcccgcgaccugaucugcgcccagaaguucaacggccugaccgugcucccgccccugcugaccgacgagaugaucgcccaguacaccagcgcccuccuggcggggaccaucacguccggcuggaccuucggggccggcgccgcccugcagauccccuucgcgaugcagauggccuaccgguucaacggcugcggggucacccagaacgugcucuacgagaaccagaagcugaucgccaaccaguucaacagcgccaucggcaagauccaggacucccugagcuccaccgccagcgcgcucgggaagcugcaggacguggucaaccagaacgcccaggcccugaacacgcucgugaagcagcuguccagcaacuucggcgccaucuccagcgugcugaacgacauccucucccgccuggacaaggucgaggccgaggugcagaucgaccggcugaucaccgggcgccuccagagccugcagaccuacgugacccagcagcugauccgggcggccgagauccgcgccagcgccaaccucgccgcgaccaagauguccgagugcguccugggccagagcaagcggguggacuucugcggcaaggggugccaccugauguccuucccccagagcgccccgcacggcguggucuuccuccacgugacguacguccccgcccaggagaagaacuucaccaccgcccccgcgaucugccacgacgggaaggcccacuucccccgcgagggcguguucguguccaacgggacccacugguucgucacgcagcggaacuucuacgagccgcagaucaucaccaccgacaacaccuucgugagcggcaacugcgacguggucaucggcaucgugaacaacacgguguacgacccccugcagcccgagcuggacuccuucaaggaggagcucgacaaguacuucaagaaccacaccagccccgacgucgaccugggggacaucuccggcaucaacgccagcguggugaacauccagaaggagaucgaccgccugaacgaggucgccaagaaccucaacgagucccugaucgaccugcaggagcucgggaaguacgagcaguacaucaagggcgggagcggcuacauccccgaggccccgcgcgacgggcaggccuacgugcggaaggacggcgaguggguccugcucagcaccuuccugugaggacuagucccuguucccagagcccacuuuuuuuucuuuuuuugaaauaaaauagccugucuuucagaucucaaaggcucuuuucagagccaccaaaaaaaaaaaaaaaaaaaaaaaaaaaaaaaaaaaaaaaaaaaaaaaaaaaaaaaaaaaaaaaaaaaaaaaaaaaaaaaaaaaaaaaaaaaaaaaaaaaaa

SEQ ID NO: 12393 - RNA, 3998 nt, Artificial Sequence
  SARS-CoV-2/Wuhan/WIV05/2019__EPI_ISL_402128 spike protein mRNA gc (1-1211)(Q965C_S1003C) Foldon construct
aggagagucccgcagucggcguccagcggcucugcuuguucgugugugugucguugcaggccuuauucaagcuuaccauguucguguuccugguccuccugccccuggugagcucccagugcgugaaccucaccacccgcacgcagcugccgcccgccuacaccaacagcuucacccggggcgucuacuaccccgacaagguguuccgcuccagcgugcugcacuccacccaggaccucuuccugcccuucuucagcaacgucacgugguuccacgccauccacguguccgggaccaacggcaccaagcgguucgacaacccggugcugcccuucaacgacggggucuacuucgcgagcaccgagaaguccaacaucauccgcggcuggaucuucgggacgacccucgacagcaagacccagucccugcugaucgugaacaacgccaccaacguggucaucaaggugugcgaguuccaguucugcaacgaccccuuccucggcguguacuaccacaagaacaacaagagcuggauggaguccgaguuccgggucuacagcuccgccaacaacugcacguucgaguacgugagccagcccuuccugauggaccuggagggcaagcaggggaacuucaagaaccuccgcgaguucguguucaagaacaucgacggcuacuucaagaucuacuccaagcacaccccgaucaaccugguccgggaccugccccagggguucagcgcccucgagccccugguggaccugcccaucggcaucaacaucacccgcuuccagacccuccuggcccugcaccgguccuaccucacgccgggggacagcagcuccggcuggaccgcgggcgccgccgccuacuacgugggguaccugcagccccgcaccuuccugcucaaguacaacgagaacggcaccaucacggacgcggucgacugcgcccuggacccccugagcgagaccaagugcacccucaaguccuucaccguggagaaggggaucuaccagacgagcaacuuccgggugcagcccaccgaguccaucguccgcuucccgaacaucaccaaccugugccccuucggcgagguguucaacgccacccgguucgccagcgucuacgccuggaaccgcaagcggaucuccaacugcguggcggacuacagcgugcuguacaacuccgccagcuucuccacguucaagugcuacggcgucagccccaccaagcucaacgaccugugcuucaccaacguguacgccgacuccuucgugauccgcggggacgagguccggcagaucgcccccggccagaccgggaagaucgccgacuacaacuacaagcugccggacgacuucacgggcugcgugaucgcguggaacagcaacaaccucgacuccaaggucgggggcaacuacaacuaccuguaccgccuguuccgcaagagcaaccucaagcccuucgagcgggacaucuccaccgagaucuaccaggccggcagcacccccugcaacgggguggagggcuucaacugcuacuucccccugcaguccuacggguuccagccgaccaacggcgugggguaccagcccuaccggguggucgugcugagcuucgagcuccugcacgcccccgccacggugugcggccccaagaaguccaccaaccuggucaagaacaagugcgugaacuucaacuucaacggccucaccgggaccggcgugcugaccgagagcaacaagaaguuccugccguuccagcaguucgggcgcgacaucgccgacacgaccgacgcgguccgcgacccccagacccuggagauccucgacaucacccccugcagcuucggcgggguguccgugaucacgccgggcaccaacaccagcaaccaggucgccgugcuguaccaggacgugaacugcaccgagguccccguggccauccacgccgaccagcugacgcccaccuggcggguguacuccaccggcagcaacgucuuccagacccgcgccgggugccucaucggcgcggagcacgugaacaacuccuacgagugcgacauccccaucggggccggcaucugcgccagcuaccagacgcagaccaacuccccgcggcgcgcccggagcguggcgucccagagcaucaucgccuacaccaugucccugggcgccgagaacagcgucgccuacuccaacaacagcaucgccauccccaccaacuucacgaucuccgugaccaccgagauccugcccgugagcaugaccaagacgagcgucgacugcaccauguacaucugcggggacuccaccgagugcagcaaccuccugcugcaguacggcuccuucugcacccagcucaaccgcgcgcugacggggaucgccguggagcaggacaagaacacccaggagguguucgcccaggucaagcagaucuacaagacgcccccgaucaaggacuucggcggguucaacuucagccagauccugcccgaccccuccaagcccagcaagcgguccuucaucgaggaccuccuguucaacaaggugacccuggccgacgccggcuucaucaagcaguacggcgacugccucggggacaucgcggcccgcgaccugaucugcgcccagaaguucaacggccugaccgugcucccgccccugcugaccgacgagaugaucgcccaguacaccagcgcccuccuggcggggaccaucacguccggcuggaccuucggggccggcgccgcccugcagauccccuucgcgaugcagauggccuaccgguucaacggcaucggggucacccagaacgugcucuacgagaaccagaagcugaucgccaaccaguucaacagcgccaucggcaagauccaggacucccugagcuccaccgccagcgcgcucgggaagcugcaggacguggucaaccagaacgcccaggcccugaacacgcucgugaagugccuguccagcaacuucggcgccaucuccagcgugcugaacgacauccucucccgccuggacaaggucgaggccgaggugcagaucgaccggcugaucaccgggcgccuccagugccugcagaccuacgugacccagcagcugauccgggcggccgagauccgcgccagcgccaaccucgccgcgaccaagauguccgagugcguccugggccagagcaagcggguggacuucugcggcaagggguaccaccugauguccuucccccagagcgccccgcacggcguggucuuccuccacgugacguacguccccgcccaggagaagaacuucaccaccgcccccgcgaucugccacgacgggaaggcccacuucccccgcgagggcguguucguguccaacgggacccacugguucgucacgcagcggaacuucuacgagccgcagaucaucaccaccgacaacaccuucgugagcggcaacugcgacguggucaucggcaucgugaacaacacgguguacgacccccugcagcccgagcuggacuccuucaaggaggagcucgacaaguacuucaagaaccacaccagccccgacgucgaccugggggacaucuccggcaucaacgccagcguggugaacauccagaaggagaucgaccgccugaacgaggucgccaagaaccucaacgagucccugaucgaccugcaggagcucgggaaguacgagcaguacaucaagggcgggagcggcuacauccccgaggccccgcgcgacgggcaggccuacgugcggaaggacggcgaguggguccugcucagcaccuuccugugaggacuagucccuguucccagagcccacuuuuuuuucuuuuuuugaaauaaaauagccugucuuucagaucucaaaggcucuuuucagagccaccaaaaaaaaaaaaaaaaaaaaaaaaaaaaaaaaaaaaaaaaaaaaaaaaaaaaaaaaaaaaaaaaaaaaaaaaaaaaaaaaaaaaaaaaaaaaaaaaaaaaa

SEQ ID NO: 12394 - RNA, 3998 nt, Artificial Sequence
  SARS-CoV-2/Wuhan/WIV05/2019__EPI_ISL_402128 spike protein mRNA gc (1-1211)(F970C_G999C) Foldon construct
aggagagucccgcagucggcguccagcggcucugcuuguucgugugugugucguugcaggccuuauucaagcuuaccauguucguguuccugguccuccugccccuggugagcucccagugcgugaaccucaccacccgcacgcagcugccgcccgccuacaccaacagcuucacccggggcgucuacuaccccgacaagguguuccgcuccagcgugcugcacuccacccaggaccucuuccugcccuucuucagcaacgucacgugguuccacgccauccacguguccgggaccaacggcaccaagcgguucgacaacccggugcugcccuucaacgacggggucuacuucgcgagcaccgagaaguccaacaucauccgcggcuggaucuucgggacgacccucgacagcaagacccagucccugcugaucgugaacaacgccaccaacguggucaucaaggugugcgaguuccaguucugcaacgaccccuuccucggcguguacuaccacaagaacaacaagagcuggauggaguccgaguuccgggucuacagcuccgccaacaacugcacguucgaguacgugagccagcccuuccugauggaccuggagggcaagcaggggaacuucaagaaccuccgcgaguucguguucaagaacaucgacggcuacuucaagaucuacuccaagcacaccccgaucaaccugguccgggaccugccccagggguucagcgcccucgagccccugguggaccugcccaucggcaucaacaucacccgcuuccagacccuccuggcccugcaccgguccuaccucacgccgggggacagcagcuccggcuggaccgcgggcgccgccgccuacuacgugggguaccugcagccccgcaccuuccugcucaaguacaacgagaacggcaccaucacggacgcggucgacugcgcccuggacccccugagcgagaccaagugcacccucaaguccuucaccguggagaaggggaucuaccagacgagcaacuuccgggugcagcccaccgaguccaucguccgcuucccgaacaucaccaaccugugccccuucggcgagguguucaacgccacccgguucgccagcgucuacgccuggaaccgcaagcggaucuccaacugcguggcggacuacagcgugcuguacaacuccgccagcuucuccacguucaagugcuacggcgucagccccaccaagcucaacgaccugugcuucaccaacguguacgccgacuccuucgugauccgcggggacgagguccggcagaucgcccccggccagaccgggaagaucgccgacuacaacuacaagcugccggacgacuucacgggcugcgugaucgcguggaacagcaacaaccucgacuccaaggucgggggcaacuacaacuaccuguaccgccuguuccgcaagagcaaccucaagcccuucgagcgggacaucuccaccgagaucuaccaggccggcagcacccccugcaacgggguggagggcuucaacugcuacuucccccugcaguccuacggguuccagccgaccaacggcgugggguaccagcccuaccggguggucgugcugagcuucgagcuccugcacgcccccgccacggugugcggccccaagaaguccaccaaccuggucaagaacaagugcgugaacuucaacuucaacggccucaccgggaccggcgugcugaccgagagcaacaagaaguuccugccguuccagcaguucgggcgcgacaucgccgacacgaccgacgcgguccgcgacccccagacccuggagauccucgacaucacccccugcagcuucggcgggguguccgugaucacgccgggcaccaacaccagcaaccaggucgccgugcuguaccaggacgugaacugcaccgagguccccguggccauccacgccgaccagcugacgcccaccuggcggguguacuccaccggcagcaacgucuuccagacccgcgccgggugccucaucggcgcggagcacgugaacaacuccuacgagugcgacauccccaucggggccggcaucugcgccagcuaccagacgcagaccaacuccccgcggcgcgcccggagcguggcgucccagagcaucaucgccuacaccaugucccugggcgccgagaacagcgucgccuacuccaacaacagcaucgccauccccaccaacuucacgaucuccgugaccaccgagauccugcccgugagcaugaccaagacgagcgucgacugcaccauguacaucugcggggacuccaccgagugcagcaaccuccugcugcaguacggcuccuucugcacccagcucaaccgcgcgcugacggggaucgccguggagcaggacaagaacacccaggagguguucgcccaggucaagcagaucuacaagacgcccccgaucaaggacuucggcggguucaacuucagccagauccugcccgaccccuccaagcccagcaagcgguccuucaucgaggaccuccuguucaacaaggugacccuggccgacgccggcuucaucaagcaguacggcgacugccucggggacaucgcggcccgcgaccugaucugcgcccagaaguucaacggccugaccgugcucccgccccugcugaccgacgagaugaucgcccaguacaccagcgcccuccuggcggggaccaucacguccggcuggaccuucggggccggcgccgcccugcagauccccuucgcgaugcagauggccuaccgguucaacggcaucggggucacccagaacgugcucuacgagaaccagaagcugaucgccaaccaguucaacagcgccaucggcaagauccaggacucccugagcuccaccgccagcgcgcucgggaagcugcaggacguggucaaccagaacgcccaggcccugaacacgcucgugaagcagcuguccagcaacugcggcgccaucuccagcgugcugaacgacauccucucccgccuggacaaggucgaggccgaggugcagaucgaccggcugaucaccugucgccuccagagccugcagaccuacgugacccagcagcugauccgggcggccgagauccgcgccagcgccaaccucgccgcgaccaagauguccgagugcguccugggccagagcaagcggguggacuucugcggcaagggguaccaccugauguccuucccccagagcgccccgcacggcguggucuuccuccacgugacguacguccccgcccaggagaagaacuucaccaccgcccccgcgaucugccacgacgggaaggcccacuucccccgcgagggcguguucguguccaacgggacccacugguucgucacgcagcggaacuucuacgagccgcagaucaucaccaccgacaacaccuucgugagcggcaacugcgacguggucaucggcaucgugaacaacacgguguacgacccccugcagcccgagcuggacuccuucaaggaggagcucgacaaguacuucaagaaccacaccagccccgacgucgaccugggggacaucuccggcaucaacgccagcguggugaacauccagaaggagaucgaccgccugaacgaggucgccaagaaccucaacgagucccugaucgaccugcaggagcucgggaaguacgagcaguacaucaagggcgggagcggcuacauccccgaggccccgcgcgacgggcaggccuacgugcggaaggacggcgaguggguccugcucagcaccuuccugugaggacuagucccuguucccagagcccacuuuuuuuucuuuuuuugaaauaaaauagccugucuuucagaucucaaaggcucuuuucagagccaccaaaaaaaaaaaaaaaaaaaaaaaaaaaaaaaaaaaaaaaaaaaaaaaaaaaaaaaaaaaaaaaaaaaaaaaaaaaaaaaaaaaaaaaaaaaaaaaaaaaaa

SEQ ID NO: 12395 - RNA, 3998 nt, Artificial Sequence
  SARS-CoV-2/Wuhan/WIV05/2019__EPI_ISL_402128 spike protein mRNA gc (1-1211)(A972C_R995C) Foldon construct
aggagagucccgcagucggcguccagcggcucugcuuguucgugugugugucguugcaggccuuauucaagcuuaccauguucguguuccugguccuccugccccuggugagcucccagugcgugaaccucaccacccgcacgcagcugccgcccgccuacaccaacagcuucacccggggcgucuacuaccccgacaagguguuccgcuccagcgugcugcacuccacccaggaccucuuccugcccuucuucagcaacgucacgugguuccacgccauccacguguccgggaccaacggcaccaagcgguucgacaacccggugcugcccuucaacgacggggucuacuucgcgagcaccgagaaguccaacaucauccgcggcuggaucuucgggacgacccucgacagcaagacccagucccugcugaucgugaacaacgccaccaacguggucaucaaggugugcgaguuccaguucugcaacgaccccuuccucggcguguacuaccacaagaacaacaagagcuggauggaguccgaguuccgggucuacagcuccgccaacaacugcacguucgaguacgugagccagcccuuccugauggaccuggagggcaagcaggggaacuucaagaaccuccgcgaguucguguucaagaacaucgacggcuacuucaagaucuacuccaagcacaccccgaucaaccugguccgggaccugccccagggguucagcgcccucgagccccugguggaccugcccaucggcaucaacaucacccgcuuccagacccuccuggcccugcaccgguccuaccucacgccgggggacagcagcuccggcuggaccgcgggcgccgccgccuacuacgugggguaccugcagccccgcaccuuccugcucaaguacaacgagaacggcaccaucacggacgcggucgacugcgcccuggacccccugagcgagaccaagugcacccucaaguccuucaccguggagaaggggaucuaccagacgagcaacuuccgggugcagcccaccgaguccaucguccgcuucccgaacaucaccaaccugugccccuucggcgagguguucaacgccacccgguucgccagcgucuacgccuggaaccgcaagcggaucuccaacugcguggcggacuacagcgugcuguacaacuccgccagcuucuccacguucaagugcuacggcgucagccccaccaagcucaacgaccugugcuucaccaacguguacgccgacuccuucgugauccgcggggacgagguccggcagaucgcccccggccagaccgggaagaucgccgacuacaacuacaagcugccggacgacuucacgggcugcgugaucgcguggaacagcaacaaccucgacuccaaggucgggggcaacuacaacuaccuguaccgccuguuccgcaagagcaaccucaagcccuucgagcgggacaucuccaccgagaucuaccaggccggcagcacccccugcaacgggguggagggcuucaacugcuacuucccccugcaguccuacggguuccagccgaccaacggcgugggguaccagcccuaccggguggucgugcugagcuucgagcuccugcacgcccccgccacggugugcggccccaagaaguccaccaaccuggucaagaacaagugcgugaacuucaacuucaacggccucaccgggaccggcgugcugaccgagagcaacaagaaguuccugccguuccagcaguucgggcgcgacaucgccgacacgaccgacgcgguccgcgacccccagacccuggagauccucgacaucacccccugcagcuucggcgggguguccgugaucacgccgggcaccaacaccagcaaccaggucgccgugcuguaccaggacgugaacugcaccgagguccccguggccauccacgccgaccagcugacgcccaccuggcggguguacuccaccggcagcaacgucuuccagacccgcgccgggugccucaucggcgcggagcacgugaacaacuccuacgagugcgacauccccaucggggccggcaucugcgccagcuaccagacgcagaccaacuccccgcggcgcgcccggagcguggcgucccagagcaucaucgccuacaccaugucccugggcgccgagaacagcgucgccuacuccaacaacagcaucgccauccccaccaacuucacgaucuccgugaccaccgagauccugcccgugagcaugaccaagacgagcgucgacugcaccauguacaucugcggggacuccaccgagugcagcaaccuccugcugcaguacggcuccuucugcacccagcucaaccgcgcgcugacggggaucgccguggagcaggacaagaacacccaggagguguucgcccaggucaagcagaucuacaagacgcccccgaucaaggacuucggcggguucaacuucagccagauccugcccgaccccuccaagcccagcaagcgguccuucaucgaggaccuccuguucaacaaggugacccuggccgacgccggcuucaucaagcaguacggcgacugccucggggacaucgcggcccgcgaccugaucugcgcccagaaguucaacggccugaccgugcucccgccccugcugaccgacgagaugaucgcccaguacaccagcgcccuccuggcggggaccaucacguccggcuggaccuucggggccggcgccgcccugcagauccccuucgcgaugcagauggccuaccgguucaacggcaucggggucacccagaacgugcucuacgagaaccagaagcugaucgccaaccaguucaacagcgccaucggcaagauccaggacucccugagcuccaccgccagcgcgcucgggaagcugcaggacguggucaaccagaacgcccaggcccugaacacgcucgugaagcagcuguccagcaacuucggcugcaucuccagcgugcugaacgacauccucucccgccuggacaaggucgaggccgaggugcagaucgacugccugaucaccgggcgccuccagagccugcagaccuacgugacccagcagcugauccgggcggccgagauccgcgccagcgccaaccucgccgcgaccaagauguccgagugcguccugggccagagcaagcggguggacuucugcggcaagggguaccaccugauguccuucccccagagcgccccgcacggcguggucuuccuccacgugacguacguccccgcccaggagaagaacuucaccaccgcccccgcgaucugccacgacgggaaggcccacuucccccgcgagggcguguucguguccaacgggacccacugguucgucacgcagcggaacuucuacgagccgcagaucaucaccaccgacaacaccuucgugagcggcaacugcgacguggucaucggcaucgugaacaacacgguguacgacccccugcagcccgagcuggacuccuucaaggaggagcucgacaaguacuucaagaaccacaccagccccgacgucgaccugggggacaucuccggcaucaacgccagcguggugaacauccagaaggagaucgaccgccugaacgaggucgccaagaaccucaacgagucccugaucgaccugcaggagcucgggaaguacgagcaguacaucaagggcgggagcggcuacauccccgaggccccgcgcgacgggcaggccuacgugcggaaggacggcgaguggguccugcucagcaccuuccugugaggacuagucccuguucccagagcccacuuuuuuuucuuuuuuugaaauaaaauagccugucuuucagaucucaaaggcucuuuucagagccaccaaaaaaaaaaaaaaaaaaaaaaaaaaaaaaaaaaaaaaaaaaaaaaaaaaaaaaaaaaaaaaaaaaaaaaaaaaaaaaaaaaaaaaaaaaaaaaaaaaaaa

SEQ ID NO: 12396 - RNA, 3998 nt, Artificial Sequence
  SARS-CoV-2/Wuhan/WIV05/2019__EPI_ISL_402128 spike protein mRNA gc (1-1211)(A890C_V1040C) Foldon construct
aggagagucccgcagucggcguccagcggcucugcuuguucgugugugugucguugcaggccuuauucaagcuuaccauguucguguuccugguccuccugccccuggugagcucccagugcgugaaccucaccacccgcacgcagcugccgcccgccuacaccaacagcuucacccggggcgucuacuaccccgacaagguguuccgcuccagcgugcugcacuccacccaggaccucuuccugcccuucuucagcaacgucacgugguuccacgccauccacguguccgggaccaacggcaccaagcgguucgacaacccggugcugcccuucaacgacggggucuacuucgcgagcaccgagaaguccaacaucauccgcggcuggaucuucgggacgacccucgacagcaagacccagucccugcugaucgugaacaacgccaccaacguggucaucaaggugugcgaguuccaguucugcaacgaccccuuccucggcguguacuaccacaagaacaacaagagcuggauggaguccgaguuccgggucuacagcuccgccaacaacugcacguucgaguacgugagccagcccuuccugauggaccuggagggcaagcaggggaacuucaagaaccuccgcgaguucguguucaagaacaucgacggcuacuucaagaucuacuccaagcacaccccgaucaaccugguccgggaccugccccagggguucagcgcccucgagccccugguggaccugcccaucggcaucaacaucacccgcuuccagacccuccuggcccugcaccgguccuaccucacgccgggggacagcagcuccggcuggaccgcgggcgccgccgccuacuacgugggguaccugcagccccgcaccuuccugcucaaguacaacgagaacggcaccaucacggacgcggucgacugcgcccuggacccccugagcgagaccaagugcacccucaaguccuucaccguggagaaggggaucuaccagacgagcaacuuccgggugcagcccaccgaguccaucguccgcuucccgaacaucaccaaccugugccccuucggcgagguguucaacgccacccgguucgccagcgucuacgccuggaaccgcaagcggaucuccaacugcguggcggacuacagcgugcuguacaacuccgccagcuucuccacguucaagugcuacggcgucagccccaccaagcucaacgaccugugcuucaccaacguguacgccgacuccuucgugauccgcggggacgagguccggcagaucgcccccggccagaccgggaagaucgccgacuacaacuacaagcugccggacgacuucacgggcugcgugaucgcguggaacagcaacaaccucgacuccaaggucgggggcaacuacaacuaccuguaccgccuguuccgcaagagcaaccucaagcccuucgagcgggacaucuccaccgagaucuaccaggccggcagcacccccugcaacgggguggagggcuucaacugcuacuucccccugcaguccuacggguuccagccgaccaacggcgugggguaccagcccuaccggguggucgugcugagcuucgagcuccugcacgcccccgccacggugugcggccccaagaaguccaccaaccuggucaagaacaagugcgugaacuucaacuucaacggccucaccgggaccggcgugcugaccgagagcaacaagaaguuccugccguuccagcaguucgggcgcgacaucgccgacacgaccgacgcgguccgcgacccccagacccuggagauccucgacaucacccccugcagcuucggcgggguguccgugaucacgccgggcaccaacaccagcaaccaggucgccgugcuguaccaggacgugaacugcaccgagguccccguggccauccacgccgaccagcugacgcccaccuggcggguguacuccaccggcagcaacgucuuccagacccgcgccgggugccucaucggcgcggagcacgugaacaacuccuacgagugcgacauccccaucggggccggcaucugcgccagcuaccagacgcagaccaacuccccgcggcgcgcccggagcguggcgucccagagcaucaucgccuacaccaugucccugggcgccgagaacagcgucgccuacuccaacaacagcaucgccauccccaccaacuucacgaucuccgugaccaccgagauccugcccgugagcaugaccaagacgagcgucgacugcaccauguacaucugcggggacuccaccgagugcagcaaccuccugcugcaguacggcuccuucugcacccagcucaaccgcgcgcugacggggaucgccguggagcaggacaagaacacccaggagguguucgcccaggucaagcagaucuacaagacgcccccgaucaaggacuucggcggguucaacuucagccagauccugcccgaccccuccaagcccagcaagcgguccuucaucgaggaccuccuguucaacaaggugacccuggccgacgccggcuucaucaagcaguacggcgacugccucggggacaucgcggcccgcgaccugaucugcgcccagaaguucaacggccugaccgugcucccgccccugcugaccgacgagaugaucgcccaguacaccagcgcccuccuggcggggaccaucacguccggcuggaccuucgggugcggcgccgcccugcagauccccuucgcgaugcagauggccuaccgguucaacggcaucggggucacccagaacgugcucuacgagaaccagaagcugaucgccaaccaguucaacagcgccaucggcaagauccaggacucccugagcuccaccgccagcgcgcucgggaagcugcaggacguggucaaccagaacgcccaggcccugaacacgcucgugaagcagcuguccagcaacuucggcgccaucuccagcgugcugaacgacauccucucccgccuggacaaggucgaggccgaggugcagaucgaccggcugaucaccgggcgccuccagagccugcagaccuacgugacccagcagcugauccgggcggccgagauccgcgccagcgccaaccucgccgcgaccaagauguccgagugcguccugggccagagcaagcggugcgacuucugcggcaagggguaccaccugauguccuucccccagagcgccccgcacggcguggucuuccuccacgugacguacguccccgcccaggagaagaacuucaccaccgcccccgcgaucugccacgacgggaaggcccacuucccccgcgagggcguguucguguccaacgggacccacugguucgucacgcagcggaacuucuacgagccgcagaucaucaccaccgacaacaccuucgugagcggcaacugcgacguggucaucggcaucgugaacaacacgguguacgacccccugcagcccgagcuggacuccuucaaggaggagcucgacaaguacuucaagaaccacaccagccccgacgucgaccugggggacaucuccggcaucaacgccagcguggugaacauccagaaggagaucgaccgccugaacgaggucgccaagaaccucaacgagucccugaucgaccugcaggagcucgggaaguacgagcaguacaucaagggcgggagcggcuacauccccgaggccccgcgcgacgggcaggccuacgugcggaaggacggcgaguggguccugcucagcaccuuccugugaggacuagucccuguucccagagcccacuuuuuuuucuuuuuuugaaauaaaauagccugucuuucagaucucaaaggcucuuuucagagccaccaaaaaaaaaaaaaaaaaaaaaaaaaaaaaaaaaaaaaaaaaaaaaaaaaaaaaaaaaaaaaaaaaaaaaaaaaaaaaaaaaaaaaaaaaaaaaaaaaaaaa

SEQ ID NO: 12397 - RNA, 3998 nt, Artificial Sequence
  SARS-CoV-2/Wuhan/WIV05/2019__EPI_ISL_402128 spike protein mRNA gc (1-1211)(T874C_S1055C) Foldon construct
aggagagucccgcagucggcguccagcggcucugcuuguucgugugugugucguugcaggccuuauucaagcuuaccauguucguguuccugguccuccugccccuggugagcucccagugcgugaaccucaccacccgcacgcagcugccgcccgccuacaccaacagcuucacccggggcgucuacuaccccgacaagguguuccgcuccagcgugcugcacuccacccaggaccucuuccugcccuucuucagcaacgucacgugguuccacgccauccacguguccgggaccaacggcaccaagcgguucgacaacccggugcugcccuucaacgacggggucuacuucgcgagcaccgagaaguccaacaucauccgcggcuggaucuucgggacgacccucgacagcaagacccagucccugcugaucgugaacaacgccaccaacguggucaucaaggugugcgaguuccaguucugcaacgaccccuuccucggcguguacuaccacaagaacaacaagagcuggauggaguccgaguuccgggucuacagcuccgccaacaacugcacguucgaguacgugagccagcccuuccugauggaccuggagggcaagcaggggaacuucaagaaccuccgcgaguucguguucaagaacaucgacggcuacuucaagaucuacuccaagcacaccccgaucaaccugguccgggaccugccccagggguucagcgcccucgagccccugguggaccugcccaucggcaucaacaucacccgcuuccagacccuccuggcccugcaccgguccuaccucacgccgggggacagcagcuccggcuggaccgcgggcgccgccgccuacuacgugggguaccugcagccccgcaccuuccugcucaaguacaacgagaacggcaccaucacggacgcggucgacugcgcccuggacccccugagcgagaccaagugcacccucaaguccuucaccguggagaaggggaucuaccagacgagcaacuuccgggugcagcccaccgaguccaucguccgcuucccgaacaucaccaaccugugccccuucggcgagguguucaacgccacccgguucgccagcgucuacgccuggaaccgcaagcggaucuccaacugcguggcggacuacagcgugcuguacaacuccgccagcuucuccacguucaagugcuacggcgucagccccaccaagcucaacgaccugugcuucaccaacguguacgccgacuccuucgugauccgcggggacgagguccggcagaucgcccccggccagaccgggaagaucgccgacuacaacuacaagcugccggacgacuucacgggcugcgugaucgcguggaacagcaacaaccucgacuccaaggucgggggcaacuacaacuaccuguaccgccuguuccgcaagagcaaccucaagcccuucgagcgggacaucuccaccgagaucuaccaggccggcagcacccccugcaacgggguggagggcuucaacugcuacuucccccugcaguccuacggguuccagccgaccaacggcgugggguaccagcccuaccggguggucgugcugagcuucgagcuccugcacgcccccgccacggugugcggccccaagaaguccaccaaccuggucaagaacaagugcgugaacuucaacuucaacggccucaccgggaccggcgugcugaccgagagcaacaagaaguuccugccguuccagcaguucgggcgcgacaucgccgacacgaccgacgcgguccgcgacccccagacccuggagauccucgacaucacccccugcagcuucggcgggguguccgugaucacgccgggcaccaacaccagcaaccaggucgccgugcuguaccaggacgugaacugcaccgagguccccguggccauccacgccgaccagcugacgcccaccuggcggguguacuccaccggcagcaacgucuuccagacccgcgccgggugccucaucggcgcggagcacgugaacaacuccuacgagugcgacauccccaucggggccggcaucugcgccagcuaccagacgcagaccaacuccccgcggcgcgcccggagcguggcgucccagagcaucaucgccuacaccaugucccugggcgccgagaacagcgucgccuacuccaacaacagcaucgccauccccaccaacuucacgaucuccgugaccaccgagauccugcccgugagcaugaccaagacgagcgucgacugcaccauguacaucugcggggacuccaccgagugcagcaaccuccugcugcaguacggcuccuucugcacccagcucaaccgcgcgcugacggggaucgccguggagcaggacaagaacacccaggagguguucgcccaggucaagcagaucuacaagacgcccccgaucaaggacuucggcggguucaacuucagccagauccugcccgaccccuccaagcccagcaagcgguccuucaucgaggaccuccuguucaacaaggugacccuggccgacgccggcuucaucaagcaguacggcgacugccucggggacaucgcggcccgcgaccugaucugcgcccagaaguucaacggccugaccgugcucccgccccugcugaccgacgagaugaucgcccaguacugcagcgcccuccuggcggggaccaucacguccggcuggaccuucggggccggcgccgcccugcagauccccuucgcgaugcagauggccuaccgguucaacggcaucggggucacccagaacgugcucuacgagaaccagaagcugaucgccaaccaguucaacagcgccaucggcaagauccaggacucccugagcuccaccgccagcgcgcucgggaagcugcaggacguggucaaccagaacgcccaggcccugaacacgcucgugaagcagcuguccagcaacuucggcgccaucuccagcgugcugaacgacauccucucccgccuggacaaggucgaggccgaggugcagaucgaccggcugaucaccgggcgccuccagagccugcagaccuacgugacccagcagcugauccgggcggccgagauccgcgccagcgccaaccucgccgcgaccaagauguccgagugcguccugggccagagcaagcggguggacuucugcggcaagggguaccaccugauguccuucccccagugcgccccgcacggcguggucuuccuccacgugacguacguccccgcccaggagaagaacuucaccaccgcccccgcgaucugccacgacgggaaggcccacuucccccgcgagggcguguucguguccaacgggacccacugguucgucacgcagcggaacuucuacgagccgcagaucaucaccaccgacaacaccuucgugagcggcaacugcgacguggucaucggcaucgugaacaacacgguguacgacccccugcagcccgagcuggacuccuucaaggaggagcucgacaaguacuucaagaaccacaccagccccgacgucgaccugggggacaucuccggcaucaacgccagcguggugaacauccagaaggagaucgaccgccugaacgaggucgccaagaaccucaacgagucccugaucgaccugcaggagcucgggaaguacgagcaguacaucaagggcgggagcggcuacauccccgaggccccgcgcgacgggcaggccuacgugcggaaggacggcgaguggguccugcucagcaccuuccugugaggacuagucccuguucccagagcccacuuuuuuuucuuuuuuugaaauaaaauagccugucuuucagaucucaaaggcucuuuucagagccaccaaaaaaaaaaaaaaaaaaaaaaaaaaaaaaaaaaaaaaaaaaaaaaaaaaaaaaaaaaaaaaaaaaaaaaaaaaaaaaaaaaaaaaaaaaaaaaaaaaaaa

SEQ ID NO: 12398 - RNA, 4370 nt, Artificial Sequence
  SARS-CoV-2/Wuhan/WIV05/2019__EPI_ISL_402128 spike protein mRNA gc (1-1211) WhcAg construct
aggagagucccgcagucggcguccagcggcucugcuuguucgugugugugucguugcaggccuuauucaagcuuaccauguucguguuccugguccuccugccccuggugagcucccagugcgugaaccucaccacccgcacgcagcugccgcccgccuacaccaacagcuucacccggggcgucuacuaccccgacaagguguuccgcuccagcgugcugcacuccacccaggaccucuuccugcccuucuucagcaacgucacgugguuccacgccauccacguguccgggaccaacggcaccaagcgguucgacaacccggugcugcccuucaacgacggggucuacuucgcgagcaccgagaaguccaacaucauccgcggcuggaucuucgggacgacccucgacagcaagacccagucccugcugaucgugaacaacgccaccaacguggucaucaaggugugcgaguuccaguucugcaacgaccccuuccucggcguguacuaccacaagaacaacaagagcuggauggaguccgaguuccgggucuacagcuccgccaacaacugcacguucgaguacgugagccagcccuuccugauggaccuggagggcaagcaggggaacuucaagaaccuccgcgaguucguguucaagaacaucgacggcuacuucaagaucuacuccaagcacaccccgaucaaccugguccgggaccugccccagggguucagcgcccucgagccccugguggaccugcccaucggcaucaacaucacccgcuuccagacccuccuggcccugcaccgguccuaccucacgccgggggacagcagcuccggcuggaccgcgggcgccgccgccuacuacgugggguaccugcagccccgcaccuuccugcucaaguacaacgagaacggcaccaucacggacgcggucgacugcgcccuggacccccugagcgagaccaagugcacccucaaguccuucaccguggagaaggggaucuaccagacgagcaacuuccgggugcagcccaccgaguccaucguccgcuucccgaacaucaccaaccugugccccuucggcgagguguucaacgccacccgguucgccagcgucuacgccuggaaccgcaagcggaucuccaacugcguggcggacuacagcgugcuguacaacuccgccagcuucuccacguucaagugcuacggcgucagccccaccaagcucaacgaccugugcuucaccaacguguacgccgacuccuucgugauccgcggggacgagguccggcagaucgcccccggccagaccgggaagaucgccgacuacaacuacaagcugccggacgacuucacgggcugcgugaucgcguggaacagcaacaaccucgacuccaaggucgggggcaacuacaacuaccuguaccgccuguuccgcaagagcaaccucaagcccuucgagcgggacaucuccaccgagaucuaccaggccggcagcacccccugcaacgggguggagggcuucaacugcuacuucccccugcaguccuacggguuccagccgaccaacggcgugggguaccagcccuaccggguggucgugcugagcuucgagcuccugcacgcccccgccacggugugcggccccaagaaguccaccaaccuggucaagaacaagugcgugaacuucaacuucaacggccucaccgggaccggcgugcugaccgagagcaacaagaaguuccugccguuccagcaguucgggcgcgacaucgccgacacgaccgacgcgguccgcgacccccagacccuggagauccucgacaucacccccugcagcuucggcgggguguccgugaucacgccgggcaccaacaccagcaaccaggucgccgugcuguaccaggacgugaacugcaccgagguccccguggccauccacgccgaccagcugacgcccaccuggcggguguacuccaccggcagcaacgucuuccagacccgcgccgggugccucaucggcgcggagcacgugaacaacuccuacgagugcgacauccccaucggggccggcaucugcgccagcuaccagacgcagaccaacuccccgcggcgcgcccggagcguggcgucccagagcaucaucgccuacaccaugucccugggcgccgagaacagcgucgccuacuccaacaacagcaucgccauccccaccaacuucacgaucuccgugaccaccgagauccugcccgugagcaugaccaagacgagcgucgacugcaccauguacaucugcggggacuccaccgagugcagcaaccuccugcugcaguacggcuccuucugcacccagcucaaccgcgcgcugacggggaucgccguggagcaggacaagaacacccaggagguguucgcccaggucaagcagaucuacaagacgcccccgaucaaggacuucggcggguucaacuucagccagauccugcccgaccccuccaagcccagcaagcgguccuucaucgaggaccuccuguucaacaaggugacccuggccgacgccggcuucaucaagcaguacggcgacugccucggggacaucgcggcccgcgaccugaucugcgcccagaaguucaacggccugaccgugcucccgccccugcugaccgacgagaugaucgcccaguacaccagcgcccuccuggcggggaccaucacguccggcuggaccuucggggccggcgccgcccugcagauccccuucgcgaugcagauggccuaccgguucaacggcaucggggucacccagaacgugcucuacgagaaccagaagcugaucgccaaccaguucaacagcgccaucggcaagauccaggacucccugagcuccaccgccagcgcgcucgggaagcugcaggacguggucaaccagaacgcccaggcccugaacacgcucgugaagcagcuguccagcaacuucggcgccaucuccagcgugcugaacgacauccucucccgccuggacaaggucgaggccgaggugcagaucgaccggcugaucaccgggcgccuccagagccugcagaccuacgugacccagcagcugauccgggcggccgagauccgcgccagcgccaaccucgccgcgaccaagauguccgagugcguccugggccagagcaagcggguggacuucugcggcaagggguaccaccugauguccuucccccagagcgccccgcacggcguggucuuccuccacgugacguacguccccgcccaggagaagaacuucaccaccgcccccgcgaucugccacgacgggaaggcccacuucccccgcgagggcguguucguguccaacgggacccacugguucgucacgcagcggaacuucuacgagccgcagaucaucaccaccgacaacaccuucgugagcggcaacugcgacguggucaucggcaucgugaacaacacgguguacgacccccugcagcccgagcuggacuccuucaaggaggagcucgacaaguacuucaagaaccacaccagccccgacgucgaccugggggacaucuccggcaucaacgccagcguggugaacauccagaaggagaucgaccgccugaacgaggucgccaagaaccucaacgagucccugaucgaccugcaggagcucgggaaguacgagcaguacaucaagggcgggggcgggagcgacaucgaccccuacaaggaguucggcagcuccuaccagcugcucaacuuccugccccuggacuucuuccccgaccucaacgcccugguggacaccgccaccgcgcuguacgaggaggagcucacggggcgcgagcacugcagcccccaccacaccgccauccggcaggcccuggucugcugggacgagcugaccaagcucaucgccuggauguccagcaacaucaccuccgagcagguccgcacgaucaucgugaaccacgucaacgacaccuggggccugaaggugcggcagagccugugguuccaccucuccugccugaccuucgggcagcacaccgugcaggaguuccuggucagcuucggcguguggauccgcacgcccgccccguaccggccgcccaacgcgccgauccucuccacccugccggagcacaccgugaucugcugaggacuagucccuguucccagagcccacuuuuuuuucuuuuuuugaaauaaaauagccugucuuucagaucucaaaggcucuuuucagagccaccaaaaaaaaaaaaaaaaaaaaaaaaaaaaaaaaaaaaaaaaaaaaaaaaaaaaaaaaaaaaaaaaaaaaaaaaaaaaaaaaaaaaaaaaaaaaaaaaaaaaa

SEQ ID NO: 12399 - RNA, 4370 nt, Artificial Sequence
  SARS-CoV-2/Wuhan/WIV05/2019__EPI_ISL_402128 spike protein mRNA gc (1-1211)(K986P_V987P) WhcAg construct
aggagagucccgcagucggcguccagcggcucugcuuguucgugugugugucguugcaggccuuauucaagcuuaccauguucguguuccugguccuccugccccuggugagcucccagugcgugaaccucaccacccgcacgcagcugccgcccgccuacaccaacagcuucacccggggcgucuacuaccccgacaagguguuccgcuccagcgugcugcacuccacccaggaccucuuccugcccuucuucagcaacgucacgugguuccacgccauccacguguccgggaccaacggcaccaagcgguucgacaacccggugcugcccuucaacgacggggucuacuucgcgagcaccgagaaguccaacaucauccgcggcuggaucuucgggacgacccucgacagcaagacccagucccugcugaucgugaacaacgccaccaacguggucaucaaggugugcgaguuccaguucugcaacgaccccuuccucggcguguacuaccacaagaacaacaagagcuggauggaguccgaguuccgggucuacagcuccgccaacaacugcacguucgaguacgugagccagcccuuccugauggaccuggagggcaagcaggggaacuucaagaaccuccgcgaguucguguucaagaacaucgacggcuacuucaagaucuacuccaagcacaccccgaucaaccugguccgggaccugccccagggguucagcgcccucgagccccugguggaccugcccaucggcaucaacaucacccgcuuccagacccuccuggcccugcaccgguccuaccucacgccgggggacagcagcuccggcuggaccgcgggcgccgccgccuacuacgugggguaccugcagccccgcaccuuccugcucaaguacaacgagaacggcaccaucacggacgcggucgacugcgcccuggacccccugagcgagaccaagugcacccucaaguccuucaccguggagaaggggaucuaccagacgagcaacuuccgggugcagcccaccgaguccaucguccgcuucccgaacaucaccaaccugugccccuucggcgagguguucaacgccacccgguucgccagcgucuacgccuggaaccgcaagcggaucuccaacugcguggcggacuacagcgugcuguacaacuccgccagcuucuccacguucaagugcuacggcgucagccccaccaagcucaacgaccugugcuucaccaacguguacgccgacuccuucgugauccgcggggacgagguccggcagaucgcccccggccagaccgggaagaucgccgacuacaacuacaagcugccggacgacuucacgggcugcgugaucgcguggaacagcaacaaccucgacuccaaggucgggggcaacuacaacuaccuguaccgccuguuccgcaagagcaaccucaagcccuucgagcgggacaucuccaccgagaucuaccaggccggcagcacccccugcaacgggguggagggcuucaacugcuacuucccccugcaguccuacggguuccagccgaccaacggcgugggguaccagcccuaccggguggucgugcugagcuucgagcuccugcacgcccccgccacggugugcggccccaagaaguccaccaaccuggucaagaacaagugcgugaacuucaacuucaacggccucaccgggaccggcgugcugaccgagagcaacaagaaguuccugccguuccagcaguucgggcgcgacaucgccgacacgaccgacgcgguccgcgacccccagacccuggagauccucgacaucacccccugcagcuucggcgggguguccgugaucacgccgggcaccaacaccagcaaccaggucgccgugcuguaccaggacgugaacugcaccgagguccccguggccauccacgccgaccagcugacgcccaccuggcggguguacuccaccggcagcaacgucuuccagacccgcgccgggugccucaucggcgcggagcacgugaacaacuccuacgagugcgacauccccaucggggccggcaucugcgccagcuaccagacgcagaccaacuccccgcggcgcgcccggagcguggcgucccagagcaucaucgccuacaccaugucccugggcgccgagaacagcgucgccuacuccaacaacagcaucgccauccccaccaacuucacgaucuccgugaccaccgagauccugcccgugagcaugaccaagacgagcgucgacugcaccauguacaucugcggggacuccaccgagugcagcaaccuccugcugcaguacggcuccuucugcacccagcucaaccgcgcgcugacggggaucgccguggagcaggacaagaacacccaggagguguucgcccaggucaagcagaucuacaagacgcccccgaucaaggacuucggcggguucaacuucagccagauccugcccgaccccuccaagcccagcaagcgguccuucaucgaggaccuccuguucaacaaggugacccuggccgacgccggcuucaucaagcaguacggcgacugccucggggacaucgcggcccgcgaccugaucugcgcccagaaguucaacggccugaccgugcucccgccccugcugaccgacgagaugaucgcccaguacaccagcgcccuccuggcggggaccaucacguccggcuggaccuucggggccggcgccgcccugcagauccccuucgcgaugcagauggccuaccgguucaacggcaucggggucacccagaacgugcucuacgagaaccagaagcugaucgccaaccaguucaacagcgccaucggcaagauccaggacucccugagcuccaccgccagcgcgcucgggaagcugcaggacguggucaaccagaacgcccaggcccugaacacgcucgugaagcagcuguccagcaacuucggcgccaucuccagcgugcugaacgacauccucucccgccuggacccgcccgaggccgaggugcagaucgaccggcugaucaccgggcgccuccagagccugcagaccuacgugacccagcagcugauccgggcggccgagauccgcgccagcgccaaccucgccgcgaccaagauguccgagugcguccugggccagagcaagcggguggacuucugcggcaagggguaccaccugauguccuucccccagagcgccccgcacggcguggucuuccuccacgugacguacguccccgcccaggagaagaacuucaccaccgcccccgcgaucugccacgacgggaaggcccacuucccccgcgagggcguguucguguccaacgggacccacugguucgucacgcagcggaacuucuacgagccgcagaucaucaccaccgacaacaccuucgugagcggcaacugcgacguggucaucggcaucgugaacaacacgguguacgacccccugcagcccgagcuggacuccuucaaggaggagcucgacaaguacuucaagaaccacaccagccccgacgucgaccugggggacaucuccggcaucaacgccagcguggugaacauccagaaggagaucgaccgccugaacgaggucgccaagaaccucaacgagucccugaucgaccugcaggagcucgggaaguacgagcaguacaucaagggcgggggcgggagcgacaucgaccccuacaaggaguucggcagcuccuaccagcugcucaacuuccugccccuggacuucuuccccgaccucaacgcccugguggacaccgccaccgcgcuguacgaggaggagcucacggggcgcgagcacugcagcccccaccacaccgccauccggcaggcccuggucugcugggacgagcugaccaagcucaucgccuggauguccagcaacaucaccuccgagcagguccgcacgaucaucgugaaccacgucaacgacaccuggggccugaaggugcggcagagccugugguuccaccucuccugccugaccuucgggcagcacaccgugcaggaguuccuggucagcuucggcguguggauccgcacgcccgccccguaccggccgcccaacgcgccgauccucuccacccugccggagcacaccgugaucugcugaggacuagucccuguucccagagcccacuuuuuuuucuuuuuuugaaauaaaauagccugucuuucagaucucaaaggcucuuuucagagccaccaaaaaaaaaaaaaaaaaaaaaaaaaaaaaaaaaaaaaaaaaaaaaaaaaaaaaaaaaaaaaaaaaaaaaaaaaaaaaaaaaaaaaaaaaaaaaaaaaaaaa

SEQ ID NO: 12400 - RNA, 4370 nt, Artificial Sequence
  SARS-CoV-2/Wuhan/WIV05/2019__EPI_ISL_402128 spike protein mRNA gc (1-1211)(K986P_V987P_T887WN_A1020W) WhcAg construct
aggagagucccgcagucggcguccagcggcucugcuuguucgugugugugucguugcaggccuuauucaagcuuaccauguucguguuccugguccuccugccccuggugagcucccagugcgugaaccucaccacccgcacgcagcugccgcccgccuacaccaacagcuucacccggggcgucuacuaccccgacaagguguuccgcuccagcgugcugcacuccacccaggaccucuuccugcccuucuucagcaacgucacgugguuccacgccauccacguguccgggaccaacggcaccaagcgguucgacaacccggugcugcccuucaacgacggggucuacuucgcgagcaccgagaaguccaacaucauccgcggcuggaucuucgggacgacccucgacagcaagacccagucccugcugaucgugaacaacgccaccaacguggucaucaaggugugcgaguuccaguucugcaacgaccccuuccucggcguguacuaccacaagaacaacaagagcuggauggaguccgaguuccgggucuacagcuccgccaacaacugcacguucgaguacgugagccagcccuuccugauggaccuggagggcaagcaggggaacuucaagaaccuccgcgaguucguguucaagaacaucgacggcuacuucaagaucuacuccaagcacaccccgaucaaccugguccgggaccugccccagggguucagcgcccucgagccccugguggaccugcccaucggcaucaacaucacccgcuuccagacccuccuggcccugcaccgguccuaccucacgccgggggacagcagcuccggcuggaccgcgggcgccgccgccuacuacgugggguaccugcagccccgcaccuuccugcucaaguacaacgagaacggcaccaucacggacgcggucgacugcgcccuggacccccugagcgagaccaagugcacccucaaguccuucaccguggagaaggggaucuaccagacgagcaacuuccgggugcagcccaccgaguccaucguccgcuucccgaacaucaccaaccugugccccuucggcgagguguucaacgccacccgguucgccagcgucuacgccuggaaccgcaagcggaucuccaacugcguggcggacuacagcgugcuguacaacuccgccagcuucuccacguucaagugcuacggcgucagccccaccaagcucaacgaccugugcuucaccaacguguacgccgacuccuucgugauccgcggggacgagguccggcagaucgcccccggccagaccgggaagaucgccgacuacaacuacaagcugccggacgacuucacgggcugcgugaucgcguggaacagcaacaaccucgacuccaaggucgggggcaacuacaacuaccuguaccgccuguuccgcaagagcaaccucaagcccuucgagcgggacaucuccaccgagaucuaccaggccggcagcacccccugcaacgggguggagggcuucaacugcuacuucccccugcaguccuacggguuccagccgaccaacggcgugggguaccagcccuaccggguggucgugcugagcuucgagcuccugcacgcccccgccacggugugcggccccaagaaguccaccaaccuggucaagaacaagugcgugaacuucaacuucaacggccucaccgggaccggcgugcugaccgagagcaacaagaaguuccugccguuccagcaguucgggcgcgacaucgccgacacgaccgacgcgguccgcgacccccagacccuggagauccucgacaucacccccugcagcuucggcgggguguccgugaucacgccgggcaccaacaccagcaaccaggucgccgugcuguaccaggacgugaacugcaccgagguccccguggccauccacgccgaccagcugacgcccaccuggcggguguacuccaccggcagcaacgucuuccagacccgcgccgggugccucaucggcgcggagcacgugaacaacuccuacgagugcgacauccccaucggggccggcaucugcgccagcuaccagacgcagaccaacuccccgcggcgcgcccggagcguggcgucccagagcaucaucgccuacaccaugucccugggcgccgagaacagcgucgccuacuccaacaacagcaucgccauccccaccaacuucacgaucuccgugaccaccgagauccugcccgugagcaugaccaagacgagcgucgacugcaccauguacaucugcggggacuccaccgagugcagcaaccuccugcugcaguacggcuccuucugcacccagcucaaccgcgcgcugacggggaucgccguggagcaggacaagaacacccaggagguguucgcccaggucaagcagaucuacaagacgcccccgaucaaggacuucggcggguucaacuucagccagauccugcccgaccccuccaagcccagcaagcgguccuucaucgaggaccuccuguucaacaaggugacccuggccgacgccggcuucaucaagcaguacggcgacugccucggggacaucgcggcccgcgaccugaucugcgcccagaaguucaacggccugaccgugcucccgccccugcugaccgacgagaugaucgcccaguacaccagcgcccuccuggcggggaccaucacguccggcuggugguucggggccggcgccgcccugcagauccccuucgcgaugcagauggccuaccgguucaacggcaucggggucacccagaacgugcucuacgagaaccagaagcugaucgccaaccaguucaacagcgccaucggcaagauccaggacucccugagcuccaccgccagcgcgcucgggaagcugcaggacguggucaaccagaacgcccaggcccugaacacgcucgugaagcagcuguccagcaacuucggcgccaucuccagcgugcugaacgacauccucucccgccuggacccgcccgaggccgaggugcagaucgaccggcugaucaccgggcgccuccagagccugcagaccuacgugacccagcagcugauccgggcggccgagauccgcuggagcgccaaccucgccgcgaccaagauguccgagugcguccugggccagagcaagcggguggacuucugcggcaagggguaccaccugauguccuucccccagagcgccccgcacggcguggucuuccuccacgugacguacguccccgcccaggagaagaacuucaccaccgcccccgcgaucugccacgacgggaaggcccacuucccccgcgagggcguguucguguccaacgggacccacugguucgucacgcagcggaacuucuacgagccgcagaucaucaccaccgacaacaccuucgugagcggcaacugcgacguggucaucggcaucgugaacaacacgguguacgacccccugcagcccgagcuggacuccuucaaggaggagcucgacaaguacuucaagaaccacaccagccccgacgucgaccugggggacaucuccggcaucaacgccagcguggugaacauccagaaggagaucgaccgccugaacgaggucgccaagaaccucaacgagucccugaucgaccugcaggagcucgggaaguacgagcaguacaucaagggcgggggcgggagcgacaucgaccccuacaaggaguucggcagcuccuaccagcugcucaacuuccugccccuggacuucuuccccgaccucaacgcccugguggacaccgccaccgcgcuguacgaggaggagcucacggggcgcgagcacugcagcccccaccacaccgccauccggcaggcccuggucugcugggacgagcugaccaagcucaucgccuggauguccagcaacaucaccuccgagcagguccgcacgaucaucgugaaccacgucaacgacaccuggggccugaaggugcggcagagccugugguuccaccucuccugccugaccuucgggcagcacaccgugcaggaguuccuggucagcuucggcguguggauccgcacgcccgccccguaccggccgcccaacgcgccgauccucuccacccugccggagcacaccgugaucugcugaggacuagucccuguucccagagcccacuuuuuuuucuuuuuuugaaauaaaauagccugucuuucagaucucaaaggcucuuuucagagccaccaaaaaaaaaaaaaaaaaaaaaaaaaaaaaaaaaaaaaaaaaaaaaaaaaaaaaaaaaaaaaaaaaaaaaaaaaaaaaaaaaaaaaaaaaaaaaaaaaaaaa

SEQ ID NO: 12401 - RNA, 4370 nt, Artificial Sequence
  SARS-CoV-2/Wuhan/WIV05/2019__EPI_ISL_402128 spike protein mRNA gc (1-1211)(K986P_V987P_P1069F) WhcAg construct
aggagagucccgcagucggcguccagcggcucugcuuguucgugugugugucguugcaggccuuauucaagcuuaccauguucguguuccugguccuccugccccuggugagcucccagugcgugaaccucaccacccgcacgcagcugccgcccgccuacaccaacagcuucacccggggcgucuacuaccccgacaagguguuccgcuccagcgugcugcacuccacccaggaccucuuccugcccuucuucagcaacgucacgugguuccacgccauccacguguccgggaccaacggcaccaagcgguucgacaacccggugcugcccuucaacgacggggucuacuucgcgagcaccgagaaguccaacaucauccgcggcuggaucuucgggacgacccucgacagcaagacccagucccugcugaucgugaacaacgccaccaacguggucaucaaggugugcgaguuccaguucugcaacgaccccuuccucggcguguacuaccacaagaacaacaagagcuggauggaguccgaguuccgggucuacagcuccgccaacaacugcacguucgaguacgugagccagcccuuccugauggaccuggagggcaagcaggggaacuucaagaaccuccgcgaguucguguucaagaacaucgacggcuacuucaagaucuacuccaagcacaccccgaucaaccugguccgggaccugccccagggguucagcgcccucgagccccugguggaccugcccaucggcaucaacaucacccgcuuccagacccuccuggcccugcaccgguccuaccucacgccgggggacagcagcuccggcuggaccgcgggcgccgccgccuacuacgugggguaccugcagccccgcaccuuccugcucaaguacaacgagaacggcaccaucacggacgcggucgacugcgcccuggacccccugagcgagaccaagugcacccucaaguccuucaccguggagaaggggaucuaccagacgagcaacuuccgggugcagcccaccgaguccaucguccgcuucccgaacaucaccaaccugugccccuucggcgagguguucaacgccacccgguucgccagcgucuacgccuggaaccgcaagcggaucuccaacugcguggcggacuacagcgugcuguacaacuccgccagcuucuccacguucaagugcuacggcgucagccccaccaagcucaacgaccugugcuucaccaacguguacgccgacuccuucgugauccgcggggacgagguccggcagaucgcccccggccagaccgggaagaucgccgacuacaacuacaagcugccggacgacuucacgggcugcgugaucgcguggaacagcaacaaccucgacuccaaggucgggggcaacuacaacuaccuguaccgccuguuccgcaagagcaaccucaagcccuucgagcgggacaucuccaccgagaucuaccaggccggcagcacccccugcaacgggguggagggcuucaacugcuacuucccccugcaguccuacggguuccagccgaccaacggcgugggguaccagcccuaccggguggucgugcugagcuucgagcuccugcacgcccccgccacggugugcggccccaagaaguccaccaaccuggucaagaacaagugcgugaacuucaacuucaacggccucaccgggaccggcgugcugaccgagagcaacaagaaguuccugccguuccagcaguucgggcgcgacaucgccgacacgaccgacgcgguccgcgacccccagacccuggagauccucgacaucacccccugcagcuucggcgggguguccgugaucacgccgggcaccaacaccagcaaccaggucgccgugcuguaccaggacgugaacugcaccgagguccccguggccauccacgccgaccagcugacgcccaccuggcggguguacuccaccggcagcaacgucuuccagacccgcgccgggugccucaucggcgcggagcacgugaacaacuccuacgagugcgacauccccaucggggccggcaucugcgccagcuaccagacgcagaccaacuccccgcggcgcgcccggagcguggcgucccagagcaucaucgccuacaccaugucccugggcgccgagaacagcgucgccuacuccaacaacagcaucgccauccccaccaacuucacgaucuccgugaccaccgagauccugcccgugagcaugaccaagacgagcgucgacugcaccauguacaucugcggggacuccaccgagugcagcaaccuccugcugcaguacggcuccuucugcacccagcucaaccgcgcgcugacggggaucgccguggagcaggacaagaacacccaggagguguucgcccaggucaagcagaucuacaagacgcccccgaucaaggacuucggcggguucaacuucagccagauccugcccgaccccuccaagcccagcaagcgguccuucaucgaggaccuccuguucaacaaggugacccuggccgacgccggcuucaucaagcaguacggcgacugccucggggacaucgcggcccgcgaccugaucugcgcccagaaguucaacggccugaccgugcucccgccccugcugaccgacgagaugaucgcccaguacaccagcgcccuccuggcggggaccaucacguccggcuggaccuucggggccggcgccgcccugcagauccccuucgcgaugcagauggccuaccgguucaacggcaucggggucacccagaacgugcucuacgagaaccagaagcugaucgccaaccaguucaacagcgccaucggcaagauccaggacucccugagcuccaccgccagcgcgcucgggaagcugcaggacguggucaaccagaacgcccaggcccugaacacgcucgugaagcagcuguccagcaacuucggcgccaucuccagcgugcugaacgacauccucucccgccuggacccgcccgaggccgaggugcagaucgaccggcugaucaccgggcgccuccagagccugcagaccuacgugacccagcagcugauccgggcggccgagauccgcgccagcgccaaccucgccgcgaccaagauguccgagugcguccugggccagagcaagcggguggacuucugcggcaagggguaccaccugauguccuucccccagagcgccccgcacggcguggucuuccuccacgugacguacgucuucgcccaggagaagaacuucaccaccgcccccgcgaucugccacgacgggaaggcccacuucccccgcgagggcguguucguguccaacgggacccacugguucgucacgcagcggaacuucuacgagccgcagaucaucaccaccgacaacaccuucgugagcggcaacugcgacguggucaucggcaucgugaacaacacgguguacgacccccugcagcccgagcuggacuccuucaaggaggagcucgacaaguacuucaagaaccacaccagccccgacgucgaccugggggacaucuccggcaucaacgccagcguggugaacauccagaaggagaucgaccgccugaacgaggucgccaagaaccucaacgagucccugaucgaccugcaggagcucgggaaguacgagcaguacaucaagggcgggggcgggagcgacaucgaccccuacaaggaguucggcagcuccuaccagcugcucaacuuccugccccuggacuucuuccccgaccucaacgcccugguggacaccgccaccgcgcuguacgaggaggagcucacggggcgcgagcacugcagcccccaccacaccgccauccggcaggcccuggucugcugggacgagcugaccaagcucaucgccuggauguccagcaacaucaccuccgagcagguccgcacgaucaucgugaaccacgucaacgacaccuggggccugaaggugcggcagagccugugguuccaccucuccugccugaccuucgggcagcacaccgugcaggaguuccuggucagcuucggcguguggauccgcacgcccgccccguaccggccgcccaacgcgccgauccucuccacccugccggagcacaccgugaucugcugaggacuagucccuguucccagagcccacuuuuuuuucuuuuuuugaaauaaaauagccugucuuucagaucucaaaggcucuuuucagagccaccaaaaaaaaaaaaaaaaaaaaaaaaaaaaaaaaaaaaaaaaaaaaaaaaaaaaaaaaaaaaaaaaaaaaaaaaaaaaaaaaaaaaaaaaaaaaaaaaaaaaa

SEQ ID NO: 12402 - RNA, 4370 nt, Artificial Sequence
  SARS-CoV-2/Wuhan/WIV05/2019__EPI_ISL_402128 spike protein mRNA gc (1-1211)(K986P_V987P_ H1048Q_H1064N_ H1083N_H1101N) WhcAg construct
aggagagucccgcagucggcguccagcggcucugcuuguucgugugugugucguugcaggccuuauucaagcuuaccauguucguguuccugguccuccugccccuggugagcucccagugcgugaaccucaccacccgcacgcagcugccgcccgccuacaccaacagcuucacccggggcgucuacuaccccgacaagguguuccgcuccagcgugcugcacuccacccaggaccucuuccugcccuucuucagcaacgucacgugguuccacgccauccacguguccgggaccaacggcaccaagcgguucgacaacccggugcugcccuucaacgacggggucuacuucgcgagcaccgagaaguccaacaucauccgcggcuggaucuucgggacgacccucgacagcaagacccagucccugcugaucgugaacaacgccaccaacguggucaucaaggugugcgaguuccaguucugcaacgaccccuuccucggcguguacuaccacaagaacaacaagagcuggauggaguccgaguuccgggucuacagcuccgccaacaacugcacguucgaguacgugagccagcccuuccugauggaccuggagggcaagcaggggaacuucaagaaccuccgcgaguucguguucaagaacaucgacggcuacuucaagaucuacuccaagcacaccccgaucaaccugguccgggaccugccccagggguucagcgcccucgagccccugguggaccugcccaucggcaucaacaucacccgcuuccagacccuccuggcccugcaccgguccuaccucacgccgggggacagcagcuccggcuggaccgcgggcgccgccgccuacuacgugggguaccugcagccccgcaccuuccugcucaaguacaacgagaacggcaccaucacggacgcggucgacugcgcccuggacccccugagcgagaccaagugcacccucaaguccuucaccguggagaaggggaucuaccagacgagcaacuuccgggugcagcccaccgaguccaucguccgcuucccgaacaucaccaaccugugccccuucggcgagguguucaacgccacccgguucgccagcgucuacgccuggaaccgcaagcggaucuccaacugcguggcggacuacagcgugcuguacaacuccgccagcuucuccacguucaagugcuacggcgucagccccaccaagcucaacgaccugugcuucaccaacguguacgccgacuccuucgugauccgcggggacgagguccggcagaucgcccccggccagaccgggaagaucgccgacuacaacuacaagcugccggacgacuucacgggcugcgugaucgcguggaacagcaacaaccucgacuccaaggucgggggcaacuacaacuaccuguaccgccuguuccgcaagagcaaccucaagcccuucgagcgggacaucuccaccgagaucuaccaggccggcagcacccccugcaacgggguggagggcuucaacugcuacuucccccugcaguccuacggguuccagccgaccaacggcgugggguaccagcccuaccggguggucgugcugagcuucgagcuccugcacgcccccgccacggugugcggccccaagaaguccaccaaccuggucaagaacaagugcgugaacuucaacuucaacggccucaccgggaccggcgugcugaccgagagcaacaagaaguuccugccguuccagcaguucgggcgcgacaucgccgacacgaccgacgcgguccgcgacccccagacccuggagauccucgacaucacccccugcagcuucggcgggguguccgugaucacgccgggcaccaacaccagcaaccaggucgccgugcuguaccaggacgugaacugcaccgagguccccguggccauccacgccgaccagcugacgcccaccuggcggguguacuccaccggcagcaacgucuuccagacccgcgccgggugccucaucggcgcggagcacgugaacaacuccuacgagugcgacauccccaucggggccggcaucugcgccagcuaccagacgcagaccaacuccccgcggcgcgcccggagcguggcgucccagagcaucaucgccuacaccaugucccugggcgccgagaacagcgucgccuacuccaacaacagcaucgccauccccaccaacuucacgaucuccgugaccaccgagauccugcccgugagcaugaccaagacgagcgucgacugcaccauguacaucugcggggacuccaccgagugcagcaaccuccugcugcaguacggcuccuucugcacccagcucaaccgcgcgcugacggggaucgccguggagcaggacaagaacacccaggagguguucgcccaggucaagcagaucuacaagacgcccccgaucaaggacuucggcggguucaacuucagccagauccugcccgaccccuccaagcccagcaagcgguccuucaucgaggaccuccuguucaacaaggugacccuggccgacgccggcuucaucaagcaguacggcgacugccucggggacaucgcggcccgcgaccugaucugcgcccagaaguucaacggccugaccgugcucccgccccugcugaccgacgagaugaucgcccaguacaccagcgcccuccuggcggggaccaucacguccggcuggaccuucggggccggcgccgcccugcagauccccuucgcgaugcagauggccuaccgguucaacggcaucggggucacccagaacgugcucuacgagaaccagaagcugaucgccaaccaguucaacagcgccaucggcaagauccaggacucccugagcuccaccgccagcgcgcucgggaagcugcaggacguggucaaccagaacgcccaggcccugaacacgcucgugaagcagcuguccagcaacuucggcgccaucuccagcgugcugaacgacauccucucccgccuggacccgcccgaggccgaggugcagaucgaccggcugaucaccgggcgccuccagagccugcagaccuacgugacccagcagcugauccgggcggccgagauccgcgccagcgccaaccucgccgcgaccaagauguccgagugcguccugggccagagcaagcggguggacuucugcggcaagggguaccagcugauguccuucccccagagcgccccgcacggcguggucuuccucaacgugacguacguccccgcccaggagaagaacuucaccaccgcccccgcgaucugcaacgacgggaaggcccacuucccccgcgagggcguguucguguccaacgggaccaacugguucgucacgcagcggaacuucuacgagccgcagaucaucaccaccgacaacaccuucgugagcggcaacugcgacguggucaucggcaucgugaacaacacgguguacgacccccugcagcccgagcuggacuccuucaaggaggagcucgacaaguacuucaagaaccacaccagccccgacgucgaccugggggacaucuccggcaucaacgccagcguggugaacauccagaaggagaucgaccgccugaacgaggucgccaagaaccucaacgagucccugaucgaccugcaggagcucgggaaguacgagcaguacaucaagggcgggggcgggagcgacaucgaccccuacaaggaguucggcagcuccuaccagcugcucaacuuccugccccuggacuucuuccccgaccucaacgcccugguggacaccgccaccgcgcuguacgaggaggagcucacggggcgcgagcacugcagcccccaccacaccgccauccggcaggcccuggucugcugggacgagcugaccaagcucaucgccuggauguccagcaacaucaccuccgagcagguccgcacgaucaucgugaaccacgucaacgacaccuggggccugaaggugcggcagagccugugguuccaccucuccugccugaccuucgggcagcacaccgugcaggaguuccuggucagcuucggcguguggauccgcacgcccgccccguaccggccgcccaacgcgccgauccucuccacccugccggagcacaccgugaucugcugaggacuagucccuguucccagagcccacuuuuuuuucuuuuuuugaaauaaaauagccugucuuucagaucucaaaggcucuuuucagagccaccaaaaaaaaaaaaaaaaaaaaaaaaaaaaaaaaaaaaaaaaaaaaaaaaaaaaaaaaaaaaaaaaaaaaaaaaaaaaaaaaaaaaaaaaaaaaaaaaaaaaa

SEQ ID NO: 12403 - RNA, 4370 nt, Artificial Sequence
  SARS-CoV-2/Wuhan/WIV05/2019__EPI_ISL_402128 spike protein mRNA gc (1-1211)(I712C_T1077C) WhcAg construct
aggagagucccgcagucggcguccagcggcucugcuuguucgugugugugucguugcaggccuuauucaagcuuaccauguucguguuccugguccuccugccccuggugagcucccagugcgugaaccucaccacccgcacgcagcugccgcccgccuacaccaacagcuucacccggggcgucuacuaccccgacaagguguuccgcuccagcgugcugcacuccacccaggaccucuuccugcccuucuucagcaacgucacgugguuccacgccauccacguguccgggaccaacggcaccaagcgguucgacaacccggugcugcccuucaacgacggggucuacuucgcgagcaccgagaaguccaacaucauccgcggcuggaucuucgggacgacccucgacagcaagacccagucccugcugaucgugaacaacgccaccaacguggucaucaaggugugcgaguuccaguucugcaacgaccccuuccucggcguguacuaccacaagaacaacaagagcuggauggaguccgaguuccgggucuacagcuccgccaacaacugcacguucgaguacgugagccagcccuuccugauggaccuggagggcaagcaggggaacuucaagaaccuccgcgaguucguguucaagaacaucgacggcuacuucaagaucuacuccaagcacaccccgaucaaccugguccgggaccugccccagggguucagcgcccucgagccccugguggaccugcccaucggcaucaacaucacccgcuuccagacccuccuggcccugcaccgguccuaccucacgccgggggacagcagcuccggcuggaccgcgggcgccgccgccuacuacgugggguaccugcagccccgcaccuuccugcucaaguacaacgagaacggcaccaucacggacgcggucgacugcgcccuggacccccugagcgagaccaagugcacccucaaguccuucaccguggagaaggggaucuaccagacgagcaacuuccgggugcagcccaccgaguccaucguccgcuucccgaacaucaccaaccugugccccuucggcgagguguucaacgccacccgguucgccagcgucuacgccuggaaccgcaagcggaucuccaacugcguggcggacuacagcgugcuguacaacuccgccagcuucuccacguucaagugcuacggcgucagccccaccaagcucaacgaccugugcuucaccaacguguacgccgacuccuucgugauccgcggggacgagguccggcagaucgcccccggccagaccgggaagaucgccgacuacaacuacaagcugccggacgacuucacgggcugcgugaucgcguggaacagcaacaaccucgacuccaaggucgggggcaacuacaacuaccuguaccgccuguuccgcaagagcaaccucaagcccuucgagcgggacaucuccaccgagaucuaccaggccggcagcacccccugcaacgggguggagggcuucaacugcuacuucccccugcaguccuacggguuccagccgaccaacggcgugggguaccagcccuaccggguggucgugcugagcuucgagcuccugcacgcccccgccacggugugcggccccaagaaguccaccaaccuggucaagaacaagugcgugaacuucaacuucaacggccucaccgggaccggcgugcugaccgagagcaacaagaaguuccugccguuccagcaguucgggcgcgacaucgccgacacgaccgacgcgguccgcgacccccagacccuggagauccucgacaucacccccugcagcuucggcgggguguccgugaucacgccgggcaccaacaccagcaaccaggucgccgugcuguaccaggacgugaacugcaccgagguccccguggccauccacgccgaccagcugacgcccaccuggcggguguacuccaccggcagcaacgucuuccagacccgcgccgggugccucaucggcgcggagcacgugaacaacuccuacgagugcgacauccccaucggggccggcaucugcgccagcuaccagacgcagaccaacuccccgcggcgcgcccggagcguggcgucccagagcaucaucgccuacaccaugucccugggcgccgagaacagcgucgccuacuccaacaacagcugcgccauccccaccaacuucacgaucuccgugaccaccgagauccugcccgugagcaugaccaagacgagcgucgacugcaccauguacaucugcggggacuccaccgagugcagcaaccuccugcugcaguacggcuccuucugcacccagcucaaccgcgcgcugacggggaucgccguggagcaggacaagaacacccaggagguguucgcccaggucaagcagaucuacaagacgcccccgaucaaggacuucggcggguucaacuucagccagauccugcccgaccccuccaagcccagcaagcgguccuucaucgaggaccuccuguucaacaaggugacccuggccgacgccggcuucaucaagcaguacggcgacugccucggggacaucgcggcccgcgaccugaucugcgcccagaaguucaacggccugaccgugcucccgccccugcugaccgacgagaugaucgcccaguacaccagcgcccuccuggcggggaccaucacguccggcuggaccuucggggccggcgccgcccugcagauccccuucgcgaugcagauggccuaccgguucaacggcaucggggucacccagaacgugcucuacgagaaccagaagcugaucgccaaccaguucaacagcgccaucggcaagauccaggacucccugagcuccaccgccagcgcgcucgggaagcugcaggacguggucaaccagaacgcccaggcccugaacacgcucgugaagcagcuguccagcaacuucggcgccaucuccagcgugcugaacgacauccucucccgccuggacaaggucgaggccgaggugcagaucgaccggcugaucaccgggcgccuccagagccugcagaccuacgugacccagcagcugauccgggcggccgagauccgcgccagcgccaaccucgccgcgaccaagauguccgagugcguccugggccagagcaagcggguggacuucugcggcaagggguaccaccugauguccuucccccagagcgccccgcacggcguggucuuccuccacgugacguacguccccgcccaggagaagaacuucaccugcgcccccgcgaucugccacgacgggaaggcccacuucccccgcgagggcguguucguguccaacgggacccacugguucgucacgcagcggaacuucuacgagccgcagaucaucaccaccgacaacaccuucgugagcggcaacugcgacguggucaucggcaucgugaacaacacgguguacgacccccugcagcccgagcuggacuccuucaaggaggagcucgacaaguacuucaagaaccacaccagccccgacgucgaccugggggacaucuccggcaucaacgccagcguggugaacauccagaaggagaucgaccgccugaacgaggucgccaagaaccucaacgagucccugaucgaccugcaggagcucgggaaguacgagcaguacaucaagggcgggggcgggagcgacaucgaccccuacaaggaguucggcagcuccuaccagcugcucaacuuccugccccuggacuucuuccccgaccucaacgcccugguggacaccgccaccgcgcuguacgaggaggagcucacggggcgcgagcacugcagcccccaccacaccgccauccggcaggcccuggucugcugggacgagcugaccaagcucaucgccuggauguccagcaacaucaccuccgagcagguccgcacgaucaucgugaaccacgucaacgacaccuggggccugaaggugcggcagagccugugguuccaccucuccugccugaccuucgggcagcacaccgugcaggaguuccuggucagcuucggcguguggauccgcacgcccgccccguaccggccgcccaacgcgccgauccucuccacccugccggagcacaccgugaucugcugaggacuagucccuguucccagagcccacuuuuuuuucuuuuuuugaaauaaaauagccugucuuucagaucucaaaggcucuuuucagagccaccaaaaaaaaaaaaaaaaaaaaaaaaaaaaaaaaaaaaaaaaaaaaaaaaaaaaaaaaaaaaaaaaaaaaaaaaaaaaaaaaaaaaaaaaaaaaaaaaaaaaa

SEQ ID NO: 12404 - RNA, 4370 nt, Artificial Sequence
  SARS-CoV-2/Wuhan/WIV05/2019__EPI_ISL_402128 spike protein mRNA gc (1-1211)(I714C_Y1110C) WhcAg construct
aggagagucccgcagucggcguccagcggcucugcuuguucgugugugugucguugcaggccuuauucaagcuuaccauguucguguuccugguccuccugccccuggugagcucccagugcgugaaccucaccacccgcacgcagcugccgcccgccuacaccaacagcuucacccggggcgucuacuaccccgacaagguguuccgcuccagcgugcugcacuccacccaggaccucuuccugcccuucuucagcaacgucacgugguuccacgccauccacguguccgggaccaacggcaccaagcgguucgacaacccggugcugcccuucaacgacggggucuacuucgcgagcaccgagaaguccaacaucauccgcggcuggaucuucgggacgacccucgacagcaagacccagucccugcugaucgugaacaacgccaccaacguggucaucaaggugugcgaguuccaguucugcaacgaccccuuccucggcguguacuaccacaagaacaacaagagcuggauggaguccgaguuccgggucuacagcuccgccaacaacugcacguucgaguacgugagccagcccuuccugauggaccuggagggcaagcaggggaacuucaagaaccuccgcgaguucguguucaagaacaucgacggcuacuucaagaucuacuccaagcacaccccgaucaaccugguccgggaccugccccagggguucagcgcccucgagccccugguggaccugcccaucggcaucaacaucacccgcuuccagacccuccuggcccugcaccgguccuaccucacgccgggggacagcagcuccggcuggaccgcgggcgccgccgccuacuacgugggguaccugcagccccgcaccuuccugcucaaguacaacgagaacggcaccaucacggacgcggucgacugcgcccuggacccccugagcgagaccaagugcacccucaaguccuucaccguggagaaggggaucuaccagacgagcaacuuccgggugcagcccaccgaguccaucguccgcuucccgaacaucaccaaccugugccccuucggcgagguguucaacgccacccgguucgccagcgucuacgccuggaaccgcaagcggaucuccaacugcguggcggacuacagcgugcuguacaacuccgccagcuucuccacguucaagugcuacggcgucagccccaccaagcucaacgaccugugcuucaccaacguguacgccgacuccuucgugauccgcggggacgagguccggcagaucgcccccggccagaccgggaagaucgccgacuacaacuacaagcugccggacgacuucacgggcugcgugaucgcguggaacagcaacaaccucgacuccaaggucgggggcaacuacaacuaccuguaccgccuguuccgcaagagcaaccucaagcccuucgagcgggacaucuccaccgagaucuaccaggccggcagcacccccugcaacgggguggagggcuucaacugcuacuucccccugcaguccuacggguuccagccgaccaacggcgugggguaccagcccuaccggguggucgugcugagcuucgagcuccugcacgcccccgccacggugugcggccccaagaaguccaccaaccuggucaagaacaagugcgugaacuucaacuucaacggccucaccgggaccggcgugcugaccgagagcaacaagaaguuccugccguuccagcaguucgggcgcgacaucgccgacacgaccgacgcgguccgcgacccccagacccuggagauccucgacaucacccccugcagcuucggcgggguguccgugaucacgccgggcaccaacaccagcaaccaggucgccgugcuguaccaggacgugaacugcaccgagguccccguggccauccacgccgaccagcugacgcccaccuggcggguguacuccaccggcagcaacgucuuccagacccgcgccgggugccucaucggcgcggagcacgugaacaacuccuacgagugcgacauccccaucggggccggcaucugcgccagcuaccagacgcagaccaacuccccgcggcgcgcccggagcguggcgucccagagcaucaucgccuacaccaugucccugggcgccgagaacagcgucgccuacuccaacaacagcaucgccugccccaccaacuucacgaucuccgugaccaccgagauccugcccgugagcaugaccaagacgagcgucgacugcaccauguacaucugcggggacuccaccgagugcagcaaccuccugcugcaguacggcuccuucugcacccagcucaaccgcgcgcugacggggaucgccguggagcaggacaagaacacccaggagguguucgcccaggucaagcagaucuacaagacgcccccgaucaaggacuucggcggguucaacuucagccagauccugcccgaccccuccaagcccagcaagcgguccuucaucgaggaccuccuguucaacaaggugacccuggccgacgccggcuucaucaagcaguacggcgacugccucggggacaucgcggcccgcgaccugaucugcgcccagaaguucaacggccugaccgugcucccgccccugcugaccgacgagaugaucgcccaguacaccagcgcccuccuggcggggaccaucacguccggcuggaccuucggggccggcgccgcccugcagauccccuucgcgaugcagauggccuaccgguucaacggcaucggggucacccagaacgugcucuacgagaaccagaagcugaucgccaaccaguucaacagcgccaucggcaagauccaggacucccugagcuccaccgccagcgcgcucgggaagcugcaggacguggucaaccagaacgcccaggcccugaacacgcucgugaagcagcuguccagcaacuucggcgccaucuccagcgugcugaacgacauccucucccgccuggacaaggucgaggccgaggugcagaucgaccggcugaucaccgggcgccuccagagccugcagaccuacgugacccagcagcugauccgggcggccgagauccgcgccagcgccaaccucgccgcgaccaagauguccgagugcguccugggccagagcaagcggguggacuucugcggcaagggguaccaccugauguccuucccccagagcgccccgcacggcguggucuuccuccacgugacguacguccccgcccaggagaagaacuucaccaccgcccccgcgaucugccacgacgggaaggcccacuucccccgcgagggcguguucguguccaacgggacccacugguucgucacgcagcggaacuucugcgagccgcagaucaucaccaccgacaacaccuucgugagcggcaacugcgacguggucaucggcaucgugaacaacacgguguacgacccccugcagcccgagcuggacuccuucaaggaggagcucgacaaguacuucaagaaccacaccagccccgacgucgaccugggggacaucuccggcaucaacgccagcguggugaacauccagaaggagaucgaccgccugaacgaggucgccaagaaccucaacgagucccugaucgaccugcaggagcucgggaaguacgagcaguacaucaagggcgggggcgggagcgacaucgaccccuacaaggaguucggcagcuccuaccagcugcucaacuuccugccccuggacuucuuccccgaccucaacgcccugguggacaccgccaccgcgcuguacgaggaggagcucacggggcgcgagcacugcagcccccaccacaccgccauccggcaggcccuggucugcugggacgagcugaccaagcucaucgccuggauguccagcaacaucaccuccgagcagguccgcacgaucaucgugaaccacgucaacgacaccuggggccugaaggugcggcagagccugugguuccaccucuccugccugaccuucgggcagcacaccgugcaggaguuccuggucagcuucggcguguggauccgcacgcccgccccguaccggccgcccaacgcgccgauccucuccacccugccggagcacaccgugaucugcugaggacuagucccuguucccagagcccacuuuuuuuucuuuuuuugaaauaaaauagccugucuuucagaucucaaaggcucuuuucagagccaccaaaaaaaaaaaaaaaaaaaaaaaaaaaaaaaaaaaaaaaaaaaaaaaaaaaaaaaaaaaaaaaaaaaaaaaaaaaaaaaaaaaaaaaaaaaaaaaaaaaaa

SEQ ID NO: 12405 - RNA, 4370 nt, Artificial Sequence
  SARS-CoV-2/Wuhan/WIV05/2019__EPI_ISL_402128 spike protein mRNA gc (1-1211)(P715C_P1069C) WhcAg construct
aggagagucccgcagucggcguccagcggcucugcuuguucgugugugugucguugcaggccuuauucaagcuuaccauguucguguuccugguccuccugccccuggugagcucccagugcgugaaccucaccacccgcacgcagcugccgcccgccuacaccaacagcuucacccggggcgucuacuaccccgacaagguguuccgcuccagcgugcugcacuccacccaggaccucuuccugcccuucuucagcaacgucacgugguuccacgccauccacguguccgggaccaacggcaccaagcgguucgacaacccggugcugcccuucaacgacggggucuacuucgcgagcaccgagaaguccaacaucauccgcggcuggaucuucgggacgacccucgacagcaagacccagucccugcugaucgugaacaacgccaccaacguggucaucaaggugugcgaguuccaguucugcaacgaccccuuccucggcguguacuaccacaagaacaacaagagcuggauggaguccgaguuccgggucuacagcuccgccaacaacugcacguucgaguacgugagccagcccuuccugauggaccuggagggcaagcaggggaacuucaagaaccuccgcgaguucguguucaagaacaucgacggcuacuucaagaucuacuccaagcacaccccgaucaaccugguccgggaccugccccagggguucagcgcccucgagccccugguggaccugcccaucggcaucaacaucacccgcuuccagacccuccuggcccugcaccgguccuaccucacgccgggggacagcagcuccggcuggaccgcgggcgccgccgccuacuacgugggguaccugcagccccgcaccuuccugcucaaguacaacgagaacggcaccaucacggacgcggucgacugcgcccuggacccccugagcgagaccaagugcacccucaaguccuucaccguggagaaggggaucuaccagacgagcaacuuccgggugcagcccaccgaguccaucguccgcuucccgaacaucaccaaccugugccccuucggcgagguguucaacgccacccgguucgccagcgucuacgccuggaaccgcaagcggaucuccaacugcguggcggacuacagcgugcuguacaacuccgccagcuucuccacguucaagugcuacggcgucagccccaccaagcucaacgaccugugcuucaccaacguguacgccgacuccuucgugauccgcggggacgagguccggcagaucgcccccggccagaccgggaagaucgccgacuacaacuacaagcugccggacgacuucacgggcugcgugaucgcguggaacagcaacaaccucgacuccaaggucgggggcaacuacaacuaccuguaccgccuguuccgcaagagcaaccucaagcccuucgagcgggacaucuccaccgagaucuaccaggccggcagcacccccugcaacgggguggagggcuucaacugcuacuucccccugcaguccuacggguuccagccgaccaacggcgugggguaccagcccuaccggguggucgugcugagcuucgagcuccugcacgcccccgccacggugugcggccccaagaaguccaccaaccuggucaagaacaagugcgugaacuucaacuucaacggccucaccgggaccggcgugcugaccgagagcaacaagaaguuccugccguuccagcaguucgggcgcgacaucgccgacacgaccgacgcgguccgcgacccccagacccuggagauccucgacaucacccccugcagcuucggcgggguguccgugaucacgccgggcaccaacaccagcaaccaggucgccgugcuguaccaggacgugaacugcaccgagguccccguggccauccacgccgaccagcugacgcccaccuggcggguguacuccaccggcagcaacgucuuccagacccgcgccgggugccucaucggcgcggagcacgugaacaacuccuacgagugcgacauccccaucggggccggcaucugcgccagcuaccagacgcagaccaacuccccgcggcgcgcccggagcguggcgucccagagcaucaucgccuacaccaugucccugggcgccgagaacagcgucgccuacuccaacaacagcaucgccaucugcaccaacuucacgaucuccgugaccaccgagauccugcccgugagcaugaccaagacgagcgucgacugcaccauguacaucugcggggacuccaccgagugcagcaaccuccugcugcaguacggcuccuucugcacccagcucaaccgcgcgcugacggggaucgccguggagcaggacaagaacacccaggagguguucgcccaggucaagcagaucuacaagacgcccccgaucaaggacuucggcggguucaacuucagccagauccugcccgaccccuccaagcccagcaagcgguccuucaucgaggaccuccuguucaacaaggugacccuggccgacgccggcuucaucaagcaguacggcgacugccucggggacaucgcggcccgcgaccugaucugcgcccagaaguucaacggccugaccgugcucccgccccugcugaccgacgagaugaucgcccaguacaccagcgcccuccuggcggggaccaucacguccggcuggaccuucggggccggcgccgcccugcagauccccuucgcgaugcagauggccuaccgguucaacggcaucggggucacccagaacgugcucuacgagaaccagaagcugaucgccaaccaguucaacagcgccaucggcaagauccaggacucccugagcuccaccgccagcgcgcucgggaagcugcaggacguggucaaccagaacgcccaggcccugaacacgcucgugaagcagcuguccagcaacuucggcgccaucuccagcgugcugaacgacauccucucccgccuggacaaggucgaggccgaggugcagaucgaccggcugaucaccgggcgccuccagagccugcagaccuacgugacccagcagcugauccgggcggccgagauccgcgccagcgccaaccucgccgcgaccaagauguccgagugcguccugggccagagcaagcggguggacuucugcggcaagggguaccaccugauguccuucccccagagcgccccgcacggcguggucuuccuccacgugacguacgucugcgcccaggagaagaacuucaccaccgcccccgcgaucugccacgacgggaaggcccacuucccccgcgagggcguguucguguccaacgggacccacugguucgucacgcagcggaacuucuacgagccgcagaucaucaccaccgacaacaccuucgugagcggcaacugcgacguggucaucggcaucgugaacaacacgguguacgacccccugcagcccgagcuggacuccuucaaggaggagcucgacaaguacuucaagaaccacaccagccccgacgucgaccugggggacaucuccggcaucaacgccagcguggugaacauccagaaggagaucgaccgccugaacgaggucgccaagaaccucaacgagucccugaucgaccugcaggagcucgggaaguacgagcaguacaucaagggcgggggcgggagcgacaucgaccccuacaaggaguucggcagcuccuaccagcugcucaacuuccugccccuggacuucuuccccgaccucaacgcccugguggacaccgccaccgcgcuguacgaggaggagcucacggggcgcgagcacugcagcccccaccacaccgccauccggcaggcccuggucugcugggacgagcugaccaagcucaucgccuggauguccagcaacaucaccuccgagcagguccgcacgaucaucgugaaccacgucaacgacaccuggggccugaaggugcggcagagccugugguuccaccucuccugccugaccuucgggcagcacaccgugcaggaguuccuggucagcuucggcguguggauccgcacgcccgccccguaccggccgcccaacgcgccgauccucuccacccugccggagcacaccgugaucugcugaggacuagucccuguucccagagcccacuuuuuuuucuuuuuuugaaauaaaauagccugucuuucagaucucaaaggcucuuuucagagccaccaaaaaaaaaaaaaaaaaaaaaaaaaaaaaaaaaaaaaaaaaaaaaaaaaaaaaaaaaaaaaaaaaaaaaaaaaaaaaaaaaaaaaaaaaaaaaaaaaaaaa

SEQ ID NO: 12406 - RNA, 4370 nt, Artificial Sequence
  SARS-CoV-2/Wuhan/WIV05/2019__EPI_ISL_402128 spike protein mRNA gc (1-1211)(G889C_L1034C) WhcAg construct
aggagagucccgcagucggcguccagcggcucugcuuguucgugugugugucguugcaggccuuauucaagcuuaccauguucguguuccugguccuccugccccuggugagcucccagugcgugaaccucaccacccgcacgcagcugccgcccgccuacaccaacagcuucacccggggcgucuacuaccccgacaagguguuccgcuccagcgugcugcacuccacccaggaccucuuccugcccuucuucagcaacgucacgugguuccacgccauccacguguccgggaccaacggcaccaagcgguucgacaacccggugcugcccuucaacgacggggucuacuucgcgagcaccgagaaguccaacaucauccgcggcuggaucuucgggacgacccucgacagcaagacccagucccugcugaucgugaacaacgccaccaacguggucaucaaggugugcgaguuccaguucugcaacgaccccuuccucggcguguacuaccacaagaacaacaagagcuggauggaguccgaguuccgggucuacagcuccgccaacaacugcacguucgaguacgugagccagcccuuccugauggaccuggagggcaagcaggggaacuucaagaaccuccgcgaguucguguucaagaacaucgacggcuacuucaagaucuacuccaagcacaccccgaucaaccugguccgggaccugccccagggguucagcgcccucgagccccugguggaccugcccaucggcaucaacaucacccgcuuccagacccuccuggcccugcaccgguccuaccucacgccgggggacagcagcuccggcuggaccgcgggcgccgccgccuacuacgugggguaccugcagccccgcaccuuccugcucaaguacaacgagaacggcaccaucacggacgcggucgacugcgcccuggacccccugagcgagaccaagugcacccucaaguccuucaccguggagaaggggaucuaccagacgagcaacuuccgggugcagcccaccgaguccaucguccgcuucccgaacaucaccaaccugugccccuucggcgagguguucaacgccacccgguucgccagcgucuacgccuggaaccgcaagcggaucuccaacugcguggcggacuacagcgugcuguacaacuccgccagcuucuccacguucaagugcuacggcgucagccccaccaagcucaacgaccugugcuucaccaacguguacgccgacuccuucgugauccgcggggacgagguccggcagaucgcccccggccagaccgggaagaucgccgacuacaacuacaagcugccggacgacuucacgggcugcgugaucgcguggaacagcaacaaccucgacuccaaggucgggggcaacuacaacuaccuguaccgccuguuccgcaagagcaaccucaagcccuucgagcgggacaucuccaccgagaucuaccaggccggcagcacccccugcaacgggguggagggcuucaacugcuacuucccccugcaguccuacggguuccagccgaccaacggcgugggguaccagcccuaccggguggucgugcugagcuucgagcuccugcacgcccccgccacggugugcggccccaagaaguccaccaaccuggucaagaacaagugcgugaacuucaacuucaacggccucaccgggaccggcgugcugaccgagagcaacaagaaguuccugccguuccagcaguucgggcgcgacaucgccgacacgaccgacgcgguccgcgacccccagacccuggagauccucgacaucacccccugcagcuucggcgggguguccgugaucacgccgggcaccaacaccagcaaccaggucgccgugcuguaccaggacgugaacugcaccgagguccccguggccauccacgccgaccagcugacgcccaccuggcggguguacuccaccggcagcaacgucuuccagacccgcgccgggugccucaucggcgcggagcacgugaacaacuccuacgagugcgacauccccaucggggccggcaucugcgccagcuaccagacgcagaccaacuccccgcggcgcgcccggagcguggcgucccagagcaucaucgccuacaccaugucccugggcgccgagaacagcgucgccuacuccaacaacagcaucgccauccccaccaacuucacgaucuccgugaccaccgagauccugcccgugagcaugaccaagacgagcgucgacugcaccauguacaucugcggggacuccaccgagugcagcaaccuccugcugcaguacggcuccuucugcacccagcucaaccgcgcgcugacggggaucgccguggagcaggacaagaacacccaggagguguucgcccaggucaagcagaucuacaagacgcccccgaucaaggacuucggcggguucaacuucagccagauccugcccgaccccuccaagcccagcaagcgguccuucaucgaggaccuccuguucaacaaggugacccuggccgacgccggcuucaucaagcaguacggcgacugccucggggacaucgcggcccgcgaccugaucugcgcccagaaguucaacggccugaccgugcucccgccccugcugaccgacgagaugaucgcccaguacaccagcgcccuccuggcggggaccaucacguccggcuggaccuucugcgccggcgccgcccugcagauccccuucgcgaugcagauggccuaccgguucaacggcaucggggucacccagaacgugcucuacgagaaccagaagcugaucgccaaccaguucaacagcgccaucggcaagauccaggacucccugagcuccaccgccagcgcgcucgggaagcugcaggacguggucaaccagaacgcccaggcccugaacacgcucgugaagcagcuguccagcaacuucggcgccaucuccagcgugcugaacgacauccucucccgccuggacaaggucgaggccgaggugcagaucgaccggcugaucaccgggcgccuccagagccugcagaccuacgugacccagcagcugauccgggcggccgagauccgcgccagcgccaaccucgccgcgaccaagauguccgagugcgucugcggccagagcaagcggguggacuucugcggcaagggguaccaccugauguccuucccccagagcgccccgcacggcguggucuuccuccacgugacguacguccccgcccaggagaagaacuucaccaccgcccccgcgaucugccacgacgggaaggcccacuucccccgcgagggcguguucguguccaacgggacccacugguucgucacgcagcggaacuucuacgagccgcagaucaucaccaccgacaacaccuucgugagcggcaacugcgacguggucaucggcaucgugaacaacacgguguacgacccccugcagcccgagcuggacuccuucaaggaggagcucgacaaguacuucaagaaccacaccagccccgacgucgaccugggggacaucuccggcaucaacgccagcguggugaacauccagaaggagaucgaccgccugaacgaggucgccaagaaccucaacgagucccugaucgaccugcaggagcucgggaaguacgagcaguacaucaagggcgggggcgggagcgacaucgaccccuacaaggaguucggcagcuccuaccagcugcucaacuuccugccccuggacuucuuccccgaccucaacgcccugguggacaccgccaccgcgcuguacgaggaggagcucacggggcgcgagcacugcagcccccaccacaccgccauccggcaggcccuggucugcugggacgagcugaccaagcucaucgccuggauguccagcaacaucaccuccgagcagguccgcacgaucaucgugaaccacgucaacgacaccuggggccugaaggugcggcagagccugugguuccaccucuccugccugaccuucgggcagcacaccgugcaggaguuccuggucagcuucggcguguggauccgcacgcccgccccguaccggccgcccaacgcgccgauccucuccacccugccggagcacaccgugaucugcugaggacuagucccuguucccagagcccacuuuuuuuucuuuuuuugaaauaaaauagccugucuuucagaucucaaaggcucuuuucagagccaccaaaaaaaaaaaaaaaaaaaaaaaaaaaaaaaaaaaaaaaaaaaaaaaaaaaaaaaaaaaaaaaaaaaaaaaaaaaaaaaaaaaaaaaaaaaaaaaaaaaaa

SEQ ID NO: 12407 - RNA, 4370 nt, Artificial Sequence
  SARS-CoV-2/Wuhan/WIV05/2019__EPI_ISL_402128 spike protein mRNA gc (1-1211)(I909C_Y1047C) WhcAg construct
aggagagucccgcagucggcguccagcggcucugcuuguucgugugugugucguugcaggccuuauucaagcuuaccauguucguguuccugguccuccugccccuggugagcucccagugcgugaaccucaccacccgcacgcagcugccgcccgccuacaccaacagcuucacccggggcgucuacuaccccgacaagguguuccgcuccagcgugcugcacuccacccaggaccucuuccugcccuucuucagcaacgucacgugguuccacgccauccacguguccgggaccaacggcaccaagcgguucgacaacccggugcugcccuucaacgacggggucuacuucgcgagcaccgagaaguccaacaucauccgcggcuggaucuucgggacgacccucgacagcaagacccagucccugcugaucgugaacaacgccaccaacguggucaucaaggugugcgaguuccaguucugcaacgaccccuuccucggcguguacuaccacaagaacaacaagagcuggauggaguccgaguuccgggucuacagcuccgccaacaacugcacguucgaguacgugagccagcccuuccugauggaccuggagggcaagcaggggaacuucaagaaccuccgcgaguucguguucaagaacaucgacggcuacuucaagaucuacuccaagcacaccccgaucaaccugguccgggaccugccccagggguucagcgcccucgagccccugguggaccugcccaucggcaucaacaucacccgcuuccagacccuccuggcccugcaccgguccuaccucacgccgggggacagcagcuccggcuggaccgcgggcgccgccgccuacuacgugggguaccugcagccccgcaccuuccugcucaaguacaacgagaacggcaccaucacggacgcggucgacugcgcccuggacccccugagcgagaccaagugcacccucaaguccuucaccguggagaaggggaucuaccagacgagcaacuuccgggugcagcccaccgaguccaucguccgcuucccgaacaucaccaaccugugccccuucggcgagguguucaacgccacccgguucgccagcgucuacgccuggaaccgcaagcggaucuccaacugcguggcggacuacagcgugcuguacaacuccgccagcuucuccacguucaagugcuacggcgucagccccaccaagcucaacgaccugugcuucaccaacguguacgccgacuccuucgugauccgcggggacgagguccggcagaucgcccccggccagaccgggaagaucgccgacuacaacuacaagcugccggacgacuucacgggcugcgugaucgcguggaacagcaacaaccucgacuccaaggucgggggcaacuacaacuaccuguaccgccuguuccgcaagagcaaccucaagcccuucgagcgggacaucuccaccgagaucuaccaggccggcagcacccccugcaacgggguggagggcuucaacugcuacuucccccugcaguccuacggguuccagccgaccaacggcgugggguaccagcccuaccggguggucgugcugagcuucgagcuccugcacgcccccgccacggugugcggccccaagaaguccaccaaccuggucaagaacaagugcgugaacuucaacuucaacggccucaccgggaccggcgugcugaccgagagcaacaagaaguuccugccguuccagcaguucgggcgcgacaucgccgacacgaccgacgcgguccgcgacccccagacccuggagauccucgacaucacccccugcagcuucggcgggguguccgugaucacgccgggcaccaacaccagcaaccaggucgccgugcuguaccaggacgugaacugcaccgagguccccguggccauccacgccgaccagcugacgcccaccuggcggguguacuccaccggcagcaacgucuuccagacccgcgccgggugccucaucggcgcggagcacgugaacaacuccuacgagugcgacauccccaucggggccggcaucugcgccagcuaccagacgcagaccaacuccccgcggcgcgcccggagcguggcgucccagagcaucaucgccuacaccaugucccugggcgccgagaacagcgucgccuacuccaacaacagcaucgccauccccaccaacuucacgaucuccgugaccaccgagauccugcccgugagcaugaccaagacgagcgucgacugcaccauguacaucugcggggacuccaccgagugcagcaaccuccugcugcaguacggcuccuucugcacccagcucaaccgcgcgcugacggggaucgccguggagcaggacaagaacacccaggagguguucgcccaggucaagcagaucuacaagacgcccccgaucaaggacuucggcggguucaacuucagccagauccugcccgaccccuccaagcccagcaagcgguccuucaucgaggaccuccuguucaacaaggugacccuggccgacgccggcuucaucaagcaguacggcgacugccucggggacaucgcggcccgcgaccugaucugcgcccagaaguucaacggccugaccgugcucccgccccugcugaccgacgagaugaucgcccaguacaccagcgcccuccuggcggggaccaucacguccggcuggaccuucggggccggcgccgcccugcagauccccuucgcgaugcagauggccuaccgguucaacggcugcggggucacccagaacgugcucuacgagaaccagaagcugaucgccaaccaguucaacagcgccaucggcaagauccaggacucccugagcuccaccgccagcgcgcucgggaagcugcaggacguggucaaccagaacgcccaggcccugaacacgcucgugaagcagcuguccagcaacuucggcgccaucuccagcgugcugaacgacauccucucccgccuggacaaggucgaggccgaggugcagaucgaccggcugaucaccgggcgccuccagagccugcagaccuacgugacccagcagcugauccgggcggccgagauccgcgccagcgccaaccucgccgcgaccaagauguccgagugcguccugggccagagcaagcggguggacuucugcggcaaggggugccaccugauguccuucccccagagcgccccgcacggcguggucuuccuccacgugacguacguccccgcccaggagaagaacuucaccaccgcccccgcgaucugccacgacgggaaggcccacuucccccgcgagggcguguucguguccaacgggacccacugguucgucacgcagcggaacuucuacgagccgcagaucaucaccaccgacaacaccuucgugagcggcaacugcgacguggucaucggcaucgugaacaacacgguguacgacccccugcagcccgagcuggacuccuucaaggaggagcucgacaaguacuucaagaaccacaccagccccgacgucgaccugggggacaucuccggcaucaacgccagcguggugaacauccagaaggagaucgaccgccugaacgaggucgccaagaaccucaacgagucccugaucgaccugcaggagcucgggaaguacgagcaguacaucaagggcgggggcgggagcgacaucgaccccuacaaggaguucggcagcuccuaccagcugcucaacuuccugccccuggacuucuuccccgaccucaacgcccugguggacaccgccaccgcgcuguacgaggaggagcucacggggcgcgagcacugcagcccccaccacaccgccauccggcaggcccuggucugcugggacgagcugaccaagcucaucgccuggauguccagcaacaucaccuccgagcagguccgcacgaucaucgugaaccacgucaacgacaccuggggccugaaggugcggcagagccugugguuccaccucuccugccugaccuucgggcagcacaccgugcaggaguuccuggucagcuucggcguguggauccgcacgcccgccccguaccggccgcccaacgcgccgauccucuccacccugccggagcacaccgugaucugcugaggacuagucccuguucccagagcccacuuuuuuuucuuuuuuugaaauaaaauagccugucuuucagaucucaaaggcucuuuucagagccaccaaaaaaaaaaaaaaaaaaaaaaaaaaaaaaaaaaaaaaaaaaaaaaaaaaaaaaaaaaaaaaaaaaaaaaaaaaaaaaaaaaaaaaaaaaaaaaaaaaaaa

SEQ ID NO: 12408 - RNA, 4370 nt, Artificial Sequence
  SARS-CoV-2/Wuhan/WIV05/2019__EPI_ISL_402128 spike protein mRNA gc (1-1211)(Q965C_S1003C) WhcAg construct
aggagagucccgcagucggcguccagcggcucugcuuguucgugugugugucguugcaggccuuauucaagcuuaccauguucguguuccugguccuccugccccuggugagcucccagugcgugaaccucaccacccgcacgcagcugccgcccgccuacaccaacagcuucacccggggcgucuacuaccccgacaagguguuccgcuccagcgugcugcacuccacccaggaccucuuccugcccuucuucagcaacgucacgugguuccacgccauccacguguccgggaccaacggcaccaagcgguucgacaacccggugcugcccuucaacgacggggucuacuucgcgagcaccgagaaguccaacaucauccgcggcuggaucuucgggacgacccucgacagcaagacccagucccugcugaucgugaacaacgccaccaacguggucaucaaggugugcgaguuccaguucugcaacgaccccuuccucggcguguacuaccacaagaacaacaagagcuggauggaguccgaguuccgggucuacagcuccgccaacaacugcacguucgaguacgugagccagcccuuccugauggaccuggagggcaagcaggggaacuucaagaaccuccgcgaguucguguucaagaacaucgacggcuacuucaagaucuacuccaagcacaccccgaucaaccugguccgggaccugccccagggguucagcgcccucgagccccugguggaccugcccaucggcaucaacaucacccgcuuccagacccuccuggcccugcaccgguccuaccucacgccgggggacagcagcuccggcuggaccgcgggcgccgccgccuacuacgugggguaccugcagccccgcaccuuccugcucaaguacaacgagaacggcaccaucacggacgcggucgacugcgcccuggacccccugagcgagaccaagugcacccucaaguccuucaccguggagaaggggaucuaccagacgagcaacuuccgggugcagcccaccgaguccaucguccgcuucccgaacaucaccaaccugugccccuucggcgagguguucaacgccacccgguucgccagcgucuacgccuggaaccgcaagcggaucuccaacugcguggcggacuacagcgugcuguacaacuccgccagcuucuccacguucaagugcuacggcgucagccccaccaagcucaacgaccugugcuucaccaacguguacgccgacuccuucgugauccgcggggacgagguccggcagaucgcccccggccagaccgggaagaucgccgacuacaacuacaagcugccggacgacuucacgggcugcgugaucgcguggaacagcaacaaccucgacuccaaggucgggggcaacuacaacuaccuguaccgccuguuccgcaagagcaaccucaagcccuucgagcgggacaucuccaccgagaucuaccaggccggcagcacccccugcaacgggguggagggcuucaacugcuacuucccccugcaguccuacggguuccagccgaccaacggcgugggguaccagcccuaccggguggucgugcugagcuucgagcuccugcacgcccccgccacggugugcggccccaagaaguccaccaaccuggucaagaacaagugcgugaacuucaacuucaacggccucaccgggaccggcgugcugaccgagagcaacaagaaguuccugccguuccagcaguucgggcgcgacaucgccgacacgaccgacgcgguccgcgacccccagacccuggagauccucgacaucacccccugcagcuucggcgggguguccgugaucacgccgggcaccaacaccagcaaccaggucgccgugcuguaccaggacgugaacugcaccgagguccccguggccauccacgccgaccagcugacgcccaccuggcggguguacuccaccggcagcaacgucuuccagacccgcgccgggugccucaucggcgcggagcacgugaacaacuccuacgagugcgacauccccaucggggccggcaucugcgccagcuaccagacgcagaccaacuccccgcggcgcgcccggagcguggcgucccagagcaucaucgccuacaccaugucccugggcgccgagaacagcgucgccuacuccaacaacagcaucgccauccccaccaacuucacgaucuccgugaccaccgagauccugcccgugagcaugaccaagacgagcgucgacugcaccauguacaucugcggggacuccaccgagugcagcaaccuccugcugcaguacggcuccuucugcacccagcucaaccgcgcgcugacggggaucgccguggagcaggacaagaacacccaggagguguucgcccaggucaagcagaucuacaagacgcccccgaucaaggacuucggcggguucaacuucagccagauccugcccgaccccuccaagcccagcaagcgguccuucaucgaggaccuccuguucaacaaggugacccuggccgacgccggcuucaucaagcaguacggcgacugccucggggacaucgcggcccgcgaccugaucugcgcccagaaguucaacggccugaccgugcucccgccccugcugaccgacgagaugaucgcccaguacaccagcgcccuccuggcggggaccaucacguccggcuggaccuucggggccggcgccgcccugcagauccccuucgcgaugcagauggccuaccgguucaacggcaucggggucacccagaacgugcucuacgagaaccagaagcugaucgccaaccaguucaacagcgccaucggcaagauccaggacucccugagcuccaccgccagcgcgcucgggaagcugcaggacguggucaaccagaacgcccaggcccugaacacgcucgugaagugccuguccagcaacuucggcgccaucuccagcgugcugaacgacauccucucccgccuggacaaggucgaggccgaggugcagaucgaccggcugaucaccgggcgccuccagugccugcagaccuacgugacccagcagcugauccgggcggccgagauccgcgccagcgccaaccucgccgcgaccaagauguccgagugcguccugggccagagcaagcggguggacuucugcggcaagggguaccaccugauguccuucccccagagcgccccgcacggcguggucuuccuccacgugacguacguccccgcccaggagaagaacuucaccaccgcccccgcgaucugccacgacgggaaggcccacuucccccgcgagggcguguucguguccaacgggacccacugguucgucacgcagcggaacuucuacgagccgcagaucaucaccaccgacaacaccuucgugagcggcaacugcgacguggucaucggcaucgugaacaacacgguguacgacccccugcagcccgagcuggacuccuucaaggaggagcucgacaaguacuucaagaaccacaccagccccgacgucgaccugggggacaucuccggcaucaacgccagcguggugaacauccagaaggagaucgaccgccugaacgaggucgccaagaaccucaacgagucccugaucgaccugcaggagcucgggaaguacgagcaguacaucaagggcgggggcgggagcgacaucgaccccuacaaggaguucggcagcuccuaccagcugcucaacuuccugccccuggacuucuuccccgaccucaacgcccugguggacaccgccaccgcgcuguacgaggaggagcucacggggcgcgagcacugcagcccccaccacaccgccauccggcaggcccuggucugcugggacgagcugaccaagcucaucgccuggauguccagcaacaucaccuccgagcagguccgcacgaucaucgugaaccacgucaacgacaccuggggccugaaggugcggcagagccugugguuccaccucuccugccugaccuucgggcagcacaccgugcaggaguuccuggucagcuucggcguguggauccgcacgcccgccccguaccggccgcccaacgcgccgauccucuccacccugccggagcacaccgugaucugcugaggacuagucccuguucccagagcccacuuuuuuuucuuuuuuugaaauaaaauagccugucuuucagaucucaaaggcucuuuucagagccaccaaaaaaaaaaaaaaaaaaaaaaaaaaaaaaaaaaaaaaaaaaaaaaaaaaaaaaaaaaaaaaaaaaaaaaaaaaaaaaaaaaaaaaaaaaaaaaaaaaaaa

SEQ ID NO: 12409 - RNA, 4370 nt, Artificial Sequence
  SARS-CoV-2/Wuhan/WIV05/2019__EPI_ISL_402128 spike protein mRNA gc (1-1211)(F970C_G999C) WhcAg construct
aggagagucccgcagucggcguccagcggcucugcuuguucgugugugugucguugcaggccuuauucaagcuuaccauguucguguuccugguccuccugccccuggugagcucccagugcgugaaccucaccacccgcacgcagcugccgcccgccuacaccaacagcuucacccggggcgucuacuaccccgacaagguguuccgcuccagcgugcugcacuccacccaggaccucuuccugcccuucuucagcaacgucacgugguuccacgccauccacguguccgggaccaacggcaccaagcgguucgacaacccggugcugcccuucaacgacggggucuacuucgcgagcaccgagaaguccaacaucauccgcggcuggaucuucgggacgacccucgacagcaagacccagucccugcugaucgugaacaacgccaccaacguggucaucaaggugugcgaguuccaguucugcaacgaccccuuccucggcguguacuaccacaagaacaacaagagcuggauggaguccgaguuccgggucuacagcuccgccaacaacugcacguucgaguacgugagccagcccuuccugauggaccuggagggcaagcaggggaacuucaagaaccuccgcgaguucguguucaagaacaucgacggcuacuucaagaucuacuccaagcacaccccgaucaaccugguccgggaccugccccagggguucagcgcccucgagccccugguggaccugcccaucggcaucaacaucacccgcuuccagacccuccuggcccugcaccgguccuaccucacgccgggggacagcagcuccggcuggaccgcgggcgccgccgccuacuacgugggguaccugcagccccgcaccuuccugcucaaguacaacgagaacggcaccaucacggacgcggucgacugcgcccuggacccccugagcgagaccaagugcacccucaaguccuucaccguggagaaggggaucuaccagacgagcaacuuccgggugcagcccaccgaguccaucguccgcuucccgaacaucaccaaccugugccccuucggcgagguguucaacgccacccgguucgccagcgucuacgccuggaaccgcaagcggaucuccaacugcguggcggacuacagcgugcuguacaacuccgccagcuucuccacguucaagugcuacggcgucagccccaccaagcucaacgaccugugcuucaccaacguguacgccgacuccuucgugauccgcggggacgagguccggcagaucgcccccggccagaccgggaagaucgccgacuacaacuacaagcugccggacgacuucacgggcugcgugaucgcguggaacagcaacaaccucgacuccaaggucgggggcaacuacaacuaccuguaccgccuguuccgcaagagcaaccucaagcccuucgagcgggacaucuccaccgagaucuaccaggccggcagcacccccugcaacgggguggagggcuucaacugcuacuucccccugcaguccuacggguuccagccgaccaacggcgugggguaccagcccuaccggguggucgugcugagcuucgagcuccugcacgcccccgccacggugugcggccccaagaaguccaccaaccuggucaagaacaagugcgugaacuucaacuucaacggccucaccgggaccggcgugcugaccgagagcaacaagaaguuccugccguuccagcaguucgggcgcgacaucgccgacacgaccgacgcgguccgcgacccccagacccuggagauccucgacaucacccccugcagcuucggcgggguguccgugaucacgccgggcaccaacaccagcaaccaggucgccgugcuguaccaggacgugaacugcaccgagguccccguggccauccacgccgaccagcugacgcccaccuggcggguguacuccaccggcagcaacgucuuccagacccgcgccgggugccucaucggcgcggagcacgugaacaacuccuacgagugcgacauccccaucggggccggcaucugcgccagcuaccagacgcagaccaacuccccgcggcgcgcccggagcguggcgucccagagcaucaucgccuacaccaugucccugggcgccgagaacagcgucgccuacuccaacaacagcaucgccauccccaccaacuucacgaucuccgugaccaccgagauccugcccgugagcaugaccaagacgagcgucgacugcaccauguacaucugcggggacuccaccgagugcagcaaccuccugcugcaguacggcuccuucugcacccagcucaaccgcgcgcugacggggaucgccguggagcaggacaagaacacccaggagguguucgcccaggucaagcagaucuacaagacgcccccgaucaaggacuucggcggguucaacuucagccagauccugcccgaccccuccaagcccagcaagcgguccuucaucgaggaccuccuguucaacaaggugacccuggccgacgccggcuucaucaagcaguacggcgacugccucggggacaucgcggcccgcgaccugaucugcgcccagaaguucaacggccugaccgugcucccgccccugcugaccgacgagaugaucgcccaguacaccagcgcccuccuggcggggaccaucacguccggcuggaccuucggggccggcgccgcccugcagauccccuucgcgaugcagauggccuaccgguucaacggcaucggggucacccagaacgugcucuacgagaaccagaagcugaucgccaaccaguucaacagcgccaucggcaagauccaggacucccugagcuccaccgccagcgcgcucgggaagcugcaggacguggucaaccagaacgcccaggcccugaacacgcucgugaagcagcuguccagcaacugcggcgccaucuccagcgugcugaacgacauccucucccgccuggacaaggucgaggccgaggugcagaucgaccggcugaucaccugucgccuccagagccugcagaccuacgugacccagcagcugauccgggcggccgagauccgcgccagcgccaaccucgccgcgaccaagauguccgagugcguccugggccagagcaagcggguggacuucugcggcaagggguaccaccugauguccuucccccagagcgccccgcacggcguggucuuccuccacgugacguacguccccgcccaggagaagaacuucaccaccgcccccgcgaucugccacgacgggaaggcccacuucccccgcgagggcguguucguguccaacgggacccacugguucgucacgcagcggaacuucuacgagccgcagaucaucaccaccgacaacaccuucgugagcggcaacugcgacguggucaucggcaucgugaacaacacgguguacgacccccugcagcccgagcuggacuccuucaaggaggagcucgacaaguacuucaagaaccacaccagccccgacgucgaccugggggacaucuccggcaucaacgccagcguggugaacauccagaaggagaucgaccgccugaacgaggucgccaagaaccucaacgagucccugaucgaccugcaggagcucgggaaguacgagcaguacaucaagggcgggggcgggagcgacaucgaccccuacaaggaguucggcagcuccuaccagcugcucaacuuccugccccuggacuucuuccccgaccucaacgcccugguggacaccgccaccgcgcuguacgaggaggagcucacggggcgcgagcacugcagcccccaccacaccgccauccggcaggcccuggucugcugggacgagcugaccaagcucaucgccuggauguccagcaacaucaccuccgagcagguccgcacgaucaucgugaaccacgucaacgacaccuggggccugaaggugcggcagagccugugguuccaccucuccugccugaccuucgggcagcacaccgugcaggaguuccuggucagcuucggcguguggauccgcacgcccgccccguaccggccgcccaacgcgccgauccucuccacccugccggagcacaccgugaucugcugaggacuagucccuguucccagagcccacuuuuuuuucuuuuuuugaaauaaaauagccugucuuucagaucucaaaggcucuuuucagagccaccaaaaaaaaaaaaaaaaaaaaaaaaaaaaaaaaaaaaaaaaaaaaaaaaaaaaaaaaaaaaaaaaaaaaaaaaaaaaaaaaaaaaaaaaaaaaaaaaaaaaa

SEQ ID NO: 12410 - RNA, 4370 nt, Artificial Sequence
  SARS-CoV-2/Wuhan/WIV05/2019__EPI_ISL_402128 spike protein mRNA gc (1-1211)(A972C_R995C) WhcAg construct
aggagagucccgcagucggcguccagcggcucugcuuguucgugugugugucguugcaggccuuauucaagcuuaccauguucguguuccugguccuccugccccuggugagcucccagugcgugaaccucaccacccgcacgcagcugccgcccgccuacaccaacagcuucacccggggcgucuacuaccccgacaagguguuccgcuccagcgugcugcacuccacccaggaccucuuccugcccuucuucagcaacgucacgugguuccacgccauccacguguccgggaccaacggcaccaagcgguucgacaacccggugcugcccuucaacgacggggucuacuucgcgagcaccgagaaguccaacaucauccgcggcuggaucuucgggacgacccucgacagcaagacccagucccugcugaucgugaacaacgccaccaacguggucaucaaggugugcgaguuccaguucugcaacgaccccuuccucggcguguacuaccacaagaacaacaagagcuggauggaguccgaguuccgggucuacagcuccgccaacaacugcacguucgaguacgugagccagcccuuccugauggaccuggagggcaagcaggggaacuucaagaaccuccgcgaguucguguucaagaacaucgacggcuacuucaagaucuacuccaagcacaccccgaucaaccugguccgggaccugccccagggguucagcgcccucgagccccugguggaccugcccaucggcaucaacaucacccgcuuccagacccuccuggcccugcaccgguccuaccucacgccgggggacagcagcuccggcuggaccgcgggcgccgccgccuacuacgugggguaccugcagccccgcaccuuccugcucaaguacaacgagaacggcaccaucacggacgcggucgacugcgcccuggacccccugagcgagaccaagugcacccucaaguccuucaccguggagaaggggaucuaccagacgagcaacuuccgggugcagcccaccgaguccaucguccgcuucccgaacaucaccaaccugugccccuucggcgagguguucaacgccacccgguucgccagcgucuacgccuggaaccgcaagcggaucuccaacugcguggcggacuacagcgugcuguacaacuccgccagcuucuccacguucaagugcuacggcgucagccccaccaagcucaacgaccugugcuucaccaacguguacgccgacuccuucgugauccgcggggacgagguccggcagaucgcccccggccagaccgggaagaucgccgacuacaacuacaagcugccggacgacuucacgggcugcgugaucgcguggaacagcaacaaccucgacuccaaggucgggggcaacuacaacuaccuguaccgccuguuccgcaagagcaaccucaagcccuucgagcgggacaucuccaccgagaucuaccaggccggcagcacccccugcaacgggguggagggcuucaacugcuacuucccccugcaguccuacggguuccagccgaccaacggcgugggguaccagcccuaccggguggucgugcugagcuucgagcuccugcacgcccccgccacggugugcggccccaagaaguccaccaaccuggucaagaacaagugcgugaacuucaacuucaacggccucaccgggaccggcgugcugaccgagagcaacaagaaguuccugccguuccagcaguucgggcgcgacaucgccgacacgaccgacgcgguccgcgacccccagacccuggagauccucgacaucacccccugcagcuucggcgggguguccgugaucacgccgggcaccaacaccagcaaccaggucgccgugcuguaccaggacgugaacugcaccgagguccccguggccauccacgccgaccagcugacgcccaccuggcggguguacuccaccggcagcaacgucuuccagacccgcgccgggugccucaucggcgcggagcacgugaacaacuccuacgagugcgacauccccaucggggccggcaucugcgccagcuaccagacgcagaccaacuccccgcggcgcgcccggagcguggcgucccagagcaucaucgccuacaccaugucccugggcgccgagaacagcgucgccuacuccaacaacagcaucgccauccccaccaacuucacgaucuccgugaccaccgagauccugcccgugagcaugaccaagacgagcgucgacugcaccauguacaucugcggggacuccaccgagugcagcaaccuccugcugcaguacggcuccuucugcacccagcucaaccgcgcgcugacggggaucgccguggagcaggacaagaacacccaggagguguucgcccaggucaagcagaucuacaagacgcccccgaucaaggacuucggcggguucaacuucagccagauccugcccgaccccuccaagcccagcaagcgguccuucaucgaggaccuccuguucaacaaggugacccuggccgacgccggcuucaucaagcaguacggcgacugccucggggacaucgcggcccgcgaccugaucugcgcccagaaguucaacggccugaccgugcucccgccccugcugaccgacgagaugaucgcccaguacaccagcgcccuccuggcggggaccaucacguccggcuggaccuucggggccggcgccgcccugcagauccccuucgcgaugcagauggccuaccgguucaacggcaucggggucacccagaacgugcucuacgagaaccagaagcugaucgccaaccaguucaacagcgccaucggcaagauccaggacucccugagcuccaccgccagcgcgcucgggaagcugcaggacguggucaaccagaacgcccaggcccugaacacgcucgugaagcagcuguccagcaacuucggcugcaucuccagcgugcugaacgacauccucucccgccuggacaaggucgaggccgaggugcagaucgacugccugaucaccgggcgccuccagagccugcagaccuacgugacccagcagcugauccgggcggccgagauccgcgccagcgccaaccucgccgcgaccaagauguccgagugcguccugggccagagcaagcggguggacuucugcggcaagggguaccaccugauguccuucccccagagcgccccgcacggcguggucuuccuccacgugacguacguccccgcccaggagaagaacuucaccaccgcccccgcgaucugccacgacgggaaggcccacuucccccgcgagggcguguucguguccaacgggacccacugguucgucacgcagcggaacuucuacgagccgcagaucaucaccaccgacaacaccuucgugagcggcaacugcgacguggucaucggcaucgugaacaacacgguguacgacccccugcagcccgagcuggacuccuucaaggaggagcucgacaaguacuucaagaaccacaccagccccgacgucgaccugggggacaucuccggcaucaacgccagcguggugaacauccagaaggagaucgaccgccugaacgaggucgccaagaaccucaacgagucccugaucgaccugcaggagcucgggaaguacgagcaguacaucaagggcgggggcgggagcgacaucgaccccuacaaggaguucggcagcuccuaccagcugcucaacuuccugccccuggacuucuuccccgaccucaacgcccugguggacaccgccaccgcgcuguacgaggaggagcucacggggcgcgagcacugcagcccccaccacaccgccauccggcaggcccuggucugcugggacgagcugaccaagcucaucgccuggauguccagcaacaucaccuccgagcagguccgcacgaucaucgugaaccacgucaacgacaccuggggccugaaggugcggcagagccugugguuccaccucuccugccugaccuucgggcagcacaccgugcaggaguuccuggucagcuucggcguguggauccgcacgcccgccccguaccggccgcccaacgcgccgauccucuccacccugccggagcacaccgugaucugcugaggacuagucccuguucccagagcccacuuuuuuuucuuuuuuugaaauaaaauagccugucuuucagaucucaaaggcucuuuucagagccaccaaaaaaaaaaaaaaaaaaaaaaaaaaaaaaaaaaaaaaaaaaaaaaaaaaaaaaaaaaaaaaaaaaaaaaaaaaaaaaaaaaaaaaaaaaaaaaaaaaaaa

SEQ ID NO: 12411 - RNA, 4370 nt, Artificial Sequence
  SARS-CoV-2/Wuhan/WIV05/2019__EPI_ISL_402128 spike protein mRNA gc (1-1211)(A890C_V1040C) WhcAg construct
aggagagucccgcagucggcguccagcggcucugcuuguucgugugugugucguugcaggccuuauucaagcuuaccauguucguguuccugguccuccugccccuggugagcucccagugcgugaaccucaccacccgcacgcagcugccgcccgccuacaccaacagcuucacccggggcgucuacuaccccgacaagguguuccgcuccagcgugcugcacuccacccaggaccucuuccugcccuucuucagcaacgucacgugguuccacgccauccacguguccgggaccaacggcaccaagcgguucgacaacccggugcugcccuucaacgacggggucuacuucgcgagcaccgagaaguccaacaucauccgcggcuggaucuucgggacgacccucgacagcaagacccagucccugcugaucgugaacaacgccaccaacguggucaucaaggugugcgaguuccaguucugcaacgaccccuuccucggcguguacuaccacaagaacaacaagagcuggauggaguccgaguuccgggucuacagcuccgccaacaacugcacguucgaguacgugagccagcccuuccugauggaccuggagggcaagcaggggaacuucaagaaccuccgcgaguucguguucaagaacaucgacggcuacuucaagaucuacuccaagcacaccccgaucaaccugguccgggaccugccccagggguucagcgcccucgagccccugguggaccugcccaucggcaucaacaucacccgcuuccagacccuccuggcccugcaccgguccuaccucacgccgggggacagcagcuccggcuggaccgcgggcgccgccgccuacuacgugggguaccugcagccccgcaccuuccugcucaaguacaacgagaacggcaccaucacggacgcggucgacugcgcccuggacccccugagcgagaccaagugcacccucaaguccuucaccguggagaaggggaucuaccagacgagcaacuuccgggugcagcccaccgaguccaucguccgcuucccgaacaucaccaaccugugccccuucggcgagguguucaacgccacccgguucgccagcgucuacgccuggaaccgcaagcggaucuccaacugcguggcggacuacagcgugcuguacaacuccgccagcuucuccacguucaagugcuacggcgucagccccaccaagcucaacgaccugugcuucaccaacguguacgccgacuccuucgugauccgcggggacgagguccggcagaucgcccccggccagaccgggaagaucgccgacuacaacuacaagcugccggacgacuucacgggcugcgugaucgcguggaacagcaacaaccucgacuccaaggucgggggcaacuacaacuaccuguaccgccuguuccgcaagagcaaccucaagcccuucgagcgggacaucuccaccgagaucuaccaggccggcagcacccccugcaacgggguggagggcuucaacugcuacuucccccugcaguccuacggguuccagccgaccaacggcgugggguaccagcccuaccggguggucgugcugagcuucgagcuccugcacgcccccgccacggugugcggccccaagaaguccaccaaccuggucaagaacaagugcgugaacuucaacuucaacggccucaccgggaccggcgugcugaccgagagcaacaagaaguuccugccguuccagcaguucgggcgcgacaucgccgacacgaccgacgcgguccgcgacccccagacccuggagauccucgacaucacccccugcagcuucggcgggguguccgugaucacgccgggcaccaacaccagcaaccaggucgccgugcuguaccaggacgugaacugcaccgagguccccguggccauccacgccgaccagcugacgcccaccuggcggguguacuccaccggcagcaacgucuuccagacccgcgccgggugccucaucggcgcggagcacgugaacaacuccuacgagugcgacauccccaucggggccggcaucugcgccagcuaccagacgcagaccaacuccccgcggcgcgcccggagcguggcgucccagagcaucaucgccuacaccaugucccugggcgccgagaacagcgucgccuacuccaacaacagcaucgccauccccaccaacuucacgaucuccgugaccaccgagauccugcccgugagcaugaccaagacgagcgucgacugcaccauguacaucugcggggacuccaccgagugcagcaaccuccugcugcaguacggcuccuucugcacccagcucaaccgcgcgcugacggggaucgccguggagcaggacaagaacacccaggagguguucgcccaggucaagcagaucuacaagacgcccccgaucaaggacuucggcggguucaacuucagccagauccugcccgaccccuccaagcccagcaagcgguccuucaucgaggaccuccuguucaacaaggugacccuggccgacgccggcuucaucaagcaguacggcgacugccucggggacaucgcggcccgcgaccugaucugcgcccagaaguucaacggccugaccgugcucccgccccugcugaccgacgagaugaucgcccaguacaccagcgcccuccuggcggggaccaucacguccggcuggaccuucgggugcggcgccgcccugcagauccccuucgcgaugcagauggccuaccgguucaacggcaucggggucacccagaacgugcucuacgagaaccagaagcugaucgccaaccaguucaacagcgccaucggcaagauccaggacucccugagcuccaccgccagcgcgcucgggaagcugcaggacguggucaaccagaacgcccaggcccugaacacgcucgugaagcagcuguccagcaacuucggcgccaucuccagcgugcugaacgacauccucucccgccuggacaaggucgaggccgaggugcagaucgaccggcugaucaccgggcgccuccagagccugcagaccuacgugacccagcagcugauccgggcggccgagauccgcgccagcgccaaccucgccgcgaccaagauguccgagugcguccugggccagagcaagcggugcgacuucugcggcaagggguaccaccugauguccuucccccagagcgccccgcacggcguggucuuccuccacgugacguacguccccgcccaggagaagaacuucaccaccgcccccgcgaucugccacgacgggaaggcccacuucccccgcgagggcguguucguguccaacgggacccacugguucgucacgcagcggaacuucuacgagccgcagaucaucaccaccgacaacaccuucgugagcggcaacugcgacguggucaucggcaucgugaacaacacgguguacgacccccugcagcccgagcuggacuccuucaaggaggagcucgacaaguacuucaagaaccacaccagccccgacgucgaccugggggacaucuccggcaucaacgccagcguggugaacauccagaaggagaucgaccgccugaacgaggucgccaagaaccucaacgagucccugaucgaccugcaggagcucgggaaguacgagcaguacaucaagggcgggggcgggagcgacaucgaccccuacaaggaguucggcagcuccuaccagcugcucaacuuccugccccuggacuucuuccccgaccucaacgcccugguggacaccgccaccgcgcuguacgaggaggagcucacggggcgcgagcacugcagcccccaccacaccgccauccggcaggcccuggucugcugggacgagcugaccaagcucaucgccuggauguccagcaacaucaccuccgagcagguccgcacgaucaucgugaaccacgucaacgacaccuggggccugaaggugcggcagagccugugguuccaccucuccugccugaccuucgggcagcacaccgugcaggaguuccuggucagcuucggcguguggauccgcacgcccgccccguaccggccgcccaacgcgccgauccucuccacccugccggagcacaccgugaucugcugaggacuagucccuguucccagagcccacuuuuuuuucuuuuuuugaaauaaaauagccugucuuucagaucucaaaggcucuuuucagagccaccaaaaaaaaaaaaaaaaaaaaaaaaaaaaaaaaaaaaaaaaaaaaaaaaaaaaaaaaaaaaaaaaaaaaaaaaaaaaaaaaaaaaaaaaaaaaaaaaaaaaa

SEQ ID NO: 12412 - RNA, 4370 nt, Artificial Sequence
  SARS-CoV-2/Wuhan/WIV05/2019__EPI_ISL_402128 spike protein mRNA gc (1-1211)(T874C_S1055C) WhcAg construct
aggagagucccgcagucggcguccagcggcucugcuuguucgugugugugucguugcaggccuuauucaagcuuaccauguucguguuccugguccuccugccccuggugagcucccagugcgugaaccucaccacccgcacgcagcugccgcccgccuacaccaacagcuucacccggggcgucuacuaccccgacaagguguuccgcuccagcgugcugcacuccacccaggaccucuuccugcccuucuucagcaacgucacgugguuccacgccauccacguguccgggaccaacggcaccaagcgguucgacaacccggugcugcccuucaacgacggggucuacuucgcgagcaccgagaaguccaacaucauccgcggcuggaucuucgggacgacccucgacagcaagacccagucccugcugaucgugaacaacgccaccaacguggucaucaaggugugcgaguuccaguucugcaacgaccccuuccucggcguguacuaccacaagaacaacaagagcuggauggaguccgaguuccgggucuacagcuccgccaacaacugcacguucgaguacgugagccagcccuuccugauggaccuggagggcaagcaggggaacuucaagaaccuccgcgaguucguguucaagaacaucgacggcuacuucaagaucuacuccaagcacaccccgaucaaccugguccgggaccugccccagggguucagcgcccucgagccccugguggaccugcccaucggcaucaacaucacccgcuuccagacccuccuggcccugcaccgguccuaccucacgccgggggacagcagcuccggcuggaccgcgggcgccgccgccuacuacgugggguaccugcagccccgcaccuuccugcucaaguacaacgagaacggcaccaucacggacgcggucgacugcgcccuggacccccugagcgagaccaagugcacccucaaguccuucaccguggagaaggggaucuaccagacgagcaacuuccgggugcagcccaccgaguccaucguccgcuucccgaacaucaccaaccugugccccuucggcgagguguucaacgccacccgguucgccagcgucuacgccuggaaccgcaagcggaucuccaacugcguggcggacuacagcgugcuguacaacuccgccagcuucuccacguucaagugcuacggcgucagccccaccaagcucaacgaccugugcuucaccaacguguacgccgacuccuucgugauccgcggggacgagguccggcagaucgcccccggccagaccgggaagaucgccgacuacaacuacaagcugccggacgacuucacgggcugcgugaucgcguggaacagcaacaaccucgacuccaaggucgggggcaacuacaacuaccuguaccgccuguuccgcaagagcaaccucaagcccuucgagcgggacaucuccaccgagaucuaccaggccggcagcacccccugcaacgggguggagggcuucaacugcuacuucccccugcaguccuacggguuccagccgaccaacggcgugggguaccagcccuaccggguggucgugcugagcuucgagcuccugcacgcccccgccacggugugcggccccaagaaguccaccaaccuggucaagaacaagugcgugaacuucaacuucaacggccucaccgggaccggcgugcugaccgagagcaacaagaaguuccugccguuccagcaguucgggcgcgacaucgccgacacgaccgacgcgguccgcgacccccagacccuggagauccucgacaucacccccugcagcuucggcgggguguccgugaucacgccgggcaccaacaccagcaaccaggucgccgugcuguaccaggacgugaacugcaccgagguccccguggccauccacgccgaccagcugacgcccaccuggcggguguacuccaccggcagcaacgucuuccagacccgcgccgggugccucaucggcgcggagcacgugaacaacuccuacgagugcgacauccccaucggggccggcaucugcgccagcuaccagacgcagaccaacuccccgcggcgcgcccggagcguggcgucccagagcaucaucgccuacaccaugucccugggcgccgagaacagcgucgccuacuccaacaacagcaucgccauccccaccaacuucacgaucuccgugaccaccgagauccugcccgugagcaugaccaagacgagcgucgacugcaccauguacaucugcggggacuccaccgagugcagcaaccuccugcugcaguacggcuccuucugcacccagcucaaccgcgcgcugacggggaucgccguggagcaggacaagaacacccaggagguguucgcccaggucaagcagaucuacaagacgcccccgaucaaggacuucggcggguucaacuucagccagauccugcccgaccccuccaagcccagcaagcgguccuucaucgaggaccuccuguucaacaaggugacccuggccgacgccggcuucaucaagcaguacggcgacugccucggggacaucgcggcccgcgaccugaucugcgcccagaaguucaacggccugaccgugcucccgccccugcugaccgacgagaugaucgcccaguacugcagcgcccuccuggcggggaccaucacguccggcuggaccuucggggccggcgccgcccugcagauccccuucgcgaugcagauggccuaccgguucaacggcaucggggucacccagaacgugcucuacgagaaccagaagcugaucgccaaccaguucaacagcgccaucggcaagauccaggacucccugagcuccaccgccagcgcgcucgggaagcugcaggacguggucaaccagaacgcccaggcccugaacacgcucgugaagcagcuguccagcaacuucggcgccaucuccagcgugcugaacgacauccucucccgccuggacaaggucgaggccgaggugcagaucgaccggcugaucaccgggcgccuccagagccugcagaccuacgugacccagcagcugauccgggcggccgagauccgcgccagcgccaaccucgccgcgaccaagauguccgagugcguccugggccagagcaagcggguggacuucugcggcaagggguaccaccugauguccuucccccagugcgccccgcacggcguggucuuccuccacgugacguacguccccgcccaggagaagaacuucaccaccgcccccgcgaucugccacgacgggaaggcccacuucccccgcgagggcguguucguguccaacgggacccacugguucgucacgcagcggaacuucuacgagccgcagaucaucaccaccgacaacaccuucgugagcggcaacugcgacguggucaucggcaucgugaacaacacgguguacgacccccugcagcccgagcuggacuccuucaaggaggagcucgacaaguacuucaagaaccacaccagccccgacgucgaccugggggacaucuccggcaucaacgccagcguggugaacauccagaaggagaucgaccgccugaacgaggucgccaagaaccucaacgagucccugaucgaccugcaggagcucgggaaguacgagcaguacaucaagggcgggggcgggagcgacaucgaccccuacaaggaguucggcagcuccuaccagcugcucaacuuccugccccuggacuucuuccccgaccucaacgcccugguggacaccgccaccgcgcuguacgaggaggagcucacggggcgcgagcacugcagcccccaccacaccgccauccggcaggcccuggucugcugggacgagcugaccaagcucaucgccuggauguccagcaacaucaccuccgagcagguccgcacgaucaucgugaaccacgucaacgacaccuggggccugaaggugcggcagagccugugguuccaccucuccugccugaccuucgggcagcacaccgugcaggaguuccuggucagcuucggcguguggauccgcacgcccgccccguaccggccgcccaacgcgccgauccucuccacccugccggagcacaccgugaucugcugaggacuagucccuguucccagagcccacuuuuuuuucuuuuuuugaaauaaaauagccugucuuucagaucucaaaggcucuuuucagagccaccaaaaaaaaaaaaaaaaaaaaaaaaaaaaaaaaaaaaaaaaaaaaaaaaaaaaaaaaaaaaaaaaaaaaaaaaaaaaaaaaaaaaaaaaaaaaaaaaaaaaa

SEQ ID NO: 12413 - RNA, 4196 nt, Artificial Sequence
  SARS-CoV-2/Wuhan/WIV05/2019__EPI_ISL_402128 spike protein mRNA gc (1-1147) LumSynth construct
aggagagucccgcagucggcguccagcggcucugcuuguucgugugugugucguugcaggccuuauucaagcuuaccauguucguguuccugguccuccugccccuggugagcucccagugcgugaaccucaccacccgcacgcagcugccgcccgccuacaccaacagcuucacccggggcgucuacuaccccgacaagguguuccgcuccagcgugcugcacuccacccaggaccucuuccugcccuucuucagcaacgucacgugguuccacgccauccacguguccgggaccaacggcaccaagcgguucgacaacccggugcugcccuucaacgacggggucuacuucgcgagcaccgagaaguccaacaucauccgcggcuggaucuucgggacgacccucgacagcaagacccagucccugcugaucgugaacaacgccaccaacguggucaucaaggugugcgaguuccaguucugcaacgaccccuuccucggcguguacuaccacaagaacaacaagagcuggauggaguccgaguuccgggucuacagcuccgccaacaacugcacguucgaguacgugagccagcccuuccugauggaccuggagggcaagcaggggaacuucaagaaccuccgcgaguucguguucaagaacaucgacggcuacuucaagaucuacuccaagcacaccccgaucaaccugguccgggaccugccccagggguucagcgcccucgagccccugguggaccugcccaucggcaucaacaucacccgcuuccagacccuccuggcccugcaccgguccuaccucacgccgggggacagcagcuccggcuggaccgcgggcgccgccgccuacuacgugggguaccugcagccccgcaccuuccugcucaaguacaacgagaacggcaccaucacggacgcggucgacugcgcccuggacccccugagcgagaccaagugcacccucaaguccuucaccguggagaaggggaucuaccagacgagcaacuuccgggugcagcccaccgaguccaucguccgcuucccgaacaucaccaaccugugccccuucggcgagguguucaacgccacccgguucgccagcgucuacgccuggaaccgcaagcggaucuccaacugcguggcggacuacagcgugcuguacaacuccgccagcuucuccacguucaagugcuacggcgucagccccaccaagcucaacgaccugugcuucaccaacguguacgccgacuccuucgugauccgcggggacgagguccggcagaucgcccccggccagaccgggaagaucgccgacuacaacuacaagcugccggacgacuucacgggcugcgugaucgcguggaacagcaacaaccucgacuccaaggucgggggcaacuacaacuaccuguaccgccuguuccgcaagagcaaccucaagcccuucgagcgggacaucuccaccgagaucuaccaggccggcagcacccccugcaacgggguggagggcuucaacugcuacuucccccugcaguccuacggguuccagccgaccaacggcgugggguaccagcccuaccggguggucgugcugagcuucgagcuccugcacgcccccgccacggugugcggccccaagaaguccaccaaccuggucaagaacaagugcgugaacuucaacuucaacggccucaccgggaccggcgugcugaccgagagcaacaagaaguuccugccguuccagcaguucgggcgcgacaucgccgacacgaccgacgcgguccgcgacccccagacccuggagauccucgacaucacccccugcagcuucggcgggguguccgugaucacgccgggcaccaacaccagcaaccaggucgccgugcuguaccaggacgugaacugcaccgagguccccguggccauccacgccgaccagcugacgcccaccuggcggguguacuccaccggcagcaacgucuuccagacccgcgccgggugccucaucggcgcggagcacgugaacaacuccuacgagugcgacauccccaucggggccggcaucugcgccagcuaccagacgcagaccaacuccccgcggcgcgcccggagcguggcgucccagagcaucaucgccuacaccaugucccugggcgccgagaacagcgucgccuacuccaacaacagcaucgccauccccaccaacuucacgaucuccgugaccaccgagauccugcccgugagcaugaccaagacgagcgucgacugcaccauguacaucugcggggacuccaccgagugcagcaaccuccugcugcaguacggcuccuucugcacccagcucaaccgcgcgcugacggggaucgccguggagcaggacaagaacacccaggagguguucgcccaggucaagcagaucuacaagacgcccccgaucaaggacuucggcggguucaacuucagccagauccugcccgaccccuccaagcccagcaagcgguccuucaucgaggaccuccuguucaacaaggugacccuggccgacgccggcuucaucaagcaguacggcgacugccucggggacaucgcggcccgcgaccugaucugcgcccagaaguucaacggccugaccgugcucccgccccugcugaccgacgagaugaucgcccaguacaccagcgcccuccuggcggggaccaucacguccggcuggaccuucggggccggcgccgcccugcagauccccuucgcgaugcagauggccuaccgguucaacggcaucggggucacccagaacgugcucuacgagaaccagaagcugaucgccaaccaguucaacagcgccaucggcaagauccaggacucccugagcuccaccgccagcgcgcucgggaagcugcaggacguggucaaccagaacgcccaggcccugaacacgcucgugaagcagcuguccagcaacuucggcgccaucuccagcgugcugaacgacauccucucccgccuggacaaggucgaggccgaggugcagaucgaccggcugaucaccgggcgccuccagagccugcagaccuacgugacccagcagcugauccgggcggccgagauccgcgccagcgccaaccucgccgcgaccaagauguccgagugcguccugggccagagcaagcggguggacuucugcggcaagggguaccaccugauguccuucccccagagcgccccgcacggcguggucuuccuccacgugacguacguccccgcccaggagaagaacuucaccaccgcccccgcgaucugccacgacgggaaggcccacuucccccgcgagggcguguucguguccaacgggacccacugguucgucacgcagcggaacuucuacgagccgcagaucaucaccaccgacaacaccuucgugagcggcaacugcgacguggucaucggcaucgugaacaacacgguguacgacccccugcagcccgagcuggacuccggcggcgggagcgggggcgggcagaucuacgagggcaagcugaccgccgaggggcuccgcuucggcaucguggccagccgguucaaccacgcgcuggucgaccgccugguggagggggccaucgacgccaucgugcggcacggcgggcgcgaggaggacaucacccucguccgggugcccggcuccugggagaucccgguggccgccggcgagcuggcccgcaaggaggacaucgacgcggucaucgccaucggggugcugauccggggcgccacgccccacuucgacuacaucgccagcgagguguccaaggggcucgcggaccugagccuggagcuccgcaagcccaucaccuucggcgucaucaccgccgacacccuggagcaggccaucgagcgggccgggacgaagcacggcaacaagggcugggaggccgcgcuguccgccaucgagauggccaaccucuucaagagccugcgcugaggacuagucccuguucccagagcccacuuuuuuuucuuuuuuugaaauaaaauagccugucuuucagaucucaaaggcucuuuucagagccaccaaaaaaaaaaaaaaaaaaaaaaaaaaaaaaaaaaaaaaaaaaaaaaaaaaaaaaaaaaaaaaaaaaaaaaaaaaaaaaaaaaaaaaaaaaaaaaaaaaaaa

SEQ ID NO: 12414 - RNA, 4196 nt, Artificial Sequence
  SARS-CoV-2/Wuhan/WIV05/2019__EPI_ISL_402128 spike protein mRNA gc (1-1147)(K986P_V987P) LumSynth construct
aggagagucccgcagucggcguccagcggcucugcuuguucgugugugugucguugcaggccuuauucaagcuuaccauguucguguuccugguccuccugccccuggugagcucccagugcgugaaccucaccacccgcacgcagcugccgcccgccuacaccaacagcuucacccggggcgucuacuaccccgacaagguguuccgcuccagcgugcugcacuccacccaggaccucuuccugcccuucuucagcaacgucacgugguuccacgccauccacguguccgggaccaacggcaccaagcgguucgacaacccggugcugcccuucaacgacggggucuacuucgcgagcaccgagaaguccaacaucauccgcggcuggaucuucgggacgacccucgacagcaagacccagucccugcugaucgugaacaacgccaccaacguggucaucaaggugugcgaguuccaguucugcaacgaccccuuccucggcguguacuaccacaagaacaacaagagcuggauggaguccgaguuccgggucuacagcuccgccaacaacugcacguucgaguacgugagccagcccuuccugauggaccuggagggcaagcaggggaacuucaagaaccuccgcgaguucguguucaagaacaucgacggcuacuucaagaucuacuccaagcacaccccgaucaaccugguccgggaccugccccagggguucagcgcccucgagccccugguggaccugcccaucggcaucaacaucacccgcuuccagacccuccuggcccugcaccgguccuaccucacgccgggggacagcagcuccggcuggaccgcgggcgccgccgccuacuacgugggguaccugcagccccgcaccuuccugcucaaguacaacgagaacggcaccaucacggacgcggucgacugcgcccuggacccccugagcgagaccaagugcacccucaaguccuucaccguggagaaggggaucuaccagacgagcaacuuccgggugcagcccaccgaguccaucguccgcuucccgaacaucaccaaccugugccccuucggcgagguguucaacgccacccgguucgccagcgucuacgccuggaaccgcaagcggaucuccaacugcguggcggacuacagcgugcuguacaacuccgccagcuucuccacguucaagugcuacggcgucagccccaccaagcucaacgaccugugcuucaccaacguguacgccgacuccuucgugauccgcggggacgagguccggcagaucgcccccggccagaccgggaagaucgccgacuacaacuacaagcugccggacgacuucacgggcugcgugaucgcguggaacagcaacaaccucgacuccaaggucgggggcaacuacaacuaccuguaccgccuguuccgcaagagcaaccucaagcccuucgagcgggacaucuccaccgagaucuaccaggccggcagcacccccugcaacgggguggagggcuucaacugcuacuucccccugcaguccuacggguuccagccgaccaacggcgugggguaccagcccuaccggguggucgugcugagcuucgagcuccugcacgcccccgccacggugugcggccccaagaaguccaccaaccuggucaagaacaagugcgugaacuucaacuucaacggccucaccgggaccggcgugcugaccgagagcaacaagaaguuccugccguuccagcaguucgggcgcgacaucgccgacacgaccgacgcgguccgcgacccccagacccuggagauccucgacaucacccccugcagcuucggcgggguguccgugaucacgccgggcaccaacaccagcaaccaggucgccgugcuguaccaggacgugaacugcaccgagguccccguggccauccacgccgaccagcugacgcccaccuggcggguguacuccaccggcagcaacgucuuccagacccgcgccgggugccucaucggcgcggagcacgugaacaacuccuacgagugcgacauccccaucggggccggcaucugcgccagcuaccagacgcagaccaacuccccgcggcgcgcccggagcguggcgucccagagcaucaucgccuacaccaugucccugggcgccgagaacagcgucgccuacuccaacaacagcaucgccauccccaccaacuucacgaucuccgugaccaccgagauccugcccgugagcaugaccaagacgagcgucgacugcaccauguacaucugcggggacuccaccgagugcagcaaccuccugcugcaguacggcuccuucugcacccagcucaaccgcgcgcugacggggaucgccguggagcaggacaagaacacccaggagguguucgcccaggucaagcagaucuacaagacgcccccgaucaaggacuucggcggguucaacuucagccagauccugcccgaccccuccaagcccagcaagcgguccuucaucgaggaccuccuguucaacaaggugacccuggccgacgccggcuucaucaagcaguacggcgacugccucggggacaucgcggcccgcgaccugaucugcgcccagaaguucaacggccugaccgugcucccgccccugcugaccgacgagaugaucgcccaguacaccagcgcccuccuggcggggaccaucacguccggcuggaccuucggggccggcgccgcccugcagauccccuucgcgaugcagauggccuaccgguucaacggcaucggggucacccagaacgugcucuacgagaaccagaagcugaucgccaaccaguucaacagcgccaucggcaagauccaggacucccugagcuccaccgccagcgcgcucgggaagcugcaggacguggucaaccagaacgcccaggcccugaacacgcucgugaagcagcuguccagcaacuucggcgccaucuccagcgugcugaacgacauccucucccgccuggacccgcccgaggccgaggugcagaucgaccggcugaucaccgggcgccuccagagccugcagaccuacgugacccagcagcugauccgggcggccgagauccgcgccagcgccaaccucgccgcgaccaagauguccgagugcguccugggccagagcaagcggguggacuucugcggcaagggguaccaccugauguccuucccccagagcgccccgcacggcguggucuuccuccacgugacguacguccccgcccaggagaagaacuucaccaccgcccccgcgaucugccacgacgggaaggcccacuucccccgcgagggcguguucguguccaacgggacccacugguucgucacgcagcggaacuucuacgagccgcagaucaucaccaccgacaacaccuucgugagcggcaacugcgacguggucaucggcaucgugaacaacacgguguacgacccccugcagcccgagcuggacuccggcggcgggagcgggggcgggcagaucuacgagggcaagcugaccgccgaggggcuccgcuucggcaucguggccagccgguucaaccacgcgcuggucgaccgccugguggagggggccaucgacgccaucgugcggcacggcgggcgcgaggaggacaucacccucguccgggugcccggcuccugggagaucccgguggccgccggcgagcuggcccgcaaggaggacaucgacgcggucaucgccaucggggugcugauccggggcgccacgccccacuucgacuacaucgccagcgagguguccaaggggcucgcggaccugagccuggagcuccgcaagcccaucaccuucggcgucaucaccgccgacacccuggagcaggccaucgagcgggccgggacgaagcacggcaacaagggcugggaggccgcgcuguccgccaucgagauggccaaccucuucaagagccugcgcugaggacuagucccuguucccagagcccacuuuuuuuucuuuuuuugaaauaaaauagccugucuuucagaucucaaaggcucuuuucagagccaccaaaaaaaaaaaaaaaaaaaaaaaaaaaaaaaaaaaaaaaaaaaaaaaaaaaaaaaaaaaaaaaaaaaaaaaaaaaaaaaaaaaaaaaaaaaaaaaaaaaaa

SEQ ID NO: 12415 - RNA, 4196 nt, Artificial Sequence
  SARS-CoV-2/Wuhan/WIV05/2019__EPI_ISL_402128 spike protein mRNA gc (1-1147)(K986P_V987P_T887WN_A1020W) LumSynth construct
aggagagucccgcagucggcguccagcggcucugcuuguucgugugugugucguugcaggccuuauucaagcuuaccauguucguguuccugguccuccugccccuggugagcucccagugcgugaaccucaccacccgcacgcagcugccgcccgccuacaccaacagcuucacccggggcgucuacuaccccgacaagguguuccgcuccagcgugcugcacuccacccaggaccucuuccugcccuucuucagcaacgucacgugguuccacgccauccacguguccgggaccaacggcaccaagcgguucgacaacccggugcugcccuucaacgacggggucuacuucgcgagcaccgagaaguccaacaucauccgcggcuggaucuucgggacgacccucgacagcaagacccagucccugcugaucgugaacaacgccaccaacguggucaucaaggugugcgaguuccaguucugcaacgaccccuuccucggcguguacuaccacaagaacaacaagagcuggauggaguccgaguuccgggucuacagcuccgccaacaacugcacguucgaguacgugagccagcccuuccugauggaccuggagggcaagcaggggaacuucaagaaccuccgcgaguucguguucaagaacaucgacggcuacuucaagaucuacuccaagcacaccccgaucaaccugguccgggaccugccccagggguucagcgcccucgagccccugguggaccugcccaucggcaucaacaucacccgcuuccagacccuccuggcccugcaccgguccuaccucacgccgggggacagcagcuccggcuggaccgcgggcgccgccgccuacuacgugggguaccugcagccccgcaccuuccugcucaaguacaacgagaacggcaccaucacggacgcggucgacugcgcccuggacccccugagcgagaccaagugcacccucaaguccuucaccguggagaaggggaucuaccagacgagcaacuuccgggugcagcccaccgaguccaucguccgcuucccgaacaucaccaaccugugccccuucggcgagguguucaacgccacccgguucgccagcgucuacgccuggaaccgcaagcggaucuccaacugcguggcggacuacagcgugcuguacaacuccgccagcuucuccacguucaagugcuacggcgucagccccaccaagcucaacgaccugugcuucaccaacguguacgccgacuccuucgugauccgcggggacgagguccggcagaucgcccccggccagaccgggaagaucgccgacuacaacuacaagcugccggacgacuucacgggcugcgugaucgcguggaacagcaacaaccucgacuccaaggucgggggcaacuacaacuaccuguaccgccuguuccgcaagagcaaccucaagcccuucgagcgggacaucuccaccgagaucuaccaggccggcagcacccccugcaacgggguggagggcuucaacugcuacuucccccugcaguccuacggguuccagccgaccaacggcgugggguaccagcccuaccggguggucgugcugagcuucgagcuccugcacgcccccgccacggugugcggccccaagaaguccaccaaccuggucaagaacaagugcgugaacuucaacuucaacggccucaccgggaccggcgugcugaccgagagcaacaagaaguuccugccguuccagcaguucgggcgcgacaucgccgacacgaccgacgcgguccgcgacccccagacccuggagauccucgacaucacccccugcagcuucggcgggguguccgugaucacgccgggcaccaacaccagcaaccaggucgccgugcuguaccaggacgugaacugcaccgagguccccguggccauccacgccgaccagcugacgcccaccuggcggguguacuccaccggcagcaacgucuuccagacccgcgccgggugccucaucggcgcggagcacgugaacaacuccuacgagugcgacauccccaucggggccggcaucugcgccagcuaccagacgcagaccaacuccccgcggcgcgcccggagcguggcgucccagagcaucaucgccuacaccaugucccugggcgccgagaacagcgucgccuacuccaacaacagcaucgccauccccaccaacuucacgaucuccgugaccaccgagauccugcccgugagcaugaccaagacgagcgucgacugcaccauguacaucugcggggacuccaccgagugcagcaaccuccugcugcaguacggcuccuucugcacccagcucaaccgcgcgcugacggggaucgccguggagcaggacaagaacacccaggagguguucgcccaggucaagcagaucuacaagacgcccccgaucaaggacuucggcggguucaacuucagccagauccugcccgaccccuccaagcccagcaagcgguccuucaucgaggaccuccuguucaacaaggugacccuggccgacgccggcuucaucaagcaguacggcgacugccucggggacaucgcggcccgcgaccugaucugcgcccagaaguucaacggccugaccgugcucccgccccugcugaccgacgagaugaucgcccaguacaccagcgcccuccuggcggggaccaucacguccggcuggugguucggggccggcgccgcccugcagauccccuucgcgaugcagauggccuaccgguucaacggcaucggggucacccagaacgugcucuacgagaaccagaagcugaucgccaaccaguucaacagcgccaucggcaagauccaggacucccugagcuccaccgccagcgcgcucgggaagcugcaggacguggucaaccagaacgcccaggcccugaacacgcucgugaagcagcuguccagcaacuucggcgccaucuccagcgugcugaacgacauccucucccgccuggacccgcccgaggccgaggugcagaucgaccggcugaucaccgggcgccuccagagccugcagaccuacgugacccagcagcugauccgggcggccgagauccgcuggagcgccaaccucgccgcgaccaagauguccgagugcguccugggccagagcaagcggguggacuucugcggcaagggguaccaccugauguccuucccccagagcgccccgcacggcguggucuuccuccacgugacguacguccccgcccaggagaagaacuucaccaccgcccccgcgaucugccacgacgggaaggcccacuucccccgcgagggcguguucguguccaacgggacccacugguucgucacgcagcggaacuucuacgagccgcagaucaucaccaccgacaacaccuucgugagcggcaacugcgacguggucaucggcaucgugaacaacacgguguacgacccccugcagcccgagcuggacuccggcggcgggagcgggggcgggcagaucuacgagggcaagcugaccgccgaggggcuccgcuucggcaucguggccagccgguucaaccacgcgcuggucgaccgccugguggagggggccaucgacgccaucgugcggcacggcgggcgcgaggaggacaucacccucguccgggugcccggcuccugggagaucccgguggccgccggcgagcuggcccgcaaggaggacaucgacgcggucaucgccaucggggugcugauccggggcgccacgccccacuucgacuacaucgccagcgagguguccaaggggcucgcggaccugagccuggagcuccgcaagcccaucaccuucggcgucaucaccgccgacacccuggagcaggccaucgagcgggccgggacgaagcacggcaacaagggcugggaggccgcgcuguccgccaucgagauggccaaccucuucaagagccugcgcugaggacuagucccuguucccagagcccacuuuuuuuucuuuuuuugaaauaaaauagccugucuuucagaucucaaaggcucuuuucagagccaccaaaaaaaaaaaaaaaaaaaaaaaaaaaaaaaaaaaaaaaaaaaaaaaaaaaaaaaaaaaaaaaaaaaaaaaaaaaaaaaaaaaaaaaaaaaaaaaaaaaaa

SEQ ID NO: 12416 - RNA, 4196 nt, Artificial Sequence
  SARS-CoV-2/Wuhan/WIV05/2019__EPI_ISL_402128 spike protein mRNA gc (1-1147)(K986P_V987P_P1069F) LumSynth construct
aggagagucccgcagucggcguccagcggcucugcuuguucgugugugugucguugcaggccuuauucaagcuuaccauguucguguuccugguccuccugccccuggugagcucccagugcgugaaccucaccacccgcacgcagcugccgcccgccuacaccaacagcuucacccggggcgucuacuaccccgacaagguguuccgcuccagcgugcugcacuccacccaggaccucuuccugcccuucuucagcaacgucacgugguuccacgccauccacguguccgggaccaacggcaccaagcgguucgacaacccggugcugcccuucaacgacggggucuacuucgcgagcaccgagaaguccaacaucauccgcggcuggaucuucgggacgacccucgacagcaagacccagucccugcugaucgugaacaacgccaccaacguggucaucaaggugugcgaguuccaguucugcaacgaccccuuccucggcguguacuaccacaagaacaacaagagcuggauggaguccgaguuccgggucuacagcuccgccaacaacugcacguucgaguacgugagccagcccuuccugauggaccuggagggcaagcaggggaacuucaagaaccuccgcgaguucguguucaagaacaucgacggcuacuucaagaucuacuccaagcacaccccgaucaaccugguccgggaccugccccagggguucagcgcccucgagccccugguggaccugcccaucggcaucaacaucacccgcuuccagacccuccuggcccugcaccgguccuaccucacgccgggggacagcagcuccggcuggaccgcgggcgccgccgccuacuacgugggguaccugcagccccgcaccuuccugcucaaguacaacgagaacggcaccaucacggacgcggucgacugcgcccuggacccccugagcgagaccaagugcacccucaaguccuucaccguggagaaggggaucuaccagacgagcaacuuccgggugcagcccaccgaguccaucguccgcuucccgaacaucaccaaccugugccccuucggcgagguguucaacgccacccgguucgccagcgucuacgccuggaaccgcaagcggaucuccaacugcguggcggacuacagcgugcuguacaacuccgccagcuucuccacguucaagugcuacggcgucagccccaccaagcucaacgaccugugcuucaccaacguguacgccgacuccuucgugauccgcggggacgagguccggcagaucgcccccggccagaccgggaagaucgccgacuacaacuacaagcugccggacgacuucacgggcugcgugaucgcguggaacagcaacaaccucgacuccaaggucgggggcaacuacaacuaccuguaccgccuguuccgcaagagcaaccucaagcccuucgagcgggacaucuccaccgagaucuaccaggccggcagcacccccugcaacgggguggagggcuucaacugcuacuucccccugcaguccuacggguuccagccgaccaacggcgugggguaccagcccuaccggguggucgugcugagcuucgagcuccugcacgcccccgccacggugugcggccccaagaaguccaccaaccuggucaagaacaagugcgugaacuucaacuucaacggccucaccgggaccggcgugcugaccgagagcaacaagaaguuccugccguuccagcaguucgggcgcgacaucgccgacacgaccgacgcgguccgcgacccccagacccuggagauccucgacaucacccccugcagcuucggcgggguguccgugaucacgccgggcaccaacaccagcaaccaggucgccgugcuguaccaggacgugaacugcaccgagguccccguggccauccacgccgaccagcugacgcccaccuggcggguguacuccaccggcagcaacgucuuccagacccgcgccgggugccucaucggcgcggagcacgugaacaacuccuacgagugcgacauccccaucggggccggcaucugcgccagcuaccagacgcagaccaacuccccgcggcgcgcccggagcguggcgucccagagcaucaucgccuacaccaugucccugggcgccgagaacagcgucgccuacuccaacaacagcaucgccauccccaccaacuucacgaucuccgugaccaccgagauccugcccgugagcaugaccaagacgagcgucgacugcaccauguacaucugcggggacuccaccgagugcagcaaccuccugcugcaguacggcuccuucugcacccagcucaaccgcgcgcugacggggaucgccguggagcaggacaagaacacccaggagguguucgcccaggucaagcagaucuacaagacgcccccgaucaaggacuucggcggguucaacuucagccagauccugcccgaccccuccaagcccagcaagcgguccuucaucgaggaccuccuguucaacaaggugacccuggccgacgccggcuucaucaagcaguacggcgacugccucggggacaucgcggcccgcgaccugaucugcgcccagaaguucaacggccugaccgugcucccgccccugcugaccgacgagaugaucgcccaguacaccagcgcccuccuggcggggaccaucacguccggcuggaccuucggggccggcgccgcccugcagauccccuucgcgaugcagauggccuaccgguucaacggcaucggggucacccagaacgugcucuacgagaaccagaagcugaucgccaaccaguucaacagcgccaucggcaagauccaggacucccugagcuccaccgccagcgcgcucgggaagcugcaggacguggucaaccagaacgcccaggcccugaacacgcucgugaagcagcuguccagcaacuucggcgccaucuccagcgugcugaacgacauccucucccgccuggacccgcccgaggccgaggugcagaucgaccggcugaucaccgggcgccuccagagccugcagaccuacgugacccagcagcugauccgggcggccgagauccgcgccagcgccaaccucgccgcgaccaagauguccgagugcguccugggccagagcaagcggguggacuucugcggcaagggguaccaccugauguccuucccccagagcgccccgcacggcguggucuuccuccacgugacguacgucuucgcccaggagaagaacuucaccaccgcccccgcgaucugccacgacgggaaggcccacuucccccgcgagggcguguucguguccaacgggacccacugguucgucacgcagcggaacuucuacgagccgcagaucaucaccaccgacaacaccuucgugagcggcaacugcgacguggucaucggcaucgugaacaacacgguguacgacccccugcagcccgagcuggacuccggcggcgggagcgggggcgggcagaucuacgagggcaagcugaccgccgaggggcuccgcuucggcaucguggccagccgguucaaccacgcgcuggucgaccgccugguggagggggccaucgacgccaucgugcggcacggcgggcgcgaggaggacaucacccucguccgggugcccggcuccugggagaucccgguggccgccggcgagcuggcccgcaaggaggacaucgacgcggucaucgccaucggggugcugauccggggcgccacgccccacuucgacuacaucgccagcgagguguccaaggggcucgcggaccugagccuggagcuccgcaagcccaucaccuucggcgucaucaccgccgacacccuggagcaggccaucgagcgggccgggacgaagcacggcaacaagggcugggaggccgcgcuguccgccaucgagauggccaaccucuucaagagccugcgcugaggacuagucccuguucccagagcccacuuuuuuuucuuuuuuugaaauaaaauagccugucuuucagaucucaaaggcucuuuucagagccaccaaaaaaaaaaaaaaaaaaaaaaaaaaaaaaaaaaaaaaaaaaaaaaaaaaaaaaaaaaaaaaaaaaaaaaaaaaaaaaaaaaaaaaaaaaaaaaaaaaaaa

SEQ ID NO: 12417 - RNA, 4196 nt, Artificial Sequence
  SARS-CoV-2/Wuhan/WIV05/2019__EPI_ISL_402128 spike protein mRNA gc (1-1147)(K986P_V987P_ H1048Q_H1064N_ H1083N_H1101N) LumSynth construct
aggagagucccgcagucggcguccagcggcucugcuuguucgugugugugucguugcaggccuuauucaagcuuaccauguucguguuccugguccuccugccccuggugagcucccagugcgugaaccucaccacccgcacgcagcugccgcccgccuacaccaacagcuucacccggggcgucuacuaccccgacaagguguuccgcuccagcgugcugcacuccacccaggaccucuuccugcccuucuucagcaacgucacgugguuccacgccauccacguguccgggaccaacggcaccaagcgguucgacaacccggugcugcccuucaacgacggggucuacuucgcgagcaccgagaaguccaacaucauccgcggcuggaucuucgggacgacccucgacagcaagacccagucccugcugaucgugaacaacgccaccaacguggucaucaaggugugcgaguuccaguucugcaacgaccccuuccucggcguguacuaccacaagaacaacaagagcuggauggaguccgaguuccgggucuacagcuccgccaacaacugcacguucgaguacgugagccagcccuuccugauggaccuggagggcaagcaggggaacuucaagaaccuccgcgaguucguguucaagaacaucgacggcuacuucaagaucuacuccaagcacaccccgaucaaccugguccgggaccugccccagggguucagcgcccucgagccccugguggaccugcccaucggcaucaacaucacccgcuuccagacccuccuggcccugcaccgguccuaccucacgccgggggacagcagcuccggcuggaccgcgggcgccgccgccuacuacgugggguaccugcagccccgcaccuuccugcucaaguacaacgagaacggcaccaucacggacgcggucgacugcgcccuggacccccugagcgagaccaagugcacccucaaguccuucaccguggagaaggggaucuaccagacgagcaacuuccgggugcagcccaccgaguccaucguccgcuucccgaacaucaccaaccugugccccuucggcgagguguucaacgccacccgguucgccagcgucuacgccuggaaccgcaagcggaucuccaacugcguggcggacuacagcgugcuguacaacuccgccagcuucuccacguucaagugcuacggcgucagccccaccaagcucaacgaccugugcuucaccaacguguacgccgacuccuucgugauccgcggggacgagguccggcagaucgcccccggccagaccgggaagaucgccgacuacaacuacaagcugccggacgacuucacgggcugcgugaucgcguggaacagcaacaaccucgacuccaaggucgggggcaacuacaacuaccuguaccgccuguuccgcaagagcaaccucaagcccuucgagcgggacaucuccaccgagaucuaccaggccggcagcacccccugcaacgggguggagggcuucaacugcuacuucccccugcaguccuacggguuccagccgaccaacggcgugggguaccagcccuaccggguggucgugcugagcuucgagcuccugcacgcccccgccacggugugcggccccaagaaguccaccaaccuggucaagaacaagugcgugaacuucaacuucaacggccucaccgggaccggcgugcugaccgagagcaacaagaaguuccugccguuccagcaguucgggcgcgacaucgccgacacgaccgacgcgguccgcgacccccagacccuggagauccucgacaucacccccugcagcuucggcgggguguccgugaucacgccgggcaccaacaccagcaaccaggucgccgugcuguaccaggacgugaacugcaccgagguccccguggccauccacgccgaccagcugacgcccaccuggcggguguacuccaccggcagcaacgucuuccagacccgcgccgggugccucaucggcgcggagcacgugaacaacuccuacgagugcgacauccccaucggggccggcaucugcgccagcuaccagacgcagaccaacuccccgcggcgcgcccggagcguggcgucccagagcaucaucgccuacaccaugucccugggcgccgagaacagcgucgccuacuccaacaacagcaucgccauccccaccaacuucacgaucuccgugaccaccgagauccugcccgugagcaugaccaagacgagcgucgacugcaccauguacaucugcggggacuccaccgagugcagcaaccuccugcugcaguacggcuccuucugcacccagcucaaccgcgcgcugacggggaucgccguggagcaggacaagaacacccaggagguguucgcccaggucaagcagaucuacaagacgcccccgaucaaggacuucggcggguucaacuucagccagauccugcccgaccccuccaagcccagcaagcgguccuucaucgaggaccuccuguucaacaaggugacccuggccgacgccggcuucaucaagcaguacggcgacugccucggggacaucgcggcccgcgaccugaucugcgcccagaaguucaacggccugaccgugcucccgccccugcugaccgacgagaugaucgcccaguacaccagcgcccuccuggcggggaccaucacguccggcuggaccuucggggccggcgccgcccugcagauccccuucgcgaugcagauggccuaccgguucaacggcaucggggucacccagaacgugcucuacgagaaccagaagcugaucgccaaccaguucaacagcgccaucggcaagauccaggacucccugagcuccaccgccagcgcgcucgggaagcugcaggacguggucaaccagaacgcccaggcccugaacacgcucgugaagcagcuguccagcaacuucggcgccaucuccagcgugcugaacgacauccucucccgccuggacccgcccgaggccgaggugcagaucgaccggcugaucaccgggcgccuccagagccugcagaccuacgugacccagcagcugauccgggcggccgagauccgcgccagcgccaaccucgccgcgaccaagauguccgagugcguccugggccagagcaagcggguggacuucugcggcaagggguaccagcugauguccuucccccagagcgccccgcacggcguggucuuccucaacgugacguacguccccgcccaggagaagaacuucaccaccgcccccgcgaucugcaacgacgggaaggcccacuucccccgcgagggcguguucguguccaacgggaccaacugguucgucacgcagcggaacuucuacgagccgcagaucaucaccaccgacaacaccuucgugagcggcaacugcgacguggucaucggcaucgugaacaacacgguguacgacccccugcagcccgagcuggacuccggcggcgggagcgggggcgggcagaucuacgagggcaagcugaccgccgaggggcuccgcuucggcaucguggccagccgguucaaccacgcgcuggucgaccgccugguggagggggccaucgacgccaucgugcggcacggcgggcgcgaggaggacaucacccucguccgggugcccggcuccugggagaucccgguggccgccggcgagcuggcccgcaaggaggacaucgacgcggucaucgccaucggggugcugauccggggcgccacgccccacuucgacuacaucgccagcgagguguccaaggggcucgcggaccugagccuggagcuccgcaagcccaucaccuucggcgucaucaccgccgacacccuggagcaggccaucgagcgggccgggacgaagcacggcaacaagggcugggaggccgcgcuguccgccaucgagauggccaaccucuucaagagccugcgcugaggacuagucccuguucccagagcccacuuuuuuuucuuuuuuugaaauaaaauagccugucuuucagaucucaaaggcucuuuucagagccaccaaaaaaaaaaaaaaaaaaaaaaaaaaaaaaaaaaaaaaaaaaaaaaaaaaaaaaaaaaaaaaaaaaaaaaaaaaaaaaaaaaaaaaaaaaaaaaaaaaaaa

SEQ ID NO: 12418 - RNA, 4196 nt, Artificial Sequence
  SARS-CoV-2/Wuhan/WIV05/2019__EPI_ISL_402128 spike protein mRNA gc (1-1147)(I712C_T1077C) LumSynth construct
aggagagucccgcagucggcguccagcggcucugcuuguucgugugugugucguugcaggccuuauucaagcuuaccauguucguguuccugguccuccugccccuggugagcucccagugcgugaaccucaccacccgcacgcagcugccgcccgccuacaccaacagcuucacccggggcgucuacuaccccgacaagguguuccgcuccagcgugcugcacuccacccaggaccucuuccugcccuucuucagcaacgucacgugguuccacgccauccacguguccgggaccaacggcaccaagcgguucgacaacccggugcugcccuucaacgacggggucuacuucgcgagcaccgagaaguccaacaucauccgcggcuggaucuucgggacgacccucgacagcaagacccagucccugcugaucgugaacaacgccaccaacguggucaucaaggugugcgaguuccaguucugcaacgaccccuuccucggcguguacuaccacaagaacaacaagagcuggauggaguccgaguuccgggucuacagcuccgccaacaacugcacguucgaguacgugagccagcccuuccugauggaccuggagggcaagcaggggaacuucaagaaccuccgcgaguucguguucaagaacaucgacggcuacuucaagaucuacuccaagcacaccccgaucaaccugguccgggaccugccccagggguucagcgcccucgagccccugguggaccugcccaucggcaucaacaucacccgcuuccagacccuccuggcccugcaccgguccuaccucacgccgggggacagcagcuccggcuggaccgcgggcgccgccgccuacuacgugggguaccugcagccccgcaccuuccugcucaaguacaacgagaacggcaccaucacggacgcggucgacugcgcccuggacccccugagcgagaccaagugcacccucaaguccuucaccguggagaaggggaucuaccagacgagcaacuuccgggugcagcccaccgaguccaucguccgcuucccgaacaucaccaaccugugccccuucggcgagguguucaacgccacccgguucgccagcgucuacgccuggaaccgcaagcggaucuccaacugcguggcggacuacagcgugcuguacaacuccgccagcuucuccacguucaagugcuacggcgucagccccaccaagcucaacgaccugugcuucaccaacguguacgccgacuccuucgugauccgcggggacgagguccggcagaucgcccccggccagaccgggaagaucgccgacuacaacuacaagcugccggacgacuucacgggcugcgugaucgcguggaacagcaacaaccucgacuccaaggucgggggcaacuacaacuaccuguaccgccuguuccgcaagagcaaccucaagcccuucgagcgggacaucuccaccgagaucuaccaggccggcagcacccccugcaacgggguggagggcuucaacugcuacuucccccugcaguccuacggguuccagccgaccaacggcgugggguaccagcccuaccggguggucgugcugagcuucgagcuccugcacgcccccgccacggugugcggccccaagaaguccaccaaccuggucaagaacaagugcgugaacuucaacuucaacggccucaccgggaccggcgugcugaccgagagcaacaagaaguuccugccguuccagcaguucgggcgcgacaucgccgacacgaccgacgcgguccgcgacccccagacccuggagauccucgacaucacccccugcagcuucggcgggguguccgugaucacgccgggcaccaacaccagcaaccaggucgccgugcuguaccaggacgugaacugcaccgagguccccguggccauccacgccgaccagcugacgcccaccuggcggguguacuccaccggcagcaacgucuuccagacccgcgccgggugccucaucggcgcggagcacgugaacaacuccuacgagugcgacauccccaucggggccggcaucugcgccagcuaccagacgcagaccaacuccccgcggcgcgcccggagcguggcgucccagagcaucaucgccuacaccaugucccugggcgccgagaacagcgucgccuacuccaacaacagcugcgccauccccaccaacuucacgaucuccgugaccaccgagauccugcccgugagcaugaccaagacgagcgucgacugcaccauguacaucugcggggacuccaccgagugcagcaaccuccugcugcaguacggcuccuucugcacccagcucaaccgcgcgcugacggggaucgccguggagcaggacaagaacacccaggagguguucgcccaggucaagcagaucuacaagacgcccccgaucaaggacuucggcggguucaacuucagccagauccugcccgaccccuccaagcccagcaagcgguccuucaucgaggaccuccuguucaacaaggugacccuggccgacgccggcuucaucaagcaguacggcgacugccucggggacaucgcggcccgcgaccugaucugcgcccagaaguucaacggccugaccgugcucccgccccugcugaccgacgagaugaucgcccaguacaccagcgcccuccuggcggggaccaucacguccggcuggaccuucggggccggcgccgcccugcagauccccuucgcgaugcagauggccuaccgguucaacggcaucggggucacccagaacgugcucuacgagaaccagaagcugaucgccaaccaguucaacagcgccaucggcaagauccaggacucccugagcuccaccgccagcgcgcucgggaagcugcaggacguggucaaccagaacgcccaggcccugaacacgcucgugaagcagcuguccagcaacuucggcgccaucuccagcgugcugaacgacauccucucccgccuggacaaggucgaggccgaggugcagaucgaccggcugaucaccgggcgccuccagagccugcagaccuacgugacccagcagcugauccgggcggccgagauccgcgccagcgccaaccucgccgcgaccaagauguccgagugcguccugggccagagcaagcggguggacuucugcggcaagggguaccaccugauguccuucccccagagcgccccgcacggcguggucuuccuccacgugacguacguccccgcccaggagaagaacuucaccugcgcccccgcgaucugccacgacgggaaggcccacuucccccgcgagggcguguucguguccaacgggacccacugguucgucacgcagcggaacuucuacgagccgcagaucaucaccaccgacaacaccuucgugagcggcaacugcgacguggucaucggcaucgugaacaacacgguguacgacccccugcagcccgagcuggacuccggcggcgggagcgggggcgggcagaucuacgagggcaagcugaccgccgaggggcuccgcuucggcaucguggccagccgguucaaccacgcgcuggucgaccgccugguggagggggccaucgacgccaucgugcggcacggcgggcgcgaggaggacaucacccucguccgggugcccggcuccugggagaucccgguggccgccggcgagcuggcccgcaaggaggacaucgacgcggucaucgccaucggggugcugauccggggcgccacgccccacuucgacuacaucgccagcgagguguccaaggggcucgcggaccugagccuggagcuccgcaagcccaucaccuucggcgucaucaccgccgacacccuggagcaggccaucgagcgggccgggacgaagcacggcaacaagggcugggaggccgcgcuguccgccaucgagauggccaaccucuucaagagccugcgcugaggacuagucccuguucccagagcccacuuuuuuuucuuuuuuugaaauaaaauagccugucuuucagaucucaaaggcucuuuucagagccaccaaaaaaaaaaaaaaaaaaaaaaaaaaaaaaaaaaaaaaaaaaaaaaaaaaaaaaaaaaaaaaaaaaaaaaaaaaaaaaaaaaaaaaaaaaaaaaaaaaaaa

SEQ ID NO: 12419 - RNA, 4196 nt, Artificial Sequence
  SARS-CoV-2/Wuhan/WIV05/2019__EPI_ISL_402128 spike protein mRNA gc (1-1147)(I714C_Y1110C) LumSynth construct
aggagagucccgcagucggcguccagcggcucugcuuguucgugugugugucguugcaggccuuauucaagcuuaccauguucguguuccugguccuccugccccuggugagcucccagugcgugaaccucaccacccgcacgcagcugccgcccgccuacaccaacagcuucacccggggcgucuacuaccccgacaagguguuccgcuccagcgugcugcacuccacccaggaccucuuccugcccuucuucagcaacgucacgugguuccacgccauccacguguccgggaccaacggcaccaagcgguucgacaacccggugcugcccuucaacgacggggucuacuucgcgagcaccgagaaguccaacaucauccgcggcuggaucuucgggacgacccucgacagcaagacccagucccugcugaucgugaacaacgccaccaacguggucaucaaggugugcgaguuccaguucugcaacgaccccuuccucggcguguacuaccacaagaacaacaagagcuggauggaguccgaguuccgggucuacagcuccgccaacaacugcacguucgaguacgugagccagcccuuccugauggaccuggagggcaagcaggggaacuucaagaaccuccgcgaguucguguucaagaacaucgacggcuacuucaagaucuacuccaagcacaccccgaucaaccugguccgggaccugccccagggguucagcgcccucgagccccugguggaccugcccaucggcaucaacaucacccgcuuccagacccuccuggcccugcaccgguccuaccucacgccgggggacagcagcuccggcuggaccgcgggcgccgccgccuacuacgugggguaccugcagccccgcaccuuccugcucaaguacaacgagaacggcaccaucacggacgcggucgacugcgcccuggacccccugagcgagaccaagugcacccucaaguccuucaccguggagaaggggaucuaccagacgagcaacuuccgggugcagcccaccgaguccaucguccgcuucccgaacaucaccaaccugugccccuucggcgagguguucaacgccacccgguucgccagcgucuacgccuggaaccgcaagcggaucuccaacugcguggcggacuacagcgugcuguacaacuccgccagcuucuccacguucaagugcuacggcgucagccccaccaagcucaacgaccugugcuucaccaacguguacgccgacuccuucgugauccgcggggacgagguccggcagaucgcccccggccagaccgggaagaucgccgacuacaacuacaagcugccggacgacuucacgggcugcgugaucgcguggaacagcaacaaccucgacuccaaggucgggggcaacuacaacuaccuguaccgccuguuccgcaagagcaaccucaagcccuucgagcgggacaucuccaccgagaucuaccaggccggcagcacccccugcaacgggguggagggcuucaacugcuacuucccccugcaguccuacggguuccagccgaccaacggcgugggguaccagcccuaccggguggucgugcugagcuucgagcuccugcacgcccccgccacggugugcggccccaagaaguccaccaaccuggucaagaacaagugcgugaacuucaacuucaacggccucaccgggaccggcgugcugaccgagagcaacaagaaguuccugccguuccagcaguucgggcgcgacaucgccgacacgaccgacgcgguccgcgacccccagacccuggagauccucgacaucacccccugcagcuucggcgggguguccgugaucacgccgggcaccaacaccagcaaccaggucgccgugcuguaccaggacgugaacugcaccgagguccccguggccauccacgccgaccagcugacgcccaccuggcggguguacuccaccggcagcaacgucuuccagacccgcgccgggugccucaucggcgcggagcacgugaacaacuccuacgagugcgacauccccaucggggccggcaucugcgccagcuaccagacgcagaccaacuccccgcggcgcgcccggagcguggcgucccagagcaucaucgccuacaccaugucccugggcgccgagaacagcgucgccuacuccaacaacagcaucgccugccccaccaacuucacgaucuccgugaccaccgagauccugcccgugagcaugaccaagacgagcgucgacugcaccauguacaucugcggggacuccaccgagugcagcaaccuccugcugcaguacggcuccuucugcacccagcucaaccgcgcgcugacggggaucgccguggagcaggacaagaacacccaggagguguucgcccaggucaagcagaucuacaagacgcccccgaucaaggacuucggcggguucaacuucagccagauccugcccgaccccuccaagcccagcaagcgguccuucaucgaggaccuccuguucaacaaggugacccuggccgacgccggcuucaucaagcaguacggcgacugccucggggacaucgcggcccgcgaccugaucugcgcccagaaguucaacggccugaccgugcucccgccccugcugaccgacgagaugaucgcccaguacaccagcgcccuccuggcggggaccaucacguccggcuggaccuucggggccggcgccgcccugcagauccccuucgcgaugcagauggccuaccgguucaacggcaucggggucacccagaacgugcucuacgagaaccagaagcugaucgccaaccaguucaacagcgccaucggcaagauccaggacucccugagcuccaccgccagcgcgcucgggaagcugcaggacguggucaaccagaacgcccaggcccugaacacgcucgugaagcagcuguccagcaacuucggcgccaucuccagcgugcugaacgacauccucucccgccuggacaaggucgaggccgaggugcagaucgaccggcugaucaccgggcgccuccagagccugcagaccuacgugacccagcagcugauccgggcggccgagauccgcgccagcgccaaccucgccgcgaccaagauguccgagugcguccugggccagagcaagcggguggacuucugcggcaagggguaccaccugauguccuucccccagagcgccccgcacggcguggucuuccuccacgugacguacguccccgcccaggagaagaacuucaccaccgcccccgcgaucugccacgacgggaaggcccacuucccccgcgagggcguguucguguccaacgggacccacugguucgucacgcagcggaacuucugcgagccgcagaucaucaccaccgacaacaccuucgugagcggcaacugcgacguggucaucggcaucgugaacaacacgguguacgacccccugcagcccgagcuggacuccggcggcgggagcgggggcgggcagaucuacgagggcaagcugaccgccgaggggcuccgcuucggcaucguggccagccgguucaaccacgcgcuggucgaccgccugguggagggggccaucgacgccaucgugcggcacggcgggcgcgaggaggacaucacccucguccgggugcccggcuccugggagaucccgguggccgccggcgagcuggcccgcaaggaggacaucgacgcggucaucgccaucggggugcugauccggggcgccacgccccacuucgacuacaucgccagcgagguguccaaggggcucgcggaccugagccuggagcuccgcaagcccaucaccuucggcgucaucaccgccgacacccuggagcaggccaucgagcgggccgggacgaagcacggcaacaagggcugggaggccgcgcuguccgccaucgagauggccaaccucuucaagagccugcgcugaggacuagucccuguucccagagcccacuuuuuuuucuuuuuuugaaauaaaauagccugucuuucagaucucaaaggcucuuuucagagccaccaaaaaaaaaaaaaaaaaaaaaaaaaaaaaaaaaaaaaaaaaaaaaaaaaaaaaaaaaaaaaaaaaaaaaaaaaaaaaaaaaaaaaaaaaaaaaaaaaaaaa

SEQ ID NO: 12420 - RNA, 4196 nt, Artificial Sequence
  SARS-CoV-2/Wuhan/WIV05/2019__EPI_ISL_402128 spike protein mRNA gc (1-1147)(P715C_P1069C) LumSynth construct
aggagagucccgcagucggcguccagcggcucugcuuguucgugugugugucguugcaggccuuauucaagcuuaccauguucguguuccugguccuccugccccuggugagcucccagugcgugaaccucaccacccgcacgcagcugccgcccgccuacaccaacagcuucacccggggcgucuacuaccccgacaagguguuccgcuccagcgugcugcacuccacccaggaccucuuccugcccuucuucagcaacgucacgugguuccacgccauccacguguccgggaccaacggcaccaagcgguucgacaacccggugcugcccuucaacgacggggucuacuucgcgagcaccgagaaguccaacaucauccgcggcuggaucuucgggacgacccucgacagcaagacccagucccugcugaucgugaacaacgccaccaacguggucaucaaggugugcgaguuccaguucugcaacgaccccuuccucggcguguacuaccacaagaacaacaagagcuggauggaguccgaguuccgggucuacagcuccgccaacaacugcacguucgaguacgugagccagcccuuccugauggaccuggagggcaagcaggggaacuucaagaaccuccgcgaguucguguucaagaacaucgacggcuacuucaagaucuacuccaagcacaccccgaucaaccugguccgggaccugccccagggguucagcgcccucgagccccugguggaccugcccaucggcaucaacaucacccgcuuccagacccuccuggcccugcaccgguccuaccucacgccgggggacagcagcuccggcuggaccgcgggcgccgccgccuacuacgugggguaccugcagccccgcaccuuccugcucaaguacaacgagaacggcaccaucacggacgcggucgacugcgcccuggacccccugagcgagaccaagugcacccucaaguccuucaccguggagaaggggaucuaccagacgagcaacuuccgggugcagcccaccgaguccaucguccgcuucccgaacaucaccaaccugugccccuucggcgagguguucaacgccacccgguucgccagcgucuacgccuggaaccgcaagcggaucuccaacugcguggcggacuacagcgugcuguacaacuccgccagcuucuccacguucaagugcuacggcgucagccccaccaagcucaacgaccugugcuucaccaacguguacgccgacuccuucgugauccgcggggacgagguccggcagaucgcccccggccagaccgggaagaucgccgacuacaacuacaagcugccggacgacuucacgggcugcgugaucgcguggaacagcaacaaccucgacuccaaggucgggggcaacuacaacuaccuguaccgccuguuccgcaagagcaaccucaagcccuucgagcgggacaucuccaccgagaucuaccaggccggcagcacccccugcaacgggguggagggcuucaacugcuacuucccccugcaguccuacggguuccagccgaccaacggcgugggguaccagcccuaccggguggucgugcugagcuucgagcuccugcacgcccccgccacggugugcggccccaagaaguccaccaaccuggucaagaacaagugcgugaacuucaacuucaacggccucaccgggaccggcgugcugaccgagagcaacaagaaguuccugccguuccagcaguucgggcgcgacaucgccgacacgaccgacgcgguccgcgacccccagacccuggagauccucgacaucacccccugcagcuucggcgggguguccgugaucacgccgggcaccaacaccagcaaccaggucgccgugcuguaccaggacgugaacugcaccgagguccccguggccauccacgccgaccagcugacgcccaccuggcggguguacuccaccggcagcaacgucuuccagacccgcgccgggugccucaucggcgcggagcacgugaacaacuccuacgagugcgacauccccaucggggccggcaucugcgccagcuaccagacgcagaccaacuccccgcggcgcgcccggagcguggcgucccagagcaucaucgccuacaccaugucccugggcgccgagaacagcgucgccuacuccaacaacagcaucgccaucugcaccaacuucacgaucuccgugaccaccgagauccugcccgugagcaugaccaagacgagcgucgacugcaccauguacaucugcggggacuccaccgagugcagcaaccuccugcugcaguacggcuccuucugcacccagcucaaccgcgcgcugacggggaucgccguggagcaggacaagaacacccaggagguguucgcccaggucaagcagaucuacaagacgcccccgaucaaggacuucggcggguucaacuucagccagauccugcccgaccccuccaagcccagcaagcgguccuucaucgaggaccuccuguucaacaaggugacccuggccgacgccggcuucaucaagcaguacggcgacugccucggggacaucgcggcccgcgaccugaucugcgcccagaaguucaacggccugaccgugcucccgccccugcugaccgacgagaugaucgcccaguacaccagcgcccuccuggcggggaccaucacguccggcuggaccuucggggccggcgccgcccugcagauccccuucgcgaugcagauggccuaccgguucaacggcaucggggucacccagaacgugcucuacgagaaccagaagcugaucgccaaccaguucaacagcgccaucggcaagauccaggacucccugagcuccaccgccagcgcgcucgggaagcugcaggacguggucaaccagaacgcccaggcccugaacacgcucgugaagcagcuguccagcaacuucggcgccaucuccagcgugcugaacgacauccucucccgccuggacaaggucgaggccgaggugcagaucgaccggcugaucaccgggcgccuccagagccugcagaccuacgugacccagcagcugauccgggcggccgagauccgcgccagcgccaaccucgccgcgaccaagauguccgagugcguccugggccagagcaagcggguggacuucugcggcaagggguaccaccugauguccuucccccagagcgccccgcacggcguggucuuccuccacgugacguacgucugcgcccaggagaagaacuucaccaccgcccccgcgaucugccacgacgggaaggcccacuucccccgcgagggcguguucguguccaacgggacccacugguucgucacgcagcggaacuucuacgagccgcagaucaucaccaccgacaacaccuucgugagcggcaacugcgacguggucaucggcaucgugaacaacacgguguacgacccccugcagcccgagcuggacuccggcggcgggagcgggggcgggcagaucuacgagggcaagcugaccgccgaggggcuccgcuucggcaucguggccagccgguucaaccacgcgcuggucgaccgccugguggagggggccaucgacgccaucgugcggcacggcgggcgcgaggaggacaucacccucguccgggugcccggcuccugggagaucccgguggccgccggcgagcuggcccgcaaggaggacaucgacgcggucaucgccaucggggugcugauccggggcgccacgccccacuucgacuacaucgccagcgagguguccaaggggcucgcggaccugagccuggagcuccgcaagcccaucaccuucggcgucaucaccgccgacacccuggagcaggccaucgagcgggccgggacgaagcacggcaacaagggcugggaggccgcgcuguccgccaucgagauggccaaccucuucaagagccugcgcugaggacuagucccuguucccagagcccacuuuuuuuucuuuuuuugaaauaaaauagccugucuuucagaucucaaaggcucuuuucagagccaccaaaaaaaaaaaaaaaaaaaaaaaaaaaaaaaaaaaaaaaaaaaaaaaaaaaaaaaaaaaaaaaaaaaaaaaaaaaaaaaaaaaaaaaaaaaaaaaaaaaaa

SEQ ID NO: 12421 - RNA, 4196 nt, Artificial Sequence
  SARS-CoV-2/Wuhan/WIV05/2019__EPI_ISL_402128 spike protein mRNA gc (1-1147)(G889C_L1034C) LumSynth construct
aggagagucccgcagucggcguccagcggcucugcuuguucgugugugugucguugcaggccuuauucaagcuuaccauguucguguuccugguccuccugccccuggugagcucccagugcgugaaccucaccacccgcacgcagcugccgcccgccuacaccaacagcuucacccggggcgucuacuaccccgacaagguguuccgcuccagcgugcugcacuccacccaggaccucuuccugcccuucuucagcaacgucacgugguuccacgccauccacguguccgggaccaacggcaccaagcgguucgacaacccggugcugcccuucaacgacggggucuacuucgcgagcaccgagaaguccaacaucauccgcggcuggaucuucgggacgacccucgacagcaagacccagucccugcugaucgugaacaacgccaccaacguggucaucaaggugugcgaguuccaguucugcaacgaccccuuccucggcguguacuaccacaagaacaacaagagcuggauggaguccgaguuccgggucuacagcuccgccaacaacugcacguucgaguacgugagccagcccuuccugauggaccuggagggcaagcaggggaacuucaagaaccuccgcgaguucguguucaagaacaucgacggcuacuucaagaucuacuccaagcacaccccgaucaaccugguccgggaccugccccagggguucagcgcccucgagccccugguggaccugcccaucggcaucaacaucacccgcuuccagacccuccuggcccugcaccgguccuaccucacgccgggggacagcagcuccggcuggaccgcgggcgccgccgccuacuacgugggguaccugcagccccgcaccuuccugcucaaguacaacgagaacggcaccaucacggacgcggucgacugcgcccuggacccccugagcgagaccaagugcacccucaaguccuucaccguggagaaggggaucuaccagacgagcaacuuccgggugcagcccaccgaguccaucguccgcuucccgaacaucaccaaccugugccccuucggcgagguguucaacgccacccgguucgccagcgucuacgccuggaaccgcaagcggaucuccaacugcguggcggacuacagcgugcuguacaacuccgccagcuucuccacguucaagugcuacggcgucagccccaccaagcucaacgaccugugcuucaccaacguguacgccgacuccuucgugauccgcggggacgagguccggcagaucgcccccggccagaccgggaagaucgccgacuacaacuacaagcugccggacgacuucacgggcugcgugaucgcguggaacagcaacaaccucgacuccaaggucgggggcaacuacaacuaccuguaccgccuguuccgcaagagcaaccucaagcccuucgagcgggacaucuccaccgagaucuaccaggccggcagcacccccugcaacgggguggagggcuucaacugcuacuucccccugcaguccuacggguuccagccgaccaacggcgugggguaccagcccuaccggguggucgugcugagcuucgagcuccugcacgcccccgccacggugugcggccccaagaaguccaccaaccuggucaagaacaagugcgugaacuucaacuucaacggccucaccgggaccggcgugcugaccgagagcaacaagaaguuccugccguuccagcaguucgggcgcgacaucgccgacacgaccgacgcgguccgcgacccccagacccuggagauccucgacaucacccccugcagcuucggcgggguguccgugaucacgccgggcaccaacaccagcaaccaggucgccgugcuguaccaggacgugaacugcaccgagguccccguggccauccacgccgaccagcugacgcccaccuggcggguguacuccaccggcagcaacgucuuccagacccgcgccgggugccucaucggcgcggagcacgugaacaacuccuacgagugcgacauccccaucggggccggcaucugcgccagcuaccagacgcagaccaacuccccgcggcgcgcccggagcguggcgucccagagcaucaucgccuacaccaugucccugggcgccgagaacagcgucgccuacuccaacaacagcaucgccauccccaccaacuucacgaucuccgugaccaccgagauccugcccgugagcaugaccaagacgagcgucgacugcaccauguacaucugcggggacuccaccgagugcagcaaccuccugcugcaguacggcuccuucugcacccagcucaaccgcgcgcugacggggaucgccguggagcaggacaagaacacccaggagguguucgcccaggucaagcagaucuacaagacgcccccgaucaaggacuucggcggguucaacuucagccagauccugcccgaccccuccaagcccagcaagcgguccuucaucgaggaccuccuguucaacaaggugacccuggccgacgccggcuucaucaagcaguacggcgacugccucggggacaucgcggcccgcgaccugaucugcgcccagaaguucaacggccugaccgugcucccgccccugcugaccgacgagaugaucgcccaguacaccagcgcccuccuggcggggaccaucacguccggcuggaccuucugcgccggcgccgcccugcagauccccuucgcgaugcagauggccuaccgguucaacggcaucggggucacccagaacgugcucuacgagaaccagaagcugaucgccaaccaguucaacagcgccaucggcaagauccaggacucccugagcuccaccgccagcgcgcucgggaagcugcaggacguggucaaccagaacgcccaggcccugaacacgcucgugaagcagcuguccagcaacuucggcgccaucuccagcgugcugaacgacauccucucccgccuggacaaggucgaggccgaggugcagaucgaccggcugaucaccgggcgccuccagagccugcagaccuacgugacccagcagcugauccgggcggccgagauccgcgccagcgccaaccucgccgcgaccaagauguccgagugcgucugcggccagagcaagcggguggacuucugcggcaagggguaccaccugauguccuucccccagagcgccccgcacggcguggucuuccuccacgugacguacguccccgcccaggagaagaacuucaccaccgcccccgcgaucugccacgacgggaaggcccacuucccccgcgagggcguguucguguccaacgggacccacugguucgucacgcagcggaacuucuacgagccgcagaucaucaccaccgacaacaccuucgugagcggcaacugcgacguggucaucggcaucgugaacaacacgguguacgacccccugcagcccgagcuggacuccggcggcgggagcgggggcgggcagaucuacgagggcaagcugaccgccgaggggcuccgcuucggcaucguggccagccgguucaaccacgcgcuggucgaccgccugguggagggggccaucgacgccaucgugcggcacggcgggcgcgaggaggacaucacccucguccgggugcccggcuccugggagaucccgguggccgccggcgagcuggcccgcaaggaggacaucgacgcggucaucgccaucggggugcugauccggggcgccacgccccacuucgacuacaucgccagcgagguguccaaggggcucgcggaccugagccuggagcuccgcaagcccaucaccuucggcgucaucaccgccgacacccuggagcaggccaucgagcgggccgggacgaagcacggcaacaagggcugggaggccgcgcuguccgccaucgagauggccaaccucuucaagagccugcgcugaggacuagucccuguucccagagcccacuuuuuuuucuuuuuuugaaauaaaauagccugucuuucagaucucaaaggcucuuuucagagccaccaaaaaaaaaaaaaaaaaaaaaaaaaaaaaaaaaaaaaaaaaaaaaaaaaaaaaaaaaaaaaaaaaaaaaaaaaaaaaaaaaaaaaaaaaaaaaaaaaaaaa

SEQ ID NO: 12422 - RNA, 4196 nt, Artificial Sequence
  SARS-CoV-2/Wuhan/WIV05/2019__EPI_ISL_402128 spike protein mRNA gc (1-1147)(I909C_Y1047C) LumSynth construct
aggagagucccgcagucggcguccagcggcucugcuuguucgugugugugucguugcaggccuuauucaagcuuaccauguucguguuccugguccuccugccccuggugagcucccagugcgugaaccucaccacccgcacgcagcugccgcccgccuacaccaacagcuucacccggggcgucuacuaccccgacaagguguuccgcuccagcgugcugcacuccacccaggaccucuuccugcccuucuucagcaacgucacgugguuccacgccauccacguguccgggaccaacggcaccaagcgguucgacaacccggugcugcccuucaacgacggggucuacuucgcgagcaccgagaaguccaacaucauccgcggcuggaucuucgggacgacccucgacagcaagacccagucccugcugaucgugaacaacgccaccaacguggucaucaaggugugcgaguuccaguucugcaacgaccccuuccucggcguguacuaccacaagaacaacaagagcuggauggaguccgaguuccgggucuacagcuccgccaacaacugcacguucgaguacgugagccagcccuuccugauggaccuggagggcaagcaggggaacuucaagaaccuccgcgaguucguguucaagaacaucgacggcuacuucaagaucuacuccaagcacaccccgaucaaccugguccgggaccugccccagggguucagcgcccucgagccccugguggaccugcccaucggcaucaacaucacccgcuuccagacccuccuggcccugcaccgguccuaccucacgccgggggacagcagcuccggcuggaccgcgggcgccgccgccuacuacgugggguaccugcagccccgcaccuuccugcucaaguacaacgagaacggcaccaucacggacgcggucgacugcgcccuggacccccugagcgagaccaagugcacccucaaguccuucaccguggagaaggggaucuaccagacgagcaacuuccgggugcagcccaccgaguccaucguccgcuucccgaacaucaccaaccugugccccuucggcgagguguucaacgccacccgguucgccagcgucuacgccuggaaccgcaagcggaucuccaacugcguggcggacuacagcgugcuguacaacuccgccagcuucuccacguucaagugcuacggcgucagccccaccaagcucaacgaccugugcuucaccaacguguacgccgacuccuucgugauccgcggggacgagguccggcagaucgcccccggccagaccgggaagaucgccgacuacaacuacaagcugccggacgacuucacgggcugcgugaucgcguggaacagcaacaaccucgacuccaaggucgggggcaacuacaacuaccuguaccgccuguuccgcaagagcaaccucaagcccuucgagcgggacaucuccaccgagaucuaccaggccggcagcacccccugcaacgggguggagggcuucaacugcuacuucccccugcaguccuacggguuccagccgaccaacggcgugggguaccagcccuaccggguggucgugcugagcuucgagcuccugcacgcccccgccacggugugcggccccaagaaguccaccaaccuggucaagaacaagugcgugaacuucaacuucaacggccucaccgggaccggcgugcugaccgagagcaacaagaaguuccugccguuccagcaguucgggcgcgacaucgccgacacgaccgacgcgguccgcgacccccagacccuggagauccucgacaucacccccugcagcuucggcgggguguccgugaucacgccgggcaccaacaccagcaaccaggucgccgugcuguaccaggacgugaacugcaccgagguccccguggccauccacgccgaccagcugacgcccaccuggcggguguacuccaccggcagcaacgucuuccagacccgcgccgggugccucaucggcgcggagcacgugaacaacuccuacgagugcgacauccccaucggggccggcaucugcgccagcuaccagacgcagaccaacuccccgcggcgcgcccggagcguggcgucccagagcaucaucgccuacaccaugucccugggcgccgagaacagcgucgccuacuccaacaacagcaucgccauccccaccaacuucacgaucuccgugaccaccgagauccugcccgugagcaugaccaagacgagcgucgacugcaccauguacaucugcggggacuccaccgagugcagcaaccuccugcugcaguacggcuccuucugcacccagcucaaccgcgcgcugacggggaucgccguggagcaggacaagaacacccaggagguguucgcccaggucaagcagaucuacaagacgcccccgaucaaggacuucggcggguucaacuucagccagauccugcccgaccccuccaagcccagcaagcgguccuucaucgaggaccuccuguucaacaaggugacccuggccgacgccggcuucaucaagcaguacggcgacugccucggggacaucgcggcccgcgaccugaucugcgcccagaaguucaacggccugaccgugcucccgccccugcugaccgacgagaugaucgcccaguacaccagcgcccuccuggcggggaccaucacguccggcuggaccuucggggccggcgccgcccugcagauccccuucgcgaugcagauggccuaccgguucaacggcugcggggucacccagaacgugcucuacgagaaccagaagcugaucgccaaccaguucaacagcgccaucggcaagauccaggacucccugagcuccaccgccagcgcgcucgggaagcugcaggacguggucaaccagaacgcccaggcccugaacacgcucgugaagcagcuguccagcaacuucggcgccaucuccagcgugcugaacgacauccucucccgccuggacaaggucgaggccgaggugcagaucgaccggcugaucaccgggcgccuccagagccugcagaccuacgugacccagcagcugauccgggcggccgagauccgcgccagcgccaaccucgccgcgaccaagauguccgagugcguccugggccagagcaagcggguggacuucugcggcaaggggugccaccugauguccuucccccagagcgccccgcacggcguggucuuccuccacgugacguacguccccgcccaggagaagaacuucaccaccgcccccgcgaucugccacgacgggaaggcccacuucccccgcgagggcguguucguguccaacgggacccacugguucgucacgcagcggaacuucuacgagccgcagaucaucaccaccgacaacaccuucgugagcggcaacugcgacguggucaucggcaucgugaacaacacgguguacgacccccugcagcccgagcuggacuccggcggcgggagcgggggcgggcagaucuacgagggcaagcugaccgccgaggggcuccgcuucggcaucguggccagccgguucaaccacgcgcuggucgaccgccugguggagggggccaucgacgccaucgugcggcacggcgggcgcgaggaggacaucacccucguccgggugcccggcuccugggagaucccgguggccgccggcgagcuggcccgcaaggaggacaucgacgcggucaucgccaucggggugcugauccggggcgccacgccccacuucgacuacaucgccagcgagguguccaaggggcucgcggaccugagccuggagcuccgcaagcccaucaccuucggcgucaucaccgccgacacccuggagcaggccaucgagcgggccgggacgaagcacggcaacaagggcugggaggccgcgcuguccgccaucgagauggccaaccucuucaagagccugcgcugaggacuagucccuguucccagagcccacuuuuuuuucuuuuuuugaaauaaaauagccugucuuucagaucucaaaggcucuuuucagagccaccaaaaaaaaaaaaaaaaaaaaaaaaaaaaaaaaaaaaaaaaaaaaaaaaaaaaaaaaaaaaaaaaaaaaaaaaaaaaaaaaaaaaaaaaaaaaaaaaaaaaa

SEQ ID NO: 12423 - RNA, 4196 nt, Artificial Sequence
  SARS-CoV-2/Wuhan/WIV05/2019__EPI_ISL_402128 spike protein mRNA gc (1-1147)(Q965C_S1003C) LumSynth construct
aggagagucccgcagucggcguccagcggcucugcuuguucgugugugugucguugcaggccuuauucaagcuuaccauguucguguuccugguccuccugccccuggugagcucccagugcgugaaccucaccacccgcacgcagcugccgcccgccuacaccaacagcuucacccggggcgucuacuaccccgacaagguguuccgcuccagcgugcugcacuccacccaggaccucuuccugcccuucuucagcaacgucacgugguuccacgccauccacguguccgggaccaacggcaccaagcgguucgacaacccggugcugcccuucaacgacggggucuacuucgcgagcaccgagaaguccaacaucauccgcggcuggaucuucgggacgacccucgacagcaagacccagucccugcugaucgugaacaacgccaccaacguggucaucaaggugugcgaguuccaguucugcaacgaccccuuccucggcguguacuaccacaagaacaacaagagcuggauggaguccgaguuccgggucuacagcuccgccaacaacugcacguucgaguacgugagccagcccuuccugauggaccuggagggcaagcaggggaacuucaagaaccuccgcgaguucguguucaagaacaucgacggcuacuucaagaucuacuccaagcacaccccgaucaaccugguccgggaccugccccagggguucagcgcccucgagccccugguggaccugcccaucggcaucaacaucacccgcuuccagacccuccuggcccugcaccgguccuaccucacgccgggggacagcagcuccggcuggaccgcgggcgccgccgccuacuacgugggguaccugcagccccgcaccuuccugcucaaguacaacgagaacggcaccaucacggacgcggucgacugcgcccuggacccccugagcgagaccaagugcacccucaaguccuucaccguggagaaggggaucuaccagacgagcaacuuccgggugcagcccaccgaguccaucguccgcuucccgaacaucaccaaccugugccccuucggcgagguguucaacgccacccgguucgccagcgucuacgccuggaaccgcaagcggaucuccaacugcguggcggacuacagcgugcuguacaacuccgccagcuucuccacguucaagugcuacggcgucagccccaccaagcucaacgaccugugcuucaccaacguguacgccgacuccuucgugauccgcggggacgagguccggcagaucgcccccggccagaccgggaagaucgccgacuacaacuacaagcugccggacgacuucacgggcugcgugaucgcguggaacagcaacaaccucgacuccaaggucgggggcaacuacaacuaccuguaccgccuguuccgcaagagcaaccucaagcccuucgagcgggacaucuccaccgagaucuaccaggccggcagcacccccugcaacgggguggagggcuucaacugcuacuucccccugcaguccuacggguuccagccgaccaacggcgugggguaccagcccuaccggguggucgugcugagcuucgagcuccugcacgcccccgccacggugugcggccccaagaaguccaccaaccuggucaagaacaagugcgugaacuucaacuucaacggccucaccgggaccggcgugcugaccgagagcaacaagaaguuccugccguuccagcaguucgggcgcgacaucgccgacacgaccgacgcgguccgcgacccccagacccuggagauccucgacaucacccccugcagcuucggcgggguguccgugaucacgccgggcaccaacaccagcaaccaggucgccgugcuguaccaggacgugaacugcaccgagguccccguggccauccacgccgaccagcugacgcccaccuggcggguguacuccaccggcagcaacgucuuccagacccgcgccgggugccucaucggcgcggagcacgugaacaacuccuacgagugcgacauccccaucggggccggcaucugcgccagcuaccagacgcagaccaacuccccgcggcgcgcccggagcguggcgucccagagcaucaucgccuacaccaugucccugggcgccgagaacagcgucgccuacuccaacaacagcaucgccauccccaccaacuucacgaucuccgugaccaccgagauccugcccgugagcaugaccaagacgagcgucgacugcaccauguacaucugcggggacuccaccgagugcagcaaccuccugcugcaguacggcuccuucugcacccagcucaaccgcgcgcugacggggaucgccguggagcaggacaagaacacccaggagguguucgcccaggucaagcagaucuacaagacgcccccgaucaaggacuucggcggguucaacuucagccagauccugcccgaccccuccaagcccagcaagcgguccuucaucgaggaccuccuguucaacaaggugacccuggccgacgccggcuucaucaagcaguacggcgacugccucggggacaucgcggcccgcgaccugaucugcgcccagaaguucaacggccugaccgugcucccgccccugcugaccgacgagaugaucgcccaguacaccagcgcccuccuggcggggaccaucacguccggcuggaccuucggggccggcgccgcccugcagauccccuucgcgaugcagauggccuaccgguucaacggcaucggggucacccagaacgugcucuacgagaaccagaagcugaucgccaaccaguucaacagcgccaucggcaagauccaggacucccugagcuccaccgccagcgcgcucgggaagcugcaggacguggucaaccagaacgcccaggcccugaacacgcucgugaagugccuguccagcaacuucggcgccaucuccagcgugcugaacgacauccucucccgccuggacaaggucgaggccgaggugcagaucgaccggcugaucaccgggcgccuccagugccugcagaccuacgugacccagcagcugauccgggcggccgagauccgcgccagcgccaaccucgccgcgaccaagauguccgagugcguccugggccagagcaagcggguggacuucugcggcaagggguaccaccugauguccuucccccagagcgccccgcacggcguggucuuccuccacgugacguacguccccgcccaggagaagaacuucaccaccgcccccgcgaucugccacgacgggaaggcccacuucccccgcgagggcguguucguguccaacgggacccacugguucgucacgcagcggaacuucuacgagccgcagaucaucaccaccgacaacaccuucgugagcggcaacugcgacguggucaucggcaucgugaacaacacgguguacgacccccugcagcccgagcuggacuccggcggcgggagcgggggcgggcagaucuacgagggcaagcugaccgccgaggggcuccgcuucggcaucguggccagccgguucaaccacgcgcuggucgaccgccugguggagggggccaucgacgccaucgugcggcacggcgggcgcgaggaggacaucacccucguccgggugcccggcuccugggagaucccgguggccgccggcgagcuggcccgcaaggaggacaucgacgcggucaucgccaucggggugcugauccggggcgccacgccccacuucgacuacaucgccagcgagguguccaaggggcucgcggaccugagccuggagcuccgcaagcccaucaccuucggcgucaucaccgccgacacccuggagcaggccaucgagcgggccgggacgaagcacggcaacaagggcugggaggccgcgcuguccgccaucgagauggccaaccucuucaagagccugcgcugaggacuagucccuguucccagagcccacuuuuuuuucuuuuuuugaaauaaaauagccugucuuucagaucucaaaggcucuuuucagagccaccaaaaaaaaaaaaaaaaaaaaaaaaaaaaaaaaaaaaaaaaaaaaaaaaaaaaaaaaaaaaaaaaaaaaaaaaaaaaaaaaaaaaaaaaaaaaaaaaaaaaa

SEQ ID NO: 12424 - RNA, 4196 nt, Artificial Sequence
  SARS-CoV-2/Wuhan/WIV05/2019__EPI_ISL_402128 spike protein mRNA gc (1-1147)(F970C_G999C) LumSynth construct
aggagagucccgcagucggcguccagcggcucugcuuguucgugugugugucguugcaggccuuauucaagcuuaccauguucguguuccugguccuccugccccuggugagcucccagugcgugaaccucaccacccgcacgcagcugccgcccgccuacaccaacagcuucacccggggcgucuacuaccccgacaagguguuccgcuccagcgugcugcacuccacccaggaccucuuccugcccuucuucagcaacgucacgugguuccacgccauccacguguccgggaccaacggcaccaagcgguucgacaacccggugcugcccuucaacgacggggucuacuucgcgagcaccgagaaguccaacaucauccgcggcuggaucuucgggacgacccucgacagcaagacccagucccugcugaucgugaacaacgccaccaacguggucaucaaggugugcgaguuccaguucugcaacgaccccuuccucggcguguacuaccacaagaacaacaagagcuggauggaguccgaguuccgggucuacagcuccgccaacaacugcacguucgaguacgugagccagcccuuccugauggaccuggagggcaagcaggggaacuucaagaaccuccgcgaguucguguucaagaacaucgacggcuacuucaagaucuacuccaagcacaccccgaucaaccugguccgggaccugccccagggguucagcgcccucgagccccugguggaccugcccaucggcaucaacaucacccgcuuccagacccuccuggcccugcaccgguccuaccucacgccgggggacagcagcuccggcuggaccgcgggcgccgccgccuacuacgugggguaccugcagccccgcaccuuccugcucaaguacaacgagaacggcaccaucacggacgcggucgacugcgcccuggacccccugagcgagaccaagugcacccucaaguccuucaccguggagaaggggaucuaccagacgagcaacuuccgggugcagcccaccgaguccaucguccgcuucccgaacaucaccaaccugugccccuucggcgagguguucaacgccacccgguucgccagcgucuacgccuggaaccgcaagcggaucuccaacugcguggcggacuacagcgugcuguacaacuccgccagcuucuccacguucaagugcuacggcgucagccccaccaagcucaacgaccugugcuucaccaacguguacgccgacuccuucgugauccgcggggacgagguccggcagaucgcccccggccagaccgggaagaucgccgacuacaacuacaagcugccggacgacuucacgggcugcgugaucgcguggaacagcaacaaccucgacuccaaggucgggggcaacuacaacuaccuguaccgccuguuccgcaagagcaaccucaagcccuucgagcgggacaucuccaccgagaucuaccaggccggcagcacccccugcaacgggguggagggcuucaacugcuacuucccccugcaguccuacggguuccagccgaccaacggcgugggguaccagcccuaccggguggucgugcugagcuucgagcuccugcacgcccccgccacggugugcggccccaagaaguccaccaaccuggucaagaacaagugcgugaacuucaacuucaacggccucaccgggaccggcgugcugaccgagagcaacaagaaguuccugccguuccagcaguucgggcgcgacaucgccgacacgaccgacgcgguccgcgacccccagacccuggagauccucgacaucacccccugcagcuucggcgggguguccgugaucacgccgggcaccaacaccagcaaccaggucgccgugcuguaccaggacgugaacugcaccgagguccccguggccauccacgccgaccagcugacgcccaccuggcggguguacuccaccggcagcaacgucuuccagacccgcgccgggugccucaucggcgcggagcacgugaacaacuccuacgagugcgacauccccaucggggccggcaucugcgccagcuaccagacgcagaccaacuccccgcggcgcgcccggagcguggcgucccagagcaucaucgccuacaccaugucccugggcgccgagaacagcgucgccuacuccaacaacagcaucgccauccccaccaacuucacgaucuccgugaccaccgagauccugcccgugagcaugaccaagacgagcgucgacugcaccauguacaucugcggggacuccaccgagugcagcaaccuccugcugcaguacggcuccuucugcacccagcucaaccgcgcgcugacggggaucgccguggagcaggacaagaacacccaggagguguucgcccaggucaagcagaucuacaagacgcccccgaucaaggacuucggcggguucaacuucagccagauccugcccgaccccuccaagcccagcaagcgguccuucaucgaggaccuccuguucaacaaggugacccuggccgacgccggcuucaucaagcaguacggcgacugccucggggacaucgcggcccgcgaccugaucugcgcccagaaguucaacggccugaccgugcucccgccccugcugaccgacgagaugaucgcccaguacaccagcgcccuccuggcggggaccaucacguccggcuggaccuucggggccggcgccgcccugcagauccccuucgcgaugcagauggccuaccgguucaacggcaucggggucacccagaacgugcucuacgagaaccagaagcugaucgccaaccaguucaacagcgccaucggcaagauccaggacucccugagcuccaccgccagcgcgcucgggaagcugcaggacguggucaaccagaacgcccaggcccugaacacgcucgugaagcagcuguccagcaacugcggcgccaucuccagcgugcugaacgacauccucucccgccuggacaaggucgaggccgaggugcagaucgaccggcugaucaccugucgccuccagagccugcagaccuacgugacccagcagcugauccgggcggccgagauccgcgccagcgccaaccucgccgcgaccaagauguccgagugcguccugggccagagcaagcggguggacuucugcggcaagggguaccaccugauguccuucccccagagcgccccgcacggcguggucuuccuccacgugacguacguccccgcccaggagaagaacuucaccaccgcccccgcgaucugccacgacgggaaggcccacuucccccgcgagggcguguucguguccaacgggacccacugguucgucacgcagcggaacuucuacgagccgcagaucaucaccaccgacaacaccuucgugagcggcaacugcgacguggucaucggcaucgugaacaacacgguguacgacccccugcagcccgagcuggacuccggcggcgggagcgggggcgggcagaucuacgagggcaagcugaccgccgaggggcuccgcuucggcaucguggccagccgguucaaccacgcgcuggucgaccgccugguggagggggccaucgacgccaucgugcggcacggcgggcgcgaggaggacaucacccucguccgggugcccggcuccugggagaucccgguggccgccggcgagcuggcccgcaaggaggacaucgacgcggucaucgccaucggggugcugauccggggcgccacgccccacuucgacuacaucgccagcgagguguccaaggggcucgcggaccugagccuggagcuccgcaagcccaucaccuucggcgucaucaccgccgacacccuggagcaggccaucgagcgggccgggacgaagcacggcaacaagggcugggaggccgcgcuguccgccaucgagauggccaaccucuucaagagccugcgcugaggacuagucccuguucccagagcccacuuuuuuuucuuuuuuugaaauaaaauagccugucuuucagaucucaaaggcucuuuucagagccaccaaaaaaaaaaaaaaaaaaaaaaaaaaaaaaaaaaaaaaaaaaaaaaaaaaaaaaaaaaaaaaaaaaaaaaaaaaaaaaaaaaaaaaaaaaaaaaaaaaaaa

SEQ ID NO: 12425 - RNA, 4196 nt, Artificial Sequence
  SARS-CoV-2/Wuhan/WIV05/2019__EPI_ISL_402128 spike protein mRNA gc (1-1147)(A972C_R995C) LumSynth construct
aggagagucccgcagucggcguccagcggcucugcuuguucgugugugugucguugcaggccuuauucaagcuuaccauguucguguuccugguccuccugccccuggugagcucccagugcgugaaccucaccacccgcacgcagcugccgcccgccuacaccaacagcuucacccggggcgucuacuaccccgacaagguguuccgcuccagcgugcugcacuccacccaggaccucuuccugcccuucuucagcaacgucacgugguuccacgccauccacguguccgggaccaacggcaccaagcgguucgacaacccggugcugcccuucaacgacggggucuacuucgcgagcaccgagaaguccaacaucauccgcggcuggaucuucgggacgacccucgacagcaagacccagucccugcugaucgugaacaacgccaccaacguggucaucaaggugugcgaguuccaguucugcaacgaccccuuccucggcguguacuaccacaagaacaacaagagcuggauggaguccgaguuccgggucuacagcuccgccaacaacugcacguucgaguacgugagccagcccuuccugauggaccuggagggcaagcaggggaacuucaagaaccuccgcgaguucguguucaagaacaucgacggcuacuucaagaucuacuccaagcacaccccgaucaaccugguccgggaccugccccagggguucagcgcccucgagccccugguggaccugcccaucggcaucaacaucacccgcuuccagacccuccuggcccugcaccgguccuaccucacgccgggggacagcagcuccggcuggaccgcgggcgccgccgccuacuacgugggguaccugcagccccgcaccuuccugcucaaguacaacgagaacggcaccaucacggacgcggucgacugcgcccuggacccccugagcgagaccaagugcacccucaaguccuucaccguggagaaggggaucuaccagacgagcaacuuccgggugcagcccaccgaguccaucguccgcuucccgaacaucaccaaccugugccccuucggcgagguguucaacgccacccgguucgccagcgucuacgccuggaaccgcaagcggaucuccaacugcguggcggacuacagcgugcuguacaacuccgccagcuucuccacguucaagugcuacggcgucagccccaccaagcucaacgaccugugcuucaccaacguguacgccgacuccuucgugauccgcggggacgagguccggcagaucgcccccggccagaccgggaagaucgccgacuacaacuacaagcugccggacgacuucacgggcugcgugaucgcguggaacagcaacaaccucgacuccaaggucgggggcaacuacaacuaccuguaccgccuguuccgcaagagcaaccucaagcccuucgagcgggacaucuccaccgagaucuaccaggccggcagcacccccugcaacgggguggagggcuucaacugcuacuucccccugcaguccuacggguuccagccgaccaacggcgugggguaccagcccuaccggguggucgugcugagcuucgagcuccugcacgcccccgccacggugugcggccccaagaaguccaccaaccuggucaagaacaagugcgugaacuucaacuucaacggccucaccgggaccggcgugcugaccgagagcaacaagaaguuccugccguuccagcaguucgggcgcgacaucgccgacacgaccgacgcgguccgcgacccccagacccuggagauccucgacaucacccccugcagcuucggcgggguguccgugaucacgccgggcaccaacaccagcaaccaggucgccgugcuguaccaggacgugaacugcaccgagguccccguggccauccacgccgaccagcugacgcccaccuggcggguguacuccaccggcagcaacgucuuccagacccgcgccgggugccucaucggcgcggagcacgugaacaacuccuacgagugcgacauccccaucggggccggcaucugcgccagcuaccagacgcagaccaacuccccgcggcgcgcccggagcguggcgucccagagcaucaucgccuacaccaugucccugggcgccgagaacagcgucgccuacuccaacaacagcaucgccauccccaccaacuucacgaucuccgugaccaccgagauccugcccgugagcaugaccaagacgagcgucgacugcaccauguacaucugcggggacuccaccgagugcagcaaccuccugcugcaguacggcuccuucugcacccagcucaaccgcgcgcugacggggaucgccguggagcaggacaagaacacccaggagguguucgcccaggucaagcagaucuacaagacgcccccgaucaaggacuucggcggguucaacuucagccagauccugcccgaccccuccaagcccagcaagcgguccuucaucgaggaccuccuguucaacaaggugacccuggccgacgccggcuucaucaagcaguacggcgacugccucggggacaucgcggcccgcgaccugaucugcgcccagaaguucaacggccugaccgugcucccgccccugcugaccgacgagaugaucgcccaguacaccagcgcccuccuggcggggaccaucacguccggcuggaccuucggggccggcgccgcccugcagauccccuucgcgaugcagauggccuaccgguucaacggcaucggggucacccagaacgugcucuacgagaaccagaagcugaucgccaaccaguucaacagcgccaucggcaagauccaggacucccugagcuccaccgccagcgcgcucgggaagcugcaggacguggucaaccagaacgcccaggcccugaacacgcucgugaagcagcuguccagcaacuucggcugcaucuccagcgugcugaacgacauccucucccgccuggacaaggucgaggccgaggugcagaucgacugccugaucaccgggcgccuccagagccugcagaccuacgugacccagcagcugauccgggcggccgagauccgcgccagcgccaaccucgccgcgaccaagauguccgagugcguccugggccagagcaagcggguggacuucugcggcaagggguaccaccugauguccuucccccagagcgccccgcacggcguggucuuccuccacgugacguacguccccgcccaggagaagaacuucaccaccgcccccgcgaucugccacgacgggaaggcccacuucccccgcgagggcguguucguguccaacgggacccacugguucgucacgcagcggaacuucuacgagccgcagaucaucaccaccgacaacaccuucgugagcggcaacugcgacguggucaucggcaucgugaacaacacgguguacgacccccugcagcccgagcuggacuccggcggcgggagcgggggcgggcagaucuacgagggcaagcugaccgccgaggggcuccgcuucggcaucguggccagccgguucaaccacgcgcuggucgaccgccugguggagggggccaucgacgccaucgugcggcacggcgggcgcgaggaggacaucacccucguccgggugcccggcuccugggagaucccgguggccgccggcgagcuggcccgcaaggaggacaucgacgcggucaucgccaucggggugcugauccggggcgccacgccccacuucgacuacaucgccagcgagguguccaaggggcucgcggaccugagccuggagcuccgcaagcccaucaccuucggcgucaucaccgccgacacccuggagcaggccaucgagcgggccgggacgaagcacggcaacaagggcugggaggccgcgcuguccgccaucgagauggccaaccucuucaagagccugcgcugaggacuagucccuguucccagagcccacuuuuuuuucuuuuuuugaaauaaaauagccugucuuucagaucucaaaggcucuuuucagagccaccaaaaaaaaaaaaaaaaaaaaaaaaaaaaaaaaaaaaaaaaaaaaaaaaaaaaaaaaaaaaaaaaaaaaaaaaaaaaaaaaaaaaaaaaaaaaaaaaaaaaa

SEQ ID NO: 12426 - RNA, 4196 nt, Artificial Sequence
  SARS-CoV-2/Wuhan/WIV05/2019__EPI_ISL_402128 spike protein mRNA gc (1-1147)(A890C_V1040C) LumSynth construct
aggagagucccgcagucggcguccagcggcucugcuuguucgugugugugucguugcaggccuuauucaagcuuaccauguucguguuccugguccuccugccccuggugagcucccagugcgugaaccucaccacccgcacgcagcugccgcccgccuacaccaacagcuucacccggggcgucuacuaccccgacaagguguuccgcuccagcgugcugcacuccacccaggaccucuuccugcccuucuucagcaacgucacgugguuccacgccauccacguguccgggaccaacggcaccaagcgguucgacaacccggugcugcccuucaacgacggggucuacuucgcgagcaccgagaaguccaacaucauccgcggcuggaucuucgggacgacccucgacagcaagacccagucccugcugaucgugaacaacgccaccaacguggucaucaaggugugcgaguuccaguucugcaacgaccccuuccucggcguguacuaccacaagaacaacaagagcuggauggaguccgaguuccgggucuacagcuccgccaacaacugcacguucgaguacgugagccagcccuuccugauggaccuggagggcaagcaggggaacuucaagaaccuccgcgaguucguguucaagaacaucgacggcuacuucaagaucuacuccaagcacaccccgaucaaccugguccgggaccugccccagggguucagcgcccucgagccccugguggaccugcccaucggcaucaacaucacccgcuuccagacccuccuggcccugcaccgguccuaccucacgccgggggacagcagcuccggcuggaccgcgggcgccgccgccuacuacgugggguaccugcagccccgcaccuuccugcucaaguacaacgagaacggcaccaucacggacgcggucgacugcgcccuggacccccugagcgagaccaagugcacccucaaguccuucaccguggagaaggggaucuaccagacgagcaacuuccgggugcagcccaccgaguccaucguccgcuucccgaacaucaccaaccugugccccuucggcgagguguucaacgccacccgguucgccagcgucuacgccuggaaccgcaagcggaucuccaacugcguggcggacuacagcgugcuguacaacuccgccagcuucuccacguucaagugcuacggcgucagccccaccaagcucaacgaccugugcuucaccaacguguacgccgacuccuucgugauccgcggggacgagguccggcagaucgcccccggccagaccgggaagaucgccgacuacaacuacaagcugccggacgacuucacgggcugcgugaucgcguggaacagcaacaaccucgacuccaaggucgggggcaacuacaacuaccuguaccgccuguuccgcaagagcaaccucaagcccuucgagcgggacaucuccaccgagaucuaccaggccggcagcacccccugcaacgggguggagggcuucaacugcuacuucccccugcaguccuacggguuccagccgaccaacggcgugggguaccagcccuaccggguggucgugcugagcuucgagcuccugcacgcccccgccacggugugcggccccaagaaguccaccaaccuggucaagaacaagugcgugaacuucaacuucaacggccucaccgggaccggcgugcugaccgagagcaacaagaaguuccugccguuccagcaguucgggcgcgacaucgccgacacgaccgacgcgguccgcgacccccagacccuggagauccucgacaucacccccugcagcuucggcgggguguccgugaucacgccgggcaccaacaccagcaaccaggucgccgugcuguaccaggacgugaacugcaccgagguccccguggccauccacgccgaccagcugacgcccaccuggcggguguacuccaccggcagcaacgucuuccagacccgcgccgggugccucaucggcgcggagcacgugaacaacuccuacgagugcgacauccccaucggggccggcaucugcgccagcuaccagacgcagaccaacuccccgcggcgcgcccggagcguggcgucccagagcaucaucgccuacaccaugucccugggcgccgagaacagcgucgccuacuccaacaacagcaucgccauccccaccaacuucacgaucuccgugaccaccgagauccugcccgugagcaugaccaagacgagcgucgacugcaccauguacaucugcggggacuccaccgagugcagcaaccuccugcugcaguacggcuccuucugcacccagcucaaccgcgcgcugacggggaucgccguggagcaggacaagaacacccaggagguguucgcccaggucaagcagaucuacaagacgcccccgaucaaggacuucggcggguucaacuucagccagauccugcccgaccccuccaagcccagcaagcgguccuucaucgaggaccuccuguucaacaaggugacccuggccgacgccggcuucaucaagcaguacggcgacugccucggggacaucgcggcccgcgaccugaucugcgcccagaaguucaacggccugaccgugcucccgccccugcugaccgacgagaugaucgcccaguacaccagcgcccuccuggcggggaccaucacguccggcuggaccuucgggugcggcgccgcccugcagauccccuucgcgaugcagauggccuaccgguucaacggcaucggggucacccagaacgugcucuacgagaaccagaagcugaucgccaaccaguucaacagcgccaucggcaagauccaggacucccugagcuccaccgccagcgcgcucgggaagcugcaggacguggucaaccagaacgcccaggcccugaacacgcucgugaagcagcuguccagcaacuucggcgccaucuccagcgugcugaacgacauccucucccgccuggacaaggucgaggccgaggugcagaucgaccggcugaucaccgggcgccuccagagccugcagaccuacgugacccagcagcugauccgggcggccgagauccgcgccagcgccaaccucgccgcgaccaagauguccgagugcguccugggccagagcaagcggugcgacuucugcggcaagggguaccaccugauguccuucccccagagcgccccgcacggcguggucuuccuccacgugacguacguccccgcccaggagaagaacuucaccaccgcccccgcgaucugccacgacgggaaggcccacuucccccgcgagggcguguucguguccaacgggacccacugguucgucacgcagcggaacuucuacgagccgcagaucaucaccaccgacaacaccuucgugagcggcaacugcgacguggucaucggcaucgugaacaacacgguguacgacccccugcagcccgagcuggacuccggcggcgggagcgggggcgggcagaucuacgagggcaagcugaccgccgaggggcuccgcuucggcaucguggccagccgguucaaccacgcgcuggucgaccgccugguggagggggccaucgacgccaucgugcggcacggcgggcgcgaggaggacaucacccucguccgggugcccggcuccugggagaucccgguggccgccggcgagcuggcccgcaaggaggacaucgacgcggucaucgccaucggggugcugauccggggcgccacgccccacuucgacuacaucgccagcgagguguccaaggggcucgcggaccugagccuggagcuccgcaagcccaucaccuucggcgucaucaccgccgacacccuggagcaggccaucgagcgggccgggacgaagcacggcaacaagggcugggaggccgcgcuguccgccaucgagauggccaaccucuucaagagccugcgcugaggacuagucccuguucccagagcccacuuuuuuuucuuuuuuugaaauaaaauagccugucuuucagaucucaaaggcucuuuucagagccaccaaaaaaaaaaaaaaaaaaaaaaaaaaaaaaaaaaaaaaaaaaaaaaaaaaaaaaaaaaaaaaaaaaaaaaaaaaaaaaaaaaaaaaaaaaaaaaaaaaaaa

SEQ ID NO: 12427 - RNA, 4196 nt, Artificial Sequence
  SARS-CoV-2/Wuhan/WIV05/2019__EPI_ISL_402128 spike protein mRNA gc (1-1147)(T874C_S1055C) LumSynth construct
aggagagucccgcagucggcguccagcggcucugcuuguucgugugugugucguugcaggccuuauucaagcuuaccauguucguguuccugguccuccugccccuggugagcucccagugcgugaaccucaccacccgcacgcagcugccgcccgccuacaccaacagcuucacccggggcgucuacuaccccgacaagguguuccgcuccagcgugcugcacuccacccaggaccucuuccugcccuucuucagcaacgucacgugguuccacgccauccacguguccgggaccaacggcaccaagcgguucgacaacccggugcugcccuucaacgacggggucuacuucgcgagcaccgagaaguccaacaucauccgcggcuggaucuucgggacgacccucgacagcaagacccagucccugcugaucgugaacaacgccaccaacguggucaucaaggugugcgaguuccaguucugcaacgaccccuuccucggcguguacuaccacaagaacaacaagagcuggauggaguccgaguuccgggucuacagcuccgccaacaacugcacguucgaguacgugagccagcccuuccugauggaccuggagggcaagcaggggaacuucaagaaccuccgcgaguucguguucaagaacaucgacggcuacuucaagaucuacuccaagcacaccccgaucaaccugguccgggaccugccccagggguucagcgcccucgagccccugguggaccugcccaucggcaucaacaucacccgcuuccagacccuccuggcccugcaccgguccuaccucacgccgggggacagcagcuccggcuggaccgcgggcgccgccgccuacuacgugggguaccugcagccccgcaccuuccugcucaaguacaacgagaacggcaccaucacggacgcggucgacugcgcccuggacccccugagcgagaccaagugcacccucaaguccuucaccguggagaaggggaucuaccagacgagcaacuuccgggugcagcccaccgaguccaucguccgcuucccgaacaucaccaaccugugccccuucggcgagguguucaacgccacccgguucgccagcgucuacgccuggaaccgcaagcggaucuccaacugcguggcggacuacagcgugcuguacaacuccgccagcuucuccacguucaagugcuacggcgucagccccaccaagcucaacgaccugugcuucaccaacguguacgccgacuccuucgugauccgcggggacgagguccggcagaucgcccccggccagaccgggaagaucgccgacuacaacuacaagcugccggacgacuucacgggcugcgugaucgcguggaacagcaacaaccucgacuccaaggucgggggcaacuacaacuaccuguaccgccuguuccgcaagagcaaccucaagcccuucgagcgggacaucuccaccgagaucuaccaggccggcagcacccccugcaacgggguggagggcuucaacugcuacuucccccugcaguccuacggguuccagccgaccaacggcgugggguaccagcccuaccggguggucgugcugagcuucgagcuccugcacgcccccgccacggugugcggccccaagaaguccaccaaccuggucaagaacaagugcgugaacuucaacuucaacggccucaccgggaccggcgugcugaccgagagcaacaagaaguuccugccguuccagcaguucgggcgcgacaucgccgacacgaccgacgcgguccgcgacccccagacccuggagauccucgacaucacccccugcagcuucggcgggguguccgugaucacgccgggcaccaacaccagcaaccaggucgccgugcuguaccaggacgugaacugcaccgagguccccguggccauccacgccgaccagcugacgcccaccuggcggguguacuccaccggcagcaacgucuuccagacccgcgccgggugccucaucggcgcggagcacgugaacaacuccuacgagugcgacauccccaucggggccggcaucugcgccagcuaccagacgcagaccaacuccccgcggcgcgcccggagcguggcgucccagagcaucaucgccuacaccaugucccugggcgccgagaacagcgucgccuacuccaacaacagcaucgccauccccaccaacuucacgaucuccgugaccaccgagauccugcccgugagcaugaccaagacgagcgucgacugcaccauguacaucugcggggacuccaccgagugcagcaaccuccugcugcaguacggcuccuucugcacccagcucaaccgcgcgcugacggggaucgccguggagcaggacaagaacacccaggagguguucgcccaggucaagcagaucuacaagacgcccccgaucaaggacuucggcggguucaacuucagccagauccugcccgaccccuccaagcccagcaagcgguccuucaucgaggaccuccuguucaacaaggugacccuggccgacgccggcuucaucaagcaguacggcgacugccucggggacaucgcggcccgcgaccugaucugcgcccagaaguucaacggccugaccgugcucccgccccugcugaccgacgagaugaucgcccaguacugcagcgcccuccuggcggggaccaucacguccggcuggaccuucggggccggcgccgcccugcagauccccuucgcgaugcagauggccuaccgguucaacggcaucggggucacccagaacgugcucuacgagaaccagaagcugaucgccaaccaguucaacagcgccaucggcaagauccaggacucccugagcuccaccgccagcgcgcucgggaagcugcaggacguggucaaccagaacgcccaggcccugaacacgcucgugaagcagcuguccagcaacuucggcgccaucuccagcgugcugaacgacauccucucccgccuggacaaggucgaggccgaggugcagaucgaccggcugaucaccgggcgccuccagagccugcagaccuacgugacccagcagcugauccgggcggccgagauccgcgccagcgccaaccucgccgcgaccaagauguccgagugcguccugggccagagcaagcggguggacuucugcggcaagggguaccaccugauguccuucccccagugcgccccgcacggcguggucuuccuccacgugacguacguccccgcccaggagaagaacuucaccaccgcccccgcgaucugccacgacgggaaggcccacuucccccgcgagggcguguucguguccaacgggacccacugguucgucacgcagcggaacuucuacgagccgcagaucaucaccaccgacaacaccuucgugagcggcaacugcgacguggucaucggcaucgugaacaacacgguguacgacccccugcagcccgagcuggacuccggcggcgggagcgggggcgggcagaucuacgagggcaagcugaccgccgaggggcuccgcuucggcaucguggccagccgguucaaccacgcgcuggucgaccgccugguggagggggccaucgacgccaucgugcggcacggcgggcgcgaggaggacaucacccucguccgggugcccggcuccugggagaucccgguggccgccggcgagcuggcccgcaaggaggacaucgacgcggucaucgccaucggggugcugauccggggcgccacgccccacuucgacuacaucgccagcgagguguccaaggggcucgcggaccugagccuggagcuccgcaagcccaucaccuucggcgucaucaccgccgacacccuggagcaggccaucgagcgggccgggacgaagcacggcaacaagggcugggaggccgcgcuguccgccaucgagauggccaaccucuucaagagccugcgcugaggacuagucccuguucccagagcccacuuuuuuuucuuuuuuugaaauaaaauagccugucuuucagaucucaaaggcucuuuucagagccaccaaaaaaaaaaaaaaaaaaaaaaaaaaaaaaaaaaaaaaaaaaaaaaaaaaaaaaaaaaaaaaaaaaaaaaaaaaaaaaaaaaaaaaaaaaaaaaaaaaaaa

SEQ ID NO: 12428 - RNA, 4220 nt, Artificial Sequence
  SARS-CoV-2/Wuhan/WIV05/2019__EPI_ISL_402128 spike protein mRNA gc (1-1147) Ferritin construct
aggagagucccgcagucggcguccagcggcucugcuuguucgugugugugucguugcaggccuuauucaagcuuaccauguucguguuccugguccuccugccccuggugagcucccagugcgugaaccucaccacccgcacgcagcugccgcccgccuacaccaacagcuucacccggggcgucuacuaccccgacaagguguuccgcuccagcgugcugcacuccacccaggaccucuuccugcccuucuucagcaacgucacgugguuccacgccauccacguguccgggaccaacggcaccaagcgguucgacaacccggugcugcccuucaacgacggggucuacuucgcgagcaccgagaaguccaacaucauccgcggcuggaucuucgggacgacccucgacagcaagacccagucccugcugaucgugaacaacgccaccaacguggucaucaaggugugcgaguuccaguucugcaacgaccccuuccucggcguguacuaccacaagaacaacaagagcuggauggaguccgaguuccgggucuacagcuccgccaacaacugcacguucgaguacgugagccagcccuuccugauggaccuggagggcaagcaggggaacuucaagaaccuccgcgaguucguguucaagaacaucgacggcuacuucaagaucuacuccaagcacaccccgaucaaccugguccgggaccugccccagggguucagcgcccucgagccccugguggaccugcccaucggcaucaacaucacccgcuuccagacccuccuggcccugcaccgguccuaccucacgccgggggacagcagcuccggcuggaccgcgggcgccgccgccuacuacgugggguaccugcagccccgcaccuuccugcucaaguacaacgagaacggcaccaucacggacgcggucgacugcgcccuggacccccugagcgagaccaagugcacccucaaguccuucaccguggagaaggggaucuaccagacgagcaacuuccgggugcagcccaccgaguccaucguccgcuucccgaacaucaccaaccugugccccuucggcgagguguucaacgccacccgguucgccagcgucuacgccuggaaccgcaagcggaucuccaacugcguggcggacuacagcgugcuguacaacuccgccagcuucuccacguucaagugcuacggcgucagccccaccaagcucaacgaccugugcuucaccaacguguacgccgacuccuucgugauccgcggggacgagguccggcagaucgcccccggccagaccgggaagaucgccgacuacaacuacaagcugccggacgacuucacgggcugcgugaucgcguggaacagcaacaaccucgacuccaaggucgggggcaacuacaacuaccuguaccgccuguuccgcaagagcaaccucaagcccuucgagcgggacaucuccaccgagaucuaccaggccggcagcacccccugcaacgggguggagggcuucaacugcuacuucccccugcaguccuacggguuccagccgaccaacggcgugggguaccagcccuaccggguggucgugcugagcuucgagcuccugcacgcccccgccacggugugcggccccaagaaguccaccaaccuggucaagaacaagugcgugaacuucaacuucaacggccucaccgggaccggcgugcugaccgagagcaacaagaaguuccugccguuccagcaguucgggcgcgacaucgccgacacgaccgacgcgguccgcgacccccagacccuggagauccucgacaucacccccugcagcuucggcgggguguccgugaucacgccgggcaccaacaccagcaaccaggucgccgugcuguaccaggacgugaacugcaccgagguccccguggccauccacgccgaccagcugacgcccaccuggcggguguacuccaccggcagcaacgucuuccagacccgcgccgggugccucaucggcgcggagcacgugaacaacuccuacgagugcgacauccccaucggggccggcaucugcgccagcuaccagacgcagaccaacuccccgcggcgcgcccggagcguggcgucccagagcaucaucgccuacaccaugucccugggcgccgagaacagcgucgccuacuccaacaacagcaucgccauccccaccaacuucacgaucuccgugaccaccgagauccugcccgugagcaugaccaagacgagcgucgacugcaccauguacaucugcggggacuccaccgagugcagcaaccuccugcugcaguacggcuccuucugcacccagcucaaccgcgcgcugacggggaucgccguggagcaggacaagaacacccaggagguguucgcccaggucaagcagaucuacaagacgcccccgaucaaggacuucggcggguucaacuucagccagauccugcccgaccccuccaagcccagcaagcgguccuucaucgaggaccuccuguucaacaaggugacccuggccgacgccggcuucaucaagcaguacggcgacugccucggggacaucgcggcccgcgaccugaucugcgcccagaaguucaacggccugaccgugcucccgccccugcugaccgacgagaugaucgcccaguacaccagcgcccuccuggcggggaccaucacguccggcuggaccuucggggccggcgccgcccugcagauccccuucgcgaugcagauggccuaccgguucaacggcaucggggucacccagaacgugcucuacgagaaccagaagcugaucgccaaccaguucaacagcgccaucggcaagauccaggacucccugagcuccaccgccagcgcgcucgggaagcugcaggacguggucaaccagaacgcccaggcccugaacacgcucgugaagcagcuguccagcaacuucggcgccaucuccagcgugcugaacgacauccucucccgccuggacaaggucgaggccgaggugcagaucgaccggcugaucaccgggcgccuccagagccugcagaccuacgugacccagcagcugauccgggcggccgagauccgcgccagcgccaaccucgccgcgaccaagauguccgagugcguccugggccagagcaagcggguggacuucugcggcaagggguaccaccugauguccuucccccagagcgccccgcacggcguggucuuccuccacgugacguacguccccgcccaggagaagaacuucaccaccgcccccgcgaucugccacgacgggaaggcccacuucccccgcgagggcguguucguguccaacgggacccacugguucgucacgcagcggaacuucuacgagccgcagaucaucaccaccgacaacaccuucgugagcggcaacugcgacguggucaucggcaucgugaacaacacgguguacgacccccugcagcccgagcuggacuccggcgggggcgggagcgacaucaucaagcuccugaacgagcaggucaacaaggagaugcaguccagcaaccuguacauguccaugagcuccuggugcuacacccacagccucgacggcgccgggcuguuccuguucgaccacgccgcggaggaguacgagcacgccaagaagcucaucaucuuccugaacgagaacaacgugcccgugcagcugaccuccaucagcgccccggagcacaaguucgagggccucacgcagaucuuccagaaggccuacgagcacgagcagcacaucuccgagagcaucaacaacaucguggaccacgccaucaaguccaaggaccacgcgaccuucaacuuccugcagugguacgucgccgagcagcacgaggaggaggugcuguucaaggacauccucgacaagaucgagcugaucgggaacgagaaccacggccuguaccucgccgaccaguacgugaaggggaucgccaagagccgcaaguccugaggacuagucccuguucccagagcccacuuuuuuuucuuuuuuugaaauaaaauagccugucuuucagaucucaaaggcucuuuucagagccaccaaaaaaaaaaaaaaaaaaaaaaaaaaaaaaaaaaaaaaaaaaaaaaaaaaaaaaaaaaaaaaaaaaaaaaaaaaaaaaaaaaaaaaaaaaaaaaaaaaaaa

SEQ ID NO: 12429 - RNA, 4220 nt, Artificial Sequence
  SARS-CoV-2/Wuhan/WIV05/2019__EPI_ISL_402128 spike protein mRNA gc (1-1147)(K986P_V987P) Ferritin construct
aggagagucccgcagucggcguccagcggcucugcuuguucgugugugugucguugcaggccuuauucaagcuuaccauguucguguuccugguccuccugccccuggugagcucccagugcgugaaccucaccacccgcacgcagcugccgcccgccuacaccaacagcuucacccggggcgucuacuaccccgacaagguguuccgcuccagcgugcugcacuccacccaggaccucuuccugcccuucuucagcaacgucacgugguuccacgccauccacguguccgggaccaacggcaccaagcgguucgacaacccggugcugcccuucaacgacggggucuacuucgcgagcaccgagaaguccaacaucauccgcggcuggaucuucgggacgacccucgacagcaagacccagucccugcugaucgugaacaacgccaccaacguggucaucaaggugugcgaguuccaguucugcaacgaccccuuccucggcguguacuaccacaagaacaacaagagcuggauggaguccgaguuccgggucuacagcuccgccaacaacugcacguucgaguacgugagccagcccuuccugauggaccuggagggcaagcaggggaacuucaagaaccuccgcgaguucguguucaagaacaucgacggcuacuucaagaucuacuccaagcacaccccgaucaaccugguccgggaccugccccagggguucagcgcccucgagccccugguggaccugcccaucggcaucaacaucacccgcuuccagacccuccuggcccugcaccgguccuaccucacgccgggggacagcagcuccggcuggaccgcgggcgccgccgccuacuacgugggguaccugcagccccgcaccuuccugcucaaguacaacgagaacggcaccaucacggacgcggucgacugcgcccuggacccccugagcgagaccaagugcacccucaaguccuucaccguggagaaggggaucuaccagacgagcaacuuccgggugcagcccaccgaguccaucguccgcuucccgaacaucaccaaccugugccccuucggcgagguguucaacgccacccgguucgccagcgucuacgccuggaaccgcaagcggaucuccaacugcguggcggacuacagcgugcuguacaacuccgccagcuucuccacguucaagugcuacggcgucagccccaccaagcucaacgaccugugcuucaccaacguguacgccgacuccuucgugauccgcggggacgagguccggcagaucgcccccggccagaccgggaagaucgccgacuacaacuacaagcugccggacgacuucacgggcugcgugaucgcguggaacagcaacaaccucgacuccaaggucgggggcaacuacaacuaccuguaccgccuguuccgcaagagcaaccucaagcccuucgagcgggacaucuccaccgagaucuaccaggccggcagcacccccugcaacgggguggagggcuucaacugcuacuucccccugcaguccuacggguuccagccgaccaacggcgugggguaccagcccuaccggguggucgugcugagcuucgagcuccugcacgcccccgccacggugugcggccccaagaaguccaccaaccuggucaagaacaagugcgugaacuucaacuucaacggccucaccgggaccggcgugcugaccgagagcaacaagaaguuccugccguuccagcaguucgggcgcgacaucgccgacacgaccgacgcgguccgcgacccccagacccuggagauccucgacaucacccccugcagcuucggcgggguguccgugaucacgccgggcaccaacaccagcaaccaggucgccgugcuguaccaggacgugaacugcaccgagguccccguggccauccacgccgaccagcugacgcccaccuggcggguguacuccaccggcagcaacgucuuccagacccgcgccgggugccucaucggcgcggagcacgugaacaacuccuacgagugcgacauccccaucggggccggcaucugcgccagcuaccagacgcagaccaacuccccgcggcgcgcccggagcguggcgucccagagcaucaucgccuacaccaugucccugggcgccgagaacagcgucgccuacuccaacaacagcaucgccauccccaccaacuucacgaucuccgugaccaccgagauccugcccgugagcaugaccaagacgagcgucgacugcaccauguacaucugcggggacuccaccgagugcagcaaccuccugcugcaguacggcuccuucugcacccagcucaaccgcgcgcugacggggaucgccguggagcaggacaagaacacccaggagguguucgcccaggucaagcagaucuacaagacgcccccgaucaaggacuucggcggguucaacuucagccagauccugcccgaccccuccaagcccagcaagcgguccuucaucgaggaccuccuguucaacaaggugacccuggccgacgccggcuucaucaagcaguacggcgacugccucggggacaucgcggcccgcgaccugaucugcgcccagaaguucaacggccugaccgugcucccgccccugcugaccgacgagaugaucgcccaguacaccagcgcccuccuggcggggaccaucacguccggcuggaccuucggggccggcgccgcccugcagauccccuucgcgaugcagauggccuaccgguucaacggcaucggggucacccagaacgugcucuacgagaaccagaagcugaucgccaaccaguucaacagcgccaucggcaagauccaggacucccugagcuccaccgccagcgcgcucgggaagcugcaggacguggucaaccagaacgcccaggcccugaacacgcucgugaagcagcuguccagcaacuucggcgccaucuccagcgugcugaacgacauccucucccgccuggacccgcccgaggccgaggugcagaucgaccggcugaucaccgggcgccuccagagccugcagaccuacgugacccagcagcugauccgggcggccgagauccgcgccagcgccaaccucgccgcgaccaagauguccgagugcguccugggccagagcaagcggguggacuucugcggcaagggguaccaccugauguccuucccccagagcgccccgcacggcguggucuuccuccacgugacguacguccccgcccaggagaagaacuucaccaccgcccccgcgaucugccacgacgggaaggcccacuucccccgcgagggcguguucguguccaacgggacccacugguucgucacgcagcggaacuucuacgagccgcagaucaucaccaccgacaacaccuucgugagcggcaacugcgacguggucaucggcaucgugaacaacacgguguacgacccccugcagcccgagcuggacuccggcgggggcgggagcgacaucaucaagcuccugaacgagcaggucaacaaggagaugcaguccagcaaccuguacauguccaugagcuccuggugcuacacccacagccucgacggcgccgggcuguuccuguucgaccacgccgcggaggaguacgagcacgccaagaagcucaucaucuuccugaacgagaacaacgugcccgugcagcugaccuccaucagcgccccggagcacaaguucgagggccucacgcagaucuuccagaaggccuacgagcacgagcagcacaucuccgagagcaucaacaacaucguggaccacgccaucaaguccaaggaccacgcgaccuucaacuuccugcagugguacgucgccgagcagcacgaggaggaggugcuguucaaggacauccucgacaagaucgagcugaucgggaacgagaaccacggccuguaccucgccgaccaguacgugaaggggaucgccaagagccgcaaguccugaggacuagucccuguucccagagcccacuuuuuuuucuuuuuuugaaauaaaauagccugucuuucagaucucaaaggcucuuuucagagccaccaaaaaaaaaaaaaaaaaaaaaaaaaaaaaaaaaaaaaaaaaaaaaaaaaaaaaaaaaaaaaaaaaaaaaaaaaaaaaaaaaaaaaaaaaaaaaaaaaaaaa

SEQ ID NO: 12430 - RNA, 4220 nt, Artificial Sequence
  SARS-CoV-2/Wuhan/WIV05/2019__EPI_ISL_402128 spike protein mRNA gc (1-1147)(K986P_V987P_T887WN_A1020W) Ferritin construct
aggagagucccgcagucggcguccagcggcucugcuuguucgugugugugucguugcaggccuuauucaagcuuaccauguucguguuccugguccuccugccccuggugagcucccagugcgugaaccucaccacccgcacgcagcugccgcccgccuacaccaacagcuucacccggggcgucuacuaccccgacaagguguuccgcuccagcgugcugcacuccacccaggaccucuuccugcccuucuucagcaacgucacgugguuccacgccauccacguguccgggaccaacggcaccaagcgguucgacaacccggugcugcccuucaacgacggggucuacuucgcgagcaccgagaaguccaacaucauccgcggcuggaucuucgggacgacccucgacagcaagacccagucccugcugaucgugaacaacgccaccaacguggucaucaaggugugcgaguuccaguucugcaacgaccccuuccucggcguguacuaccacaagaacaacaagagcuggauggaguccgaguuccgggucuacagcuccgccaacaacugcacguucgaguacgugagccagcccuuccugauggaccuggagggcaagcaggggaacuucaagaaccuccgcgaguucguguucaagaacaucgacggcuacuucaagaucuacuccaagcacaccccgaucaaccugguccgggaccugccccagggguucagcgcccucgagccccugguggaccugcccaucggcaucaacaucacccgcuuccagacccuccuggcccugcaccgguccuaccucacgccgggggacagcagcuccggcuggaccgcgggcgccgccgccuacuacgugggguaccugcagccccgcaccuuccugcucaaguacaacgagaacggcaccaucacggacgcggucgacugcgcccuggacccccugagcgagaccaagugcacccucaaguccuucaccguggagaaggggaucuaccagacgagcaacuuccgggugcagcccaccgaguccaucguccgcuucccgaacaucaccaaccugugccccuucggcgagguguucaacgccacccgguucgccagcgucuacgccuggaaccgcaagcggaucuccaacugcguggcggacuacagcgugcuguacaacuccgccagcuucuccacguucaagugcuacggcgucagccccaccaagcucaacgaccugugcuucaccaacguguacgccgacuccuucgugauccgcggggacgagguccggcagaucgcccccggccagaccgggaagaucgccgacuacaacuacaagcugccggacgacuucacgggcugcgugaucgcguggaacagcaacaaccucgacuccaaggucgggggcaacuacaacuaccuguaccgccuguuccgcaagagcaaccucaagcccuucgagcgggacaucuccaccgagaucuaccaggccggcagcacccccugcaacgggguggagggcuucaacugcuacuucccccugcaguccuacggguuccagccgaccaacggcgugggguaccagcccuaccggguggucgugcugagcuucgagcuccugcacgcccccgccacggugugcggccccaagaaguccaccaaccuggucaagaacaagugcgugaacuucaacuucaacggccucaccgggaccggcgugcugaccgagagcaacaagaaguuccugccguuccagcaguucgggcgcgacaucgccgacacgaccgacgcgguccgcgacccccagacccuggagauccucgacaucacccccugcagcuucggcgggguguccgugaucacgccgggcaccaacaccagcaaccaggucgccgugcuguaccaggacgugaacugcaccgagguccccguggccauccacgccgaccagcugacgcccaccuggcggguguacuccaccggcagcaacgucuuccagacccgcgccgggugccucaucggcgcggagcacgugaacaacuccuacgagugcgacauccccaucggggccggcaucugcgccagcuaccagacgcagaccaacuccccgcggcgcgcccggagcguggcgucccagagcaucaucgccuacaccaugucccugggcgccgagaacagcgucgccuacuccaacaacagcaucgccauccccaccaacuucacgaucuccgugaccaccgagauccugcccgugagcaugaccaagacgagcgucgacugcaccauguacaucugcggggacuccaccgagugcagcaaccuccugcugcaguacggcuccuucugcacccagcucaaccgcgcgcugacggggaucgccguggagcaggacaagaacacccaggagguguucgcccaggucaagcagaucuacaagacgcccccgaucaaggacuucggcggguucaacuucagccagauccugcccgaccccuccaagcccagcaagcgguccuucaucgaggaccuccuguucaacaaggugacccuggccgacgccggcuucaucaagcaguacggcgacugccucggggacaucgcggcccgcgaccugaucugcgcccagaaguucaacggccugaccgugcucccgccccugcugaccgacgagaugaucgcccaguacaccagcgcccuccuggcggggaccaucacguccggcuggugguucggggccggcgccgcccugcagauccccuucgcgaugcagauggccuaccgguucaacggcaucggggucacccagaacgugcucuacgagaaccagaagcugaucgccaaccaguucaacagcgccaucggcaagauccaggacucccugagcuccaccgccagcgcgcucgggaagcugcaggacguggucaaccagaacgcccaggcccugaacacgcucgugaagcagcuguccagcaacuucggcgccaucuccagcgugcugaacgacauccucucccgccuggacccgcccgaggccgaggugcagaucgaccggcugaucaccgggcgccuccagagccugcagaccuacgugacccagcagcugauccgggcggccgagauccgcuggagcgccaaccucgccgcgaccaagauguccgagugcguccugggccagagcaagcggguggacuucugcggcaagggguaccaccugauguccuucccccagagcgccccgcacggcguggucuuccuccacgugacguacguccccgcccaggagaagaacuucaccaccgcccccgcgaucugccacgacgggaaggcccacuucccccgcgagggcguguucguguccaacgggacccacugguucgucacgcagcggaacuucuacgagccgcagaucaucaccaccgacaacaccuucgugagcggcaacugcgacguggucaucggcaucgugaacaacacgguguacgacccccugcagcccgagcuggacuccggcgggggcgggagcgacaucaucaagcuccugaacgagcaggucaacaaggagaugcaguccagcaaccuguacauguccaugagcuccuggugcuacacccacagccucgacggcgccgggcuguuccuguucgaccacgccgcggaggaguacgagcacgccaagaagcucaucaucuuccugaacgagaacaacgugcccgugcagcugaccuccaucagcgccccggagcacaaguucgagggccucacgcagaucuuccagaaggccuacgagcacgagcagcacaucuccgagagcaucaacaacaucguggaccacgccaucaaguccaaggaccacgcgaccuucaacuuccugcagugguacgucgccgagcagcacgaggaggaggugcuguucaaggacauccucgacaagaucgagcugaucgggaacgagaaccacggccuguaccucgccgaccaguacgugaaggggaucgccaagagccgcaaguccugaggacuagucccuguucccagagcccacuuuuuuuucuuuuuuugaaauaaaauagccugucuuucagaucucaaaggcucuuuucagagccaccaaaaaaaaaaaaaaaaaaaaaaaaaaaaaaaaaaaaaaaaaaaaaaaaaaaaaaaaaaaaaaaaaaaaaaaaaaaaaaaaaaaaaaaaaaaaaaaaaaaaa

SEQ ID NO: 12431 - RNA, 4220 nt, Artificial Sequence
  SARS-CoV-2/Wuhan/WIV05/2019__EPI_ISL_402128 spike protein mRNA gc (1-1147)(K986P_V987P_P1069F) Ferritin construct
aggagagucccgcagucggcguccagcggcucugcuuguucgugugugugucguugcaggccuuauucaagcuuaccauguucguguuccugguccuccugccccuggugagcucccagugcgugaaccucaccacccgcacgcagcugccgcccgccuacaccaacagcuucacccggggcgucuacuaccccgacaagguguuccgcuccagcgugcugcacuccacccaggaccucuuccugcccuucuucagcaacgucacgugguuccacgccauccacguguccgggaccaacggcaccaagcgguucgacaacccggugcugcccuucaacgacggggucuacuucgcgagcaccgagaaguccaacaucauccgcggcuggaucuucgggacgacccucgacagcaagacccagucccugcugaucgugaacaacgccaccaacguggucaucaaggugugcgaguuccaguucugcaacgaccccuuccucggcguguacuaccacaagaacaacaagagcuggauggaguccgaguuccgggucuacagcuccgccaacaacugcacguucgaguacgugagccagcccuuccugauggaccuggagggcaagcaggggaacuucaagaaccuccgcgaguucguguucaagaacaucgacggcuacuucaagaucuacuccaagcacaccccgaucaaccugguccgggaccugccccagggguucagcgcccucgagccccugguggaccugcccaucggcaucaacaucacccgcuuccagacccuccuggcccugcaccgguccuaccucacgccgggggacagcagcuccggcuggaccgcgggcgccgccgccuacuacgugggguaccugcagccccgcaccuuccugcucaaguacaacgagaacggcaccaucacggacgcggucgacugcgcccuggacccccugagcgagaccaagugcacccucaaguccuucaccguggagaaggggaucuaccagacgagcaacuuccgggugcagcccaccgaguccaucguccgcuucccgaacaucaccaaccugugccccuucggcgagguguucaacgccacccgguucgccagcgucuacgccuggaaccgcaagcggaucuccaacugcguggcggacuacagcgugcuguacaacuccgccagcuucuccacguucaagugcuacggcgucagccccaccaagcucaacgaccugugcuucaccaacguguacgccgacuccuucgugauccgcggggacgagguccggcagaucgcccccggccagaccgggaagaucgccgacuacaacuacaagcugccggacgacuucacgggcugcgugaucgcguggaacagcaacaaccucgacuccaaggucgggggcaacuacaacuaccuguaccgccuguuccgcaagagcaaccucaagcccuucgagcgggacaucuccaccgagaucuaccaggccggcagcacccccugcaacgggguggagggcuucaacugcuacuucccccugcaguccuacggguuccagccgaccaacggcgugggguaccagcccuaccggguggucgugcugagcuucgagcuccugcacgcccccgccacggugugcggccccaagaaguccaccaaccuggucaagaacaagugcgugaacuucaacuucaacggccucaccgggaccggcgugcugaccgagagcaacaagaaguuccugccguuccagcaguucgggcgcgacaucgccgacacgaccgacgcgguccgcgacccccagacccuggagauccucgacaucacccccugcagcuucggcgggguguccgugaucacgccgggcaccaacaccagcaaccaggucgccgugcuguaccaggacgugaacugcaccgagguccccguggccauccacgccgaccagcugacgcccaccuggcggguguacuccaccggcagcaacgucuuccagacccgcgccgggugccucaucggcgcggagcacgugaacaacuccuacgagugcgacauccccaucggggccggcaucugcgccagcuaccagacgcagaccaacuccccgcggcgcgcccggagcguggcgucccagagcaucaucgccuacaccaugucccugggcgccgagaacagcgucgccuacuccaacaacagcaucgccauccccaccaacuucacgaucuccgugaccaccgagauccugcccgugagcaugaccaagacgagcgucgacugcaccauguacaucugcggggacuccaccgagugcagcaaccuccugcugcaguacggcuccuucugcacccagcucaaccgcgcgcugacggggaucgccguggagcaggacaagaacacccaggagguguucgcccaggucaagcagaucuacaagacgcccccgaucaaggacuucggcggguucaacuucagccagauccugcccgaccccuccaagcccagcaagcgguccuucaucgaggaccuccuguucaacaaggugacccuggccgacgccggcuucaucaagcaguacggcgacugccucggggacaucgcggcccgcgaccugaucugcgcccagaaguucaacggccugaccgugcucccgccccugcugaccgacgagaugaucgcccaguacaccagcgcccuccuggcggggaccaucacguccggcuggaccuucggggccggcgccgcccugcagauccccuucgcgaugcagauggccuaccgguucaacggcaucggggucacccagaacgugcucuacgagaaccagaagcugaucgccaaccaguucaacagcgccaucggcaagauccaggacucccugagcuccaccgccagcgcgcucgggaagcugcaggacguggucaaccagaacgcccaggcccugaacacgcucgugaagcagcuguccagcaacuucggcgccaucuccagcgugcugaacgacauccucucccgccuggacccgcccgaggccgaggugcagaucgaccggcugaucaccgggcgccuccagagccugcagaccuacgugacccagcagcugauccgggcggccgagauccgcgccagcgccaaccucgccgcgaccaagauguccgagugcguccugggccagagcaagcggguggacuucugcggcaagggguaccaccugauguccuucccccagagcgccccgcacggcguggucuuccuccacgugacguacgucuucgcccaggagaagaacuucaccaccgcccccgcgaucugccacgacgggaaggcccacuucccccgcgagggcguguucguguccaacgggacccacugguucgucacgcagcggaacuucuacgagccgcagaucaucaccaccgacaacaccuucgugagcggcaacugcgacguggucaucggcaucgugaacaacacgguguacgacccccugcagcccgagcuggacuccggcgggggcgggagcgacaucaucaagcuccugaacgagcaggucaacaaggagaugcaguccagcaaccuguacauguccaugagcuccuggugcuacacccacagccucgacggcgccgggcuguuccuguucgaccacgccgcggaggaguacgagcacgccaagaagcucaucaucuuccugaacgagaacaacgugcccgugcagcugaccuccaucagcgccccggagcacaaguucgagggccucacgcagaucuuccagaaggccuacgagcacgagcagcacaucuccgagagcaucaacaacaucguggaccacgccaucaaguccaaggaccacgcgaccuucaacuuccugcagugguacgucgccgagcagcacgaggaggaggugcuguucaaggacauccucgacaagaucgagcugaucgggaacgagaaccacggccuguaccucgccgaccaguacgugaaggggaucgccaagagccgcaaguccugaggacuagucccuguucccagagcccacuuuuuuuucuuuuuuugaaauaaaauagccugucuuucagaucucaaaggcucuuuucagagccaccaaaaaaaaaaaaaaaaaaaaaaaaaaaaaaaaaaaaaaaaaaaaaaaaaaaaaaaaaaaaaaaaaaaaaaaaaaaaaaaaaaaaaaaaaaaaaaaaaaaaa

SEQ ID NO: 12432 - RNA, 4220 nt, Artificial Sequence
  SARS-CoV-2/Wuhan/WIV05/2019__EPI_ISL_402128 spike protein mRNA gc (1-1147)(K986P_V987P_ H1048Q_H1064N_ H1083N_H1101N) Ferritin construct
aggagagucccgcagucggcguccagcggcucugcuuguucgugugugugucguugcaggccuuauucaagcuuaccauguucguguuccugguccuccugccccuggugagcucccagugcgugaaccucaccacccgcacgcagcugccgcccgccuacaccaacagcuucacccggggcgucuacuaccccgacaagguguuccgcuccagcgugcugcacuccacccaggaccucuuccugcccuucuucagcaacgucacgugguuccacgccauccacguguccgggaccaacggcaccaagcgguucgacaacccggugcugcccuucaacgacggggucuacuucgcgagcaccgagaaguccaacaucauccgcggcuggaucuucgggacgacccucgacagcaagacccagucccugcugaucgugaacaacgccaccaacguggucaucaaggugugcgaguuccaguucugcaacgaccccuuccucggcguguacuaccacaagaacaacaagagcuggauggaguccgaguuccgggucuacagcuccgccaacaacugcacguucgaguacgugagccagcccuuccugauggaccuggagggcaagcaggggaacuucaagaaccuccgcgaguucguguucaagaacaucgacggcuacuucaagaucuacuccaagcacaccccgaucaaccugguccgggaccugccccagggguucagcgcccucgagccccugguggaccugcccaucggcaucaacaucacccgcuuccagacccuccuggcccugcaccgguccuaccucacgccgggggacagcagcuccggcuggaccgcgggcgccgccgccuacuacgugggguaccugcagccccgcaccuuccugcucaaguacaacgagaacggcaccaucacggacgcggucgacugcgcccuggacccccugagcgagaccaagugcacccucaaguccuucaccguggagaaggggaucuaccagacgagcaacuuccgggugcagcccaccgaguccaucguccgcuucccgaacaucaccaaccugugccccuucggcgagguguucaacgccacccgguucgccagcgucuacgccuggaaccgcaagcggaucuccaacugcguggcggacuacagcgugcuguacaacuccgccagcuucuccacguucaagugcuacggcgucagccccaccaagcucaacgaccugugcuucaccaacguguacgccgacuccuucgugauccgcggggacgagguccggcagaucgcccccggccagaccgggaagaucgccgacuacaacuacaagcugccggacgacuucacgggcugcgugaucgcguggaacagcaacaaccucgacuccaaggucgggggcaacuacaacuaccuguaccgccuguuccgcaagagcaaccucaagcccuucgagcgggacaucuccaccgagaucuaccaggccggcagcacccccugcaacgggguggagggcuucaacugcuacuucccccugcaguccuacggguuccagccgaccaacggcgugggguaccagcccuaccggguggucgugcugagcuucgagcuccugcacgcccccgccacggugugcggccccaagaaguccaccaaccuggucaagaacaagugcgugaacuucaacuucaacggccucaccgggaccggcgugcugaccgagagcaacaagaaguuccugccguuccagcaguucgggcgcgacaucgccgacacgaccgacgcgguccgcgacccccagacccuggagauccucgacaucacccccugcagcuucggcgggguguccgugaucacgccgggcaccaacaccagcaaccaggucgccgugcuguaccaggacgugaacugcaccgagguccccguggccauccacgccgaccagcugacgcccaccuggcggguguacuccaccggcagcaacgucuuccagacccgcgccgggugccucaucggcgcggagcacgugaacaacuccuacgagugcgacauccccaucggggccggcaucugcgccagcuaccagacgcagaccaacuccccgcggcgcgcccggagcguggcgucccagagcaucaucgccuacaccaugucccugggcgccgagaacagcgucgccuacuccaacaacagcaucgccauccccaccaacuucacgaucuccgugaccaccgagauccugcccgugagcaugaccaagacgagcgucgacugcaccauguacaucugcggggacuccaccgagugcagcaaccuccugcugcaguacggcuccuucugcacccagcucaaccgcgcgcugacggggaucgccguggagcaggacaagaacacccaggagguguucgcccaggucaagcagaucuacaagacgcccccgaucaaggacuucggcggguucaacuucagccagauccugcccgaccccuccaagcccagcaagcgguccuucaucgaggaccuccuguucaacaaggugacccuggccgacgccggcuucaucaagcaguacggcgacugccucggggacaucgcggcccgcgaccugaucugcgcccagaaguucaacggccugaccgugcucccgccccugcugaccgacgagaugaucgcccaguacaccagcgcccuccuggcggggaccaucacguccggcuggaccuucggggccggcgccgcccugcagauccccuucgcgaugcagauggccuaccgguucaacggcaucggggucacccagaacgugcucuacgagaaccagaagcugaucgccaaccaguucaacagcgccaucggcaagauccaggacucccugagcuccaccgccagcgcgcucgggaagcugcaggacguggucaaccagaacgcccaggcccugaacacgcucgugaagcagcuguccagcaacuucggcgccaucuccagcgugcugaacgacauccucucccgccuggacccgcccgaggccgaggugcagaucgaccggcugaucaccgggcgccuccagagccugcagaccuacgugacccagcagcugauccgggcggccgagauccgcgccagcgccaaccucgccgcgaccaagauguccgagugcguccugggccagagcaagcggguggacuucugcggcaagggguaccagcugauguccuucccccagagcgccccgcacggcguggucuuccucaacgugacguacguccccgcccaggagaagaacuucaccaccgcccccgcgaucugcaacgacgggaaggcccacuucccccgcgagggcguguucguguccaacgggaccaacugguucgucacgcagcggaacuucuacgagccgcagaucaucaccaccgacaacaccuucgugagcggcaacugcgacguggucaucggcaucgugaacaacacgguguacgacccccugcagcccgagcuggacuccggcgggggcgggagcgacaucaucaagcuccugaacgagcaggucaacaaggagaugcaguccagcaaccuguacauguccaugagcuccuggugcuacacccacagccucgacggcgccgggcuguuccuguucgaccacgccgcggaggaguacgagcacgccaagaagcucaucaucuuccugaacgagaacaacgugcccgugcagcugaccuccaucagcgccccggagcacaaguucgagggccucacgcagaucuuccagaaggccuacgagcacgagcagcacaucuccgagagcaucaacaacaucguggaccacgccaucaaguccaaggaccacgcgaccuucaacuuccugcagugguacgucgccgagcagcacgaggaggaggugcuguucaaggacauccucgacaagaucgagcugaucgggaacgagaaccacggccuguaccucgccgaccaguacgugaaggggaucgccaagagccgcaaguccugaggacuagucccuguucccagagcccacuuuuuuuucuuuuuuugaaauaaaauagccugucuuucagaucucaaaggcucuuuucagagccaccaaaaaaaaaaaaaaaaaaaaaaaaaaaaaaaaaaaaaaaaaaaaaaaaaaaaaaaaaaaaaaaaaaaaaaaaaaaaaaaaaaaaaaaaaaaaaaaaaaaaa

SEQ ID NO: 12433 - RNA, 4220 nt, Artificial Sequence
  SARS-CoV-2/Wuhan/WIV05/2019__EPI_ISL_402128 spike protein mRNA gc (1-1147)(I712C_T1077C) Ferritin construct
aggagagucccgcagucggcguccagcggcucugcuuguucgugugugugucguugcaggccuuauucaagcuuaccauguucguguuccugguccuccugccccuggugagcucccagugcgugaaccucaccacccgcacgcagcugccgcccgccuacaccaacagcuucacccggggcgucuacuaccccgacaagguguuccgcuccagcgugcugcacuccacccaggaccucuuccugcccuucuucagcaacgucacgugguuccacgccauccacguguccgggaccaacggcaccaagcgguucgacaacccggugcugcccuucaacgacggggucuacuucgcgagcaccgagaaguccaacaucauccgcggcuggaucuucgggacgacccucgacagcaagacccagucccugcugaucgugaacaacgccaccaacguggucaucaaggugugcgaguuccaguucugcaacgaccccuuccucggcguguacuaccacaagaacaacaagagcuggauggaguccgaguuccgggucuacagcuccgccaacaacugcacguucgaguacgugagccagcccuuccugauggaccuggagggcaagcaggggaacuucaagaaccuccgcgaguucguguucaagaacaucgacggcuacuucaagaucuacuccaagcacaccccgaucaaccugguccgggaccugccccagggguucagcgcccucgagccccugguggaccugcccaucggcaucaacaucacccgcuuccagacccuccuggcccugcaccgguccuaccucacgccgggggacagcagcuccggcuggaccgcgggcgccgccgccuacuacgugggguaccugcagccccgcaccuuccugcucaaguacaacgagaacggcaccaucacggacgcggucgacugcgcccuggacccccugagcgagaccaagugcacccucaaguccuucaccguggagaaggggaucuaccagacgagcaacuuccgggugcagcccaccgaguccaucguccgcuucccgaacaucaccaaccugugccccuucggcgagguguucaacgccacccgguucgccagcgucuacgccuggaaccgcaagcggaucuccaacugcguggcggacuacagcgugcuguacaacuccgccagcuucuccacguucaagugcuacggcgucagccccaccaagcucaacgaccugugcuucaccaacguguacgccgacuccuucgugauccgcggggacgagguccggcagaucgcccccggccagaccgggaagaucgccgacuacaacuacaagcugccggacgacuucacgggcugcgugaucgcguggaacagcaacaaccucgacuccaaggucgggggcaacuacaacuaccuguaccgccuguuccgcaagagcaaccucaagcccuucgagcgggacaucuccaccgagaucuaccaggccggcagcacccccugcaacgggguggagggcuucaacugcuacuucccccugcaguccuacggguuccagccgaccaacggcgugggguaccagcccuaccggguggucgugcugagcuucgagcuccugcacgcccccgccacggugugcggccccaagaaguccaccaaccuggucaagaacaagugcgugaacuucaacuucaacggccucaccgggaccggcgugcugaccgagagcaacaagaaguuccugccguuccagcaguucgggcgcgacaucgccgacacgaccgacgcgguccgcgacccccagacccuggagauccucgacaucacccccugcagcuucggcgggguguccgugaucacgccgggcaccaacaccagcaaccaggucgccgugcuguaccaggacgugaacugcaccgagguccccguggccauccacgccgaccagcugacgcccaccuggcggguguacuccaccggcagcaacgucuuccagacccgcgccgggugccucaucggcgcggagcacgugaacaacuccuacgagugcgacauccccaucggggccggcaucugcgccagcuaccagacgcagaccaacuccccgcggcgcgcccggagcguggcgucccagagcaucaucgccuacaccaugucccugggcgccgagaacagcgucgccuacuccaacaacagcugcgccauccccaccaacuucacgaucuccgugaccaccgagauccugcccgugagcaugaccaagacgagcgucgacugcaccauguacaucugcggggacuccaccgagugcagcaaccuccugcugcaguacggcuccuucugcacccagcucaaccgcgcgcugacggggaucgccguggagcaggacaagaacacccaggagguguucgcccaggucaagcagaucuacaagacgcccccgaucaaggacuucggcggguucaacuucagccagauccugcccgaccccuccaagcccagcaagcgguccuucaucgaggaccuccuguucaacaaggugacccuggccgacgccggcuucaucaagcaguacggcgacugccucggggacaucgcggcccgcgaccugaucugcgcccagaaguucaacggccugaccgugcucccgccccugcugaccgacgagaugaucgcccaguacaccagcgcccuccuggcggggaccaucacguccggcuggaccuucggggccggcgccgcccugcagauccccuucgcgaugcagauggccuaccgguucaacggcaucggggucacccagaacgugcucuacgagaaccagaagcugaucgccaaccaguucaacagcgccaucggcaagauccaggacucccugagcuccaccgccagcgcgcucgggaagcugcaggacguggucaaccagaacgcccaggcccugaacacgcucgugaagcagcuguccagcaacuucggcgccaucuccagcgugcugaacgacauccucucccgccuggacaaggucgaggccgaggugcagaucgaccggcugaucaccgggcgccuccagagccugcagaccuacgugacccagcagcugauccgggcggccgagauccgcgccagcgccaaccucgccgcgaccaagauguccgagugcguccugggccagagcaagcggguggacuucugcggcaagggguaccaccugauguccuucccccagagcgccccgcacggcguggucuuccuccacgugacguacguccccgcccaggagaagaacuucaccugcgcccccgcgaucugccacgacgggaaggcccacuucccccgcgagggcguguucguguccaacgggacccacugguucgucacgcagcggaacuucuacgagccgcagaucaucaccaccgacaacaccuucgugagcggcaacugcgacguggucaucggcaucgugaacaacacgguguacgacccccugcagcccgagcuggacuccggcgggggcgggagcgacaucaucaagcuccugaacgagcaggucaacaaggagaugcaguccagcaaccuguacauguccaugagcuccuggugcuacacccacagccucgacggcgccgggcuguuccuguucgaccacgccgcggaggaguacgagcacgccaagaagcucaucaucuuccugaacgagaacaacgugcccgugcagcugaccuccaucagcgccccggagcacaaguucgagggccucacgcagaucuuccagaaggccuacgagcacgagcagcacaucuccgagagcaucaacaacaucguggaccacgccaucaaguccaaggaccacgcgaccuucaacuuccugcagugguacgucgccgagcagcacgaggaggaggugcuguucaaggacauccucgacaagaucgagcugaucgggaacgagaaccacggccuguaccucgccgaccaguacgugaaggggaucgccaagagccgcaaguccugaggacuagucccuguucccagagcccacuuuuuuuucuuuuuuugaaauaaaauagccugucuuucagaucucaaaggcucuuuucagagccaccaaaaaaaaaaaaaaaaaaaaaaaaaaaaaaaaaaaaaaaaaaaaaaaaaaaaaaaaaaaaaaaaaaaaaaaaaaaaaaaaaaaaaaaaaaaaaaaaaaaaa

SEQ ID NO: 12434 - RNA, 4220 nt, Artificial Sequence
  SARS-CoV-2/Wuhan/WIV05/2019__EPI_ISL_402128 spike protein mRNA gc (1-1147)(I714C_Y1110C) Ferritin construct
aggagagucccgcagucggcguccagcggcucugcuuguucgugugugugucguugcaggccuuauucaagcuuaccauguucguguuccugguccuccugccccuggugagcucccagugcgugaaccucaccacccgcacgcagcugccgcccgccuacaccaacagcuucacccggggcgucuacuaccccgacaagguguuccgcuccagcgugcugcacuccacccaggaccucuuccugcccuucuucagcaacgucacgugguuccacgccauccacguguccgggaccaacggcaccaagcgguucgacaacccggugcugcccuucaacgacggggucuacuucgcgagcaccgagaaguccaacaucauccgcggcuggaucuucgggacgacccucgacagcaagacccagucccugcugaucgugaacaacgccaccaacguggucaucaaggugugcgaguuccaguucugcaacgaccccuuccucggcguguacuaccacaagaacaacaagagcuggauggaguccgaguuccgggucuacagcuccgccaacaacugcacguucgaguacgugagccagcccuuccugauggaccuggagggcaagcaggggaacuucaagaaccuccgcgaguucguguucaagaacaucgacggcuacuucaagaucuacuccaagcacaccccgaucaaccugguccgggaccugccccagggguucagcgcccucgagccccugguggaccugcccaucggcaucaacaucacccgcuuccagacccuccuggcccugcaccgguccuaccucacgccgggggacagcagcuccggcuggaccgcgggcgccgccgccuacuacgugggguaccugcagccccgcaccuuccugcucaaguacaacgagaacggcaccaucacggacgcggucgacugcgcccuggacccccugagcgagaccaagugcacccucaaguccuucaccguggagaaggggaucuaccagacgagcaacuuccgggugcagcccaccgaguccaucguccgcuucccgaacaucaccaaccugugccccuucggcgagguguucaacgccacccgguucgccagcgucuacgccuggaaccgcaagcggaucuccaacugcguggcggacuacagcgugcuguacaacuccgccagcuucuccacguucaagugcuacggcgucagccccaccaagcucaacgaccugugcuucaccaacguguacgccgacuccuucgugauccgcggggacgagguccggcagaucgcccccggccagaccgggaagaucgccgacuacaacuacaagcugccggacgacuucacgggcugcgugaucgcguggaacagcaacaaccucgacuccaaggucgggggcaacuacaacuaccuguaccgccuguuccgcaagagcaaccucaagcccuucgagcgggacaucuccaccgagaucuaccaggccggcagcacccccugcaacgggguggagggcuucaacugcuacuucccccugcaguccuacggguuccagccgaccaacggcgugggguaccagcccuaccggguggucgugcugagcuucgagcuccugcacgcccccgccacggugugcggccccaagaaguccaccaaccuggucaagaacaagugcgugaacuucaacuucaacggccucaccgggaccggcgugcugaccgagagcaacaagaaguuccugccguuccagcaguucgggcgcgacaucgccgacacgaccgacgcgguccgcgacccccagacccuggagauccucgacaucacccccugcagcuucggcgggguguccgugaucacgccgggcaccaacaccagcaaccaggucgccgugcuguaccaggacgugaacugcaccgagguccccguggccauccacgccgaccagcugacgcccaccuggcggguguacuccaccggcagcaacgucuuccagacccgcgccgggugccucaucggcgcggagcacgugaacaacuccuacgagugcgacauccccaucggggccggcaucugcgccagcuaccagacgcagaccaacuccccgcggcgcgcccggagcguggcgucccagagcaucaucgccuacaccaugucccugggcgccgagaacagcgucgccuacuccaacaacagcaucgccugccccaccaacuucacgaucuccgugaccaccgagauccugcccgugagcaugaccaagacgagcgucgacugcaccauguacaucugcggggacuccaccgagugcagcaaccuccugcugcaguacggcuccuucugcacccagcucaaccgcgcgcugacggggaucgccguggagcaggacaagaacacccaggagguguucgcccaggucaagcagaucuacaagacgcccccgaucaaggacuucggcggguucaacuucagccagauccugcccgaccccuccaagcccagcaagcgguccuucaucgaggaccuccuguucaacaaggugacccuggccgacgccggcuucaucaagcaguacggcgacugccucggggacaucgcggcccgcgaccugaucugcgcccagaaguucaacggccugaccgugcucccgccccugcugaccgacgagaugaucgcccaguacaccagcgcccuccuggcggggaccaucacguccggcuggaccuucggggccggcgccgcccugcagauccccuucgcgaugcagauggccuaccgguucaacggcaucggggucacccagaacgugcucuacgagaaccagaagcugaucgccaaccaguucaacagcgccaucggcaagauccaggacucccugagcuccaccgccagcgcgcucgggaagcugcaggacguggucaaccagaacgcccaggcccugaacacgcucgugaagcagcuguccagcaacuucggcgccaucuccagcgugcugaacgacauccucucccgccuggacaaggucgaggccgaggugcagaucgaccggcugaucaccgggcgccuccagagccugcagaccuacgugacccagcagcugauccgggcggccgagauccgcgccagcgccaaccucgccgcgaccaagauguccgagugcguccugggccagagcaagcggguggacuucugcggcaagggguaccaccugauguccuucccccagagcgccccgcacggcguggucuuccuccacgugacguacguccccgcccaggagaagaacuucaccaccgcccccgcgaucugccacgacgggaaggcccacuucccccgcgagggcguguucguguccaacgggacccacugguucgucacgcagcggaacuucugcgagccgcagaucaucaccaccgacaacaccuucgugagcggcaacugcgacguggucaucggcaucgugaacaacacgguguacgacccccugcagcccgagcuggacuccggcgggggcgggagcgacaucaucaagcuccugaacgagcaggucaacaaggagaugcaguccagcaaccuguacauguccaugagcuccuggugcuacacccacagccucgacggcgccgggcuguuccuguucgaccacgccgcggaggaguacgagcacgccaagaagcucaucaucuuccugaacgagaacaacgugcccgugcagcugaccuccaucagcgccccggagcacaaguucgagggccucacgcagaucuuccagaaggccuacgagcacgagcagcacaucuccgagagcaucaacaacaucguggaccacgccaucaaguccaaggaccacgcgaccuucaacuuccugcagugguacgucgccgagcagcacgaggaggaggugcuguucaaggacauccucgacaagaucgagcugaucgggaacgagaaccacggccuguaccucgccgaccaguacgugaaggggaucgccaagagccgcaaguccugaggacuagucccuguucccagagcccacuuuuuuuucuuuuuuugaaauaaaauagccugucuuucagaucucaaaggcucuuuucagagccaccaaaaaaaaaaaaaaaaaaaaaaaaaaaaaaaaaaaaaaaaaaaaaaaaaaaaaaaaaaaaaaaaaaaaaaaaaaaaaaaaaaaaaaaaaaaaaaaaaaaaa

SEQ ID NO: 12435 - RNA, 4220 nt, Artificial Sequence
  SARS-CoV-2/Wuhan/WIV05/2019__EPI_ISL_402128 spike protein mRNA gc (1-1147)(P715C_P1069C) Ferritin construct
aggagagucccgcagucggcguccagcggcucugcuuguucgugugugugucguugcaggccuuauucaagcuuaccauguucguguuccugguccuccugccccuggugagcucccagugcgugaaccucaccacccgcacgcagcugccgcccgccuacaccaacagcuucacccggggcgucuacuaccccgacaagguguuccgcuccagcgugcugcacuccacccaggaccucuuccugcccuucuucagcaacgucacgugguuccacgccauccacguguccgggaccaacggcaccaagcgguucgacaacccggugcugcccuucaacgacggggucuacuucgcgagcaccgagaaguccaacaucauccgcggcuggaucuucgggacgacccucgacagcaagacccagucccugcugaucgugaacaacgccaccaacguggucaucaaggugugcgaguuccaguucugcaacgaccccuuccucggcguguacuaccacaagaacaacaagagcuggauggaguccgaguuccgggucuacagcuccgccaacaacugcacguucgaguacgugagccagcccuuccugauggaccuggagggcaagcaggggaacuucaagaaccuccgcgaguucguguucaagaacaucgacggcuacuucaagaucuacuccaagcacaccccgaucaaccugguccgggaccugccccagggguucagcgcccucgagccccugguggaccugcccaucggcaucaacaucacccgcuuccagacccuccuggcccugcaccgguccuaccucacgccgggggacagcagcuccggcuggaccgcgggcgccgccgccuacuacgugggguaccugcagccccgcaccuuccugcucaaguacaacgagaacggcaccaucacggacgcggucgacugcgcccuggacccccugagcgagaccaagugcacccucaaguccuucaccguggagaaggggaucuaccagacgagcaacuuccgggugcagcccaccgaguccaucguccgcuucccgaacaucaccaaccugugccccuucggcgagguguucaacgccacccgguucgccagcgucuacgccuggaaccgcaagcggaucuccaacugcguggcggacuacagcgugcuguacaacuccgccagcuucuccacguucaagugcuacggcgucagccccaccaagcucaacgaccugugcuucaccaacguguacgccgacuccuucgugauccgcggggacgagguccggcagaucgcccccggccagaccgggaagaucgccgacuacaacuacaagcugccggacgacuucacgggcugcgugaucgcguggaacagcaacaaccucgacuccaaggucgggggcaacuacaacuaccuguaccgccuguuccgcaagagcaaccucaagcccuucgagcgggacaucuccaccgagaucuaccaggccggcagcacccccugcaacgggguggagggcuucaacugcuacuucccccugcaguccuacggguuccagccgaccaacggcgugggguaccagcccuaccggguggucgugcugagcuucgagcuccugcacgcccccgccacggugugcggccccaagaaguccaccaaccuggucaagaacaagugcgugaacuucaacuucaacggccucaccgggaccggcgugcugaccgagagcaacaagaaguuccugccguuccagcaguucgggcgcgacaucgccgacacgaccgacgcgguccgcgacccccagacccuggagauccucgacaucacccccugcagcuucggcgggguguccgugaucacgccgggcaccaacaccagcaaccaggucgccgugcuguaccaggacgugaacugcaccgagguccccguggccauccacgccgaccagcugacgcccaccuggcggguguacuccaccggcagcaacgucuuccagacccgcgccgggugccucaucggcgcggagcacgugaacaacuccuacgagugcgacauccccaucggggccggcaucugcgccagcuaccagacgcagaccaacuccccgcggcgcgcccggagcguggcgucccagagcaucaucgccuacaccaugucccugggcgccgagaacagcgucgccuacuccaacaacagcaucgccaucugcaccaacuucacgaucuccgugaccaccgagauccugcccgugagcaugaccaagacgagcgucgacugcaccauguacaucugcggggacuccaccgagugcagcaaccuccugcugcaguacggcuccuucugcacccagcucaaccgcgcgcugacggggaucgccguggagcaggacaagaacacccaggagguguucgcccaggucaagcagaucuacaagacgcccccgaucaaggacuucggcggguucaacuucagccagauccugcccgaccccuccaagcccagcaagcgguccuucaucgaggaccuccuguucaacaaggugacccuggccgacgccggcuucaucaagcaguacggcgacugccucggggacaucgcggcccgcgaccugaucugcgcccagaaguucaacggccugaccgugcucccgccccugcugaccgacgagaugaucgcccaguacaccagcgcccuccuggcggggaccaucacguccggcuggaccuucggggccggcgccgcccugcagauccccuucgcgaugcagauggccuaccgguucaacggcaucggggucacccagaacgugcucuacgagaaccagaagcugaucgccaaccaguucaacagcgccaucggcaagauccaggacucccugagcuccaccgccagcgcgcucgggaagcugcaggacguggucaaccagaacgcccaggcccugaacacgcucgugaagcagcuguccagcaacuucggcgccaucuccagcgugcugaacgacauccucucccgccuggacaaggucgaggccgaggugcagaucgaccggcugaucaccgggcgccuccagagccugcagaccuacgugacccagcagcugauccgggcggccgagauccgcgccagcgccaaccucgccgcgaccaagauguccgagugcguccugggccagagcaagcggguggacuucugcggcaagggguaccaccugauguccuucccccagagcgccccgcacggcguggucuuccuccacgugacguacgucugcgcccaggagaagaacuucaccaccgcccccgcgaucugccacgacgggaaggcccacuucccccgcgagggcguguucguguccaacgggacccacugguucgucacgcagcggaacuucuacgagccgcagaucaucaccaccgacaacaccuucgugagcggcaacugcgacguggucaucggcaucgugaacaacacgguguacgacccccugcagcccgagcuggacuccggcgggggcgggagcgacaucaucaagcuccugaacgagcaggucaacaaggagaugcaguccagcaaccuguacauguccaugagcuccuggugcuacacccacagccucgacggcgccgggcuguuccuguucgaccacgccgcggaggaguacgagcacgccaagaagcucaucaucuuccugaacgagaacaacgugcccgugcagcugaccuccaucagcgccccggagcacaaguucgagggccucacgcagaucuuccagaaggccuacgagcacgagcagcacaucuccgagagcaucaacaacaucguggaccacgccaucaaguccaaggaccacgcgaccuucaacuuccugcagugguacgucgccgagcagcacgaggaggaggugcuguucaaggacauccucgacaagaucgagcugaucgggaacgagaaccacggccuguaccucgccgaccaguacgugaaggggaucgccaagagccgcaaguccugaggacuagucccuguucccagagcccacuuuuuuuucuuuuuuugaaauaaaauagccugucuuucagaucucaaaggcucuuuucagagccaccaaaaaaaaaaaaaaaaaaaaaaaaaaaaaaaaaaaaaaaaaaaaaaaaaaaaaaaaaaaaaaaaaaaaaaaaaaaaaaaaaaaaaaaaaaaaaaaaaaaaa

SEQ ID NO: 12436 - RNA, 4220 nt, Artificial Sequence
  SARS-CoV-2/Wuhan/WIV05/2019__EPI_ISL_402128 spike protein mRNA gc (1-1147)(G889C_L1034C) Ferritin construct
aggagagucccgcagucggcguccagcggcucugcuuguucgugugugugucguugcaggccuuauucaagcuuaccauguucguguuccugguccuccugccccuggugagcucccagugcgugaaccucaccacccgcacgcagcugccgcccgccuacaccaacagcuucacccggggcgucuacuaccccgacaagguguuccgcuccagcgugcugcacuccacccaggaccucuuccugcccuucuucagcaacgucacgugguuccacgccauccacguguccgggaccaacggcaccaagcgguucgacaacccggugcugcccuucaacgacggggucuacuucgcgagcaccgagaaguccaacaucauccgcggcuggaucuucgggacgacccucgacagcaagacccagucccugcugaucgugaacaacgccaccaacguggucaucaaggugugcgaguuccaguucugcaacgaccccuuccucggcguguacuaccacaagaacaacaagagcuggauggaguccgaguuccgggucuacagcuccgccaacaacugcacguucgaguacgugagccagcccuuccugauggaccuggagggcaagcaggggaacuucaagaaccuccgcgaguucguguucaagaacaucgacggcuacuucaagaucuacuccaagcacaccccgaucaaccugguccgggaccugccccagggguucagcgcccucgagccccugguggaccugcccaucggcaucaacaucacccgcuuccagacccuccuggcccugcaccgguccuaccucacgccgggggacagcagcuccggcuggaccgcgggcgccgccgccuacuacgugggguaccugcagccccgcaccuuccugcucaaguacaacgagaacggcaccaucacggacgcggucgacugcgcccuggacccccugagcgagaccaagugcacccucaaguccuucaccguggagaaggggaucuaccagacgagcaacuuccgggugcagcccaccgaguccaucguccgcuucccgaacaucaccaaccugugccccuucggcgagguguucaacgccacccgguucgccagcgucuacgccuggaaccgcaagcggaucuccaacugcguggcggacuacagcgugcuguacaacuccgccagcuucuccacguucaagugcuacggcgucagccccaccaagcucaacgaccugugcuucaccaacguguacgccgacuccuucgugauccgcggggacgagguccggcagaucgcccccggccagaccgggaagaucgccgacuacaacuacaagcugccggacgacuucacgggcugcgugaucgcguggaacagcaacaaccucgacuccaaggucgggggcaacuacaacuaccuguaccgccuguuccgcaagagcaaccucaagcccuucgagcgggacaucuccaccgagaucuaccaggccggcagcacccccugcaacgggguggagggcuucaacugcuacuucccccugcaguccuacggguuccagccgaccaacggcgugggguaccagcccuaccggguggucgugcugagcuucgagcuccugcacgcccccgccacggugugcggccccaagaaguccaccaaccuggucaagaacaagugcgugaacuucaacuucaacggccucaccgggaccggcgugcugaccgagagcaacaagaaguuccugccguuccagcaguucgggcgcgacaucgccgacacgaccgacgcgguccgcgacccccagacccuggagauccucgacaucacccccugcagcuucggcgggguguccgugaucacgccgggcaccaacaccagcaaccaggucgccgugcuguaccaggacgugaacugcaccgagguccccguggccauccacgccgaccagcugacgcccaccuggcggguguacuccaccggcagcaacgucuuccagacccgcgccgggugccucaucggcgcggagcacgugaacaacuccuacgagugcgacauccccaucggggccggcaucugcgccagcuaccagacgcagaccaacuccccgcggcgcgcccggagcguggcgucccagagcaucaucgccuacaccaugucccugggcgccgagaacagcgucgccuacuccaacaacagcaucgccauccccaccaacuucacgaucuccgugaccaccgagauccugcccgugagcaugaccaagacgagcgucgacugcaccauguacaucugcggggacuccaccgagugcagcaaccuccugcugcaguacggcuccuucugcacccagcucaaccgcgcgcugacggggaucgccguggagcaggacaagaacacccaggagguguucgcccaggucaagcagaucuacaagacgcccccgaucaaggacuucggcggguucaacuucagccagauccugcccgaccccuccaagcccagcaagcgguccuucaucgaggaccuccuguucaacaaggugacccuggccgacgccggcuucaucaagcaguacggcgacugccucggggacaucgcggcccgcgaccugaucugcgcccagaaguucaacggccugaccgugcucccgccccugcugaccgacgagaugaucgcccaguacaccagcgcccuccuggcggggaccaucacguccggcuggaccuucugcgccggcgccgcccugcagauccccuucgcgaugcagauggccuaccgguucaacggcaucggggucacccagaacgugcucuacgagaaccagaagcugaucgccaaccaguucaacagcgccaucggcaagauccaggacucccugagcuccaccgccagcgcgcucgggaagcugcaggacguggucaaccagaacgcccaggcccugaacacgcucgugaagcagcuguccagcaacuucggcgccaucuccagcgugcugaacgacauccucucccgccuggacaaggucgaggccgaggugcagaucgaccggcugaucaccgggcgccuccagagccugcagaccuacgugacccagcagcugauccgggcggccgagauccgcgccagcgccaaccucgccgcgaccaagauguccgagugcgucugcggccagagcaagcggguggacuucugcggcaagggguaccaccugauguccuucccccagagcgccccgcacggcguggucuuccuccacgugacguacguccccgcccaggagaagaacuucaccaccgcccccgcgaucugccacgacgggaaggcccacuucccccgcgagggcguguucguguccaacgggacccacugguucgucacgcagcggaacuucuacgagccgcagaucaucaccaccgacaacaccuucgugagcggcaacugcgacguggucaucggcaucgugaacaacacgguguacgacccccugcagcccgagcuggacuccggcgggggcgggagcgacaucaucaagcuccugaacgagcaggucaacaaggagaugcaguccagcaaccuguacauguccaugagcuccuggugcuacacccacagccucgacggcgccgggcuguuccuguucgaccacgccgcggaggaguacgagcacgccaagaagcucaucaucuuccugaacgagaacaacgugcccgugcagcugaccuccaucagcgccccggagcacaaguucgagggccucacgcagaucuuccagaaggccuacgagcacgagcagcacaucuccgagagcaucaacaacaucguggaccacgccaucaaguccaaggaccacgcgaccuucaacuuccugcagugguacgucgccgagcagcacgaggaggaggugcuguucaaggacauccucgacaagaucgagcugaucgggaacgagaaccacggccuguaccucgccgaccaguacgugaaggggaucgccaagagccgcaaguccugaggacuagucccuguucccagagcccacuuuuuuuucuuuuuuugaaauaaaauagccugucuuucagaucucaaaggcucuuuucagagccaccaaaaaaaaaaaaaaaaaaaaaaaaaaaaaaaaaaaaaaaaaaaaaaaaaaaaaaaaaaaaaaaaaaaaaaaaaaaaaaaaaaaaaaaaaaaaaaaaaaaaa

SEQ ID NO: 12437 - RNA, 4220 nt, Artificial Sequence
  SARS-CoV-2/Wuhan/WIV05/2019__EPI_ISL_402128 spike protein mRNA gc (1-1147)(I909C_Y1047C) Ferritin construct
aggagagucccgcagucggcguccagcggcucugcuuguucgugugugugucguugcaggccuuauucaagcuuaccauguucguguuccugguccuccugccccuggugagcucccagugcgugaaccucaccacccgcacgcagcugccgcccgccuacaccaacagcuucacccggggcgucuacuaccccgacaagguguuccgcuccagcgugcugcacuccacccaggaccucuuccugcccuucuucagcaacgucacgugguuccacgccauccacguguccgggaccaacggcaccaagcgguucgacaacccggugcugcccuucaacgacggggucuacuucgcgagcaccgagaaguccaacaucauccgcggcuggaucuucgggacgacccucgacagcaagacccagucccugcugaucgugaacaacgccaccaacguggucaucaaggugugcgaguuccaguucugcaacgaccccuuccucggcguguacuaccacaagaacaacaagagcuggauggaguccgaguuccgggucuacagcuccgccaacaacugcacguucgaguacgugagccagcccuuccugauggaccuggagggcaagcaggggaacuucaagaaccuccgcgaguucguguucaagaacaucgacggcuacuucaagaucuacuccaagcacaccccgaucaaccugguccgggaccugccccagggguucagcgcccucgagccccugguggaccugcccaucggcaucaacaucacccgcuuccagacccuccuggcccugcaccgguccuaccucacgccgggggacagcagcuccggcuggaccgcgggcgccgccgccuacuacgugggguaccugcagccccgcaccuuccugcucaaguacaacgagaacggcaccaucacggacgcggucgacugcgcccuggacccccugagcgagaccaagugcacccucaaguccuucaccguggagaaggggaucuaccagacgagcaacuuccgggugcagcccaccgaguccaucguccgcuucccgaacaucaccaaccugugccccuucggcgagguguucaacgccacccgguucgccagcgucuacgccuggaaccgcaagcggaucuccaacugcguggcggacuacagcgugcuguacaacuccgccagcuucuccacguucaagugcuacggcgucagccccaccaagcucaacgaccugugcuucaccaacguguacgccgacuccuucgugauccgcggggacgagguccggcagaucgcccccggccagaccgggaagaucgccgacuacaacuacaagcugccggacgacuucacgggcugcgugaucgcguggaacagcaacaaccucgacuccaaggucgggggcaacuacaacuaccuguaccgccuguuccgcaagagcaaccucaagcccuucgagcgggacaucuccaccgagaucuaccaggccggcagcacccccugcaacgggguggagggcuucaacugcuacuucccccugcaguccuacggguuccagccgaccaacggcgugggguaccagcccuaccggguggucgugcugagcuucgagcuccugcacgcccccgccacggugugcggccccaagaaguccaccaaccuggucaagaacaagugcgugaacuucaacuucaacggccucaccgggaccggcgugcugaccgagagcaacaagaaguuccugccguuccagcaguucgggcgcgacaucgccgacacgaccgacgcgguccgcgacccccagacccuggagauccucgacaucacccccugcagcuucggcgggguguccgugaucacgccgggcaccaacaccagcaaccaggucgccgugcuguaccaggacgugaacugcaccgagguccccguggccauccacgccgaccagcugacgcccaccuggcggguguacuccaccggcagcaacgucuuccagacccgcgccgggugccucaucggcgcggagcacgugaacaacuccuacgagugcgacauccccaucggggccggcaucugcgccagcuaccagacgcagaccaacuccccgcggcgcgcccggagcguggcgucccagagcaucaucgccuacaccaugucccugggcgccgagaacagcgucgccuacuccaacaacagcaucgccauccccaccaacuucacgaucuccgugaccaccgagauccugcccgugagcaugaccaagacgagcgucgacugcaccauguacaucugcggggacuccaccgagugcagcaaccuccugcugcaguacggcuccuucugcacccagcucaaccgcgcgcugacggggaucgccguggagcaggacaagaacacccaggagguguucgcccaggucaagcagaucuacaagacgcccccgaucaaggacuucggcggguucaacuucagccagauccugcccgaccccuccaagcccagcaagcgguccuucaucgaggaccuccuguucaacaaggugacccuggccgacgccggcuucaucaagcaguacggcgacugccucggggacaucgcggcccgcgaccugaucugcgcccagaaguucaacggccugaccgugcucccgccccugcugaccgacgagaugaucgcccaguacaccagcgcccuccuggcggggaccaucacguccggcuggaccuucggggccggcgccgcccugcagauccccuucgcgaugcagauggccuaccgguucaacggcugcggggucacccagaacgugcucuacgagaaccagaagcugaucgccaaccaguucaacagcgccaucggcaagauccaggacucccugagcuccaccgccagcgcgcucgggaagcugcaggacguggucaaccagaacgcccaggcccugaacacgcucgugaagcagcuguccagcaacuucggcgccaucuccagcgugcugaacgacauccucucccgccuggacaaggucgaggccgaggugcagaucgaccggcugaucaccgggcgccuccagagccugcagaccuacgugacccagcagcugauccgggcggccgagauccgcgccagcgccaaccucgccgcgaccaagauguccgagugcguccugggccagagcaagcggguggacuucugcggcaaggggugccaccugauguccuucccccagagcgccccgcacggcguggucuuccuccacgugacguacguccccgcccaggagaagaacuucaccaccgcccccgcgaucugccacgacgggaaggcccacuucccccgcgagggcguguucguguccaacgggacccacugguucgucacgcagcggaacuucuacgagccgcagaucaucaccaccgacaacaccuucgugagcggcaacugcgacguggucaucggcaucgugaacaacacgguguacgacccccugcagcccgagcuggacuccggcgggggcgggagcgacaucaucaagcuccugaacgagcaggucaacaaggagaugcaguccagcaaccuguacauguccaugagcuccuggugcuacacccacagccucgacggcgccgggcuguuccuguucgaccacgccgcggaggaguacgagcacgccaagaagcucaucaucuuccugaacgagaacaacgugcccgugcagcugaccuccaucagcgccccggagcacaaguucgagggccucacgcagaucuuccagaaggccuacgagcacgagcagcacaucuccgagagcaucaacaacaucguggaccacgccaucaaguccaaggaccacgcgaccuucaacuuccugcagugguacgucgccgagcagcacgaggaggaggugcuguucaaggacauccucgacaagaucgagcugaucgggaacgagaaccacggccuguaccucgccgaccaguacgugaaggggaucgccaagagccgcaaguccugaggacuagucccuguucccagagcccacuuuuuuuucuuuuuuugaaauaaaauagccugucuuucagaucucaaaggcucuuuucagagccaccaaaaaaaaaaaaaaaaaaaaaaaaaaaaaaaaaaaaaaaaaaaaaaaaaaaaaaaaaaaaaaaaaaaaaaaaaaaaaaaaaaaaaaaaaaaaaaaaaaaaa

SEQ ID NO: 12438 - RNA, 4220 nt, Artificial Sequence
  SARS-CoV-2/Wuhan/WIV05/2019__EPI_ISL_402128 spike protein mRNA gc (1-1147)(Q965C_S1003C) Ferritin construct
aggagagucccgcagucggcguccagcggcucugcuuguucgugugugugucguugcaggccuuauucaagcuuaccauguucguguuccugguccuccugccccuggugagcucccagugcgugaaccucaccacccgcacgcagcugccgcccgccuacaccaacagcuucacccggggcgucuacuaccccgacaagguguuccgcuccagcgugcugcacuccacccaggaccucuuccugcccuucuucagcaacgucacgugguuccacgccauccacguguccgggaccaacggcaccaagcgguucgacaacccggugcugcccuucaacgacggggucuacuucgcgagcaccgagaaguccaacaucauccgcggcuggaucuucgggacgacccucgacagcaagacccagucccugcugaucgugaacaacgccaccaacguggucaucaaggugugcgaguuccaguucugcaacgaccccuuccucggcguguacuaccacaagaacaacaagagcuggauggaguccgaguuccgggucuacagcuccgccaacaacugcacguucgaguacgugagccagcccuuccugauggaccuggagggcaagcaggggaacuucaagaaccuccgcgaguucguguucaagaacaucgacggcuacuucaagaucuacuccaagcacaccccgaucaaccugguccgggaccugccccagggguucagcgcccucgagccccugguggaccugcccaucggcaucaacaucacccgcuuccagacccuccuggcccugcaccgguccuaccucacgccgggggacagcagcuccggcuggaccgcgggcgccgccgccuacuacgugggguaccugcagccccgcaccuuccugcucaaguacaacgagaacggcaccaucacggacgcggucgacugcgcccuggacccccugagcgagaccaagugcacccucaaguccuucaccguggagaaggggaucuaccagacgagcaacuuccgggugcagcccaccgaguccaucguccgcuucccgaacaucaccaaccugugccccuucggcgagguguucaacgccacccgguucgccagcgucuacgccuggaaccgcaagcggaucuccaacugcguggcggacuacagcgugcuguacaacuccgccagcuucuccacguucaagugcuacggcgucagccccaccaagcucaacgaccugugcuucaccaacguguacgccgacuccuucgugauccgcggggacgagguccggcagaucgcccccggccagaccgggaagaucgccgacuacaacuacaagcugccggacgacuucacgggcugcgugaucgcguggaacagcaacaaccucgacuccaaggucgggggcaacuacaacuaccuguaccgccuguuccgcaagagcaaccucaagcccuucgagcgggacaucuccaccgagaucuaccaggccggcagcacccccugcaacgggguggagggcuucaacugcuacuucccccugcaguccuacggguuccagccgaccaacggcgugggguaccagcccuaccggguggucgugcugagcuucgagcuccugcacgcccccgccacggugugcggccccaagaaguccaccaaccuggucaagaacaagugcgugaacuucaacuucaacggccucaccgggaccggcgugcugaccgagagcaacaagaaguuccugccguuccagcaguucgggcgcgacaucgccgacacgaccgacgcgguccgcgacccccagacccuggagauccucgacaucacccccugcagcuucggcgggguguccgugaucacgccgggcaccaacaccagcaaccaggucgccgugcuguaccaggacgugaacugcaccgagguccccguggccauccacgccgaccagcugacgcccaccuggcggguguacuccaccggcagcaacgucuuccagacccgcgccgggugccucaucggcgcggagcacgugaacaacuccuacgagugcgacauccccaucggggccggcaucugcgccagcuaccagacgcagaccaacuccccgcggcgcgcccggagcguggcgucccagagcaucaucgccuacaccaugucccugggcgccgagaacagcgucgccuacuccaacaacagcaucgccauccccaccaacuucacgaucuccgugaccaccgagauccugcccgugagcaugaccaagacgagcgucgacugcaccauguacaucugcggggacuccaccgagugcagcaaccuccugcugcaguacggcuccuucugcacccagcucaaccgcgcgcugacggggaucgccguggagcaggacaagaacacccaggagguguucgcccaggucaagcagaucuacaagacgcccccgaucaaggacuucggcggguucaacuucagccagauccugcccgaccccuccaagcccagcaagcgguccuucaucgaggaccuccuguucaacaaggugacccuggccgacgccggcuucaucaagcaguacggcgacugccucggggacaucgcggcccgcgaccugaucugcgcccagaaguucaacggccugaccgugcucccgccccugcugaccgacgagaugaucgcccaguacaccagcgcccuccuggcggggaccaucacguccggcuggaccuucggggccggcgccgcccugcagauccccuucgcgaugcagauggccuaccgguucaacggcaucggggucacccagaacgugcucuacgagaaccagaagcugaucgccaaccaguucaacagcgccaucggcaagauccaggacucccugagcuccaccgccagcgcgcucgggaagcugcaggacguggucaaccagaacgcccaggcccugaacacgcucgugaagugccuguccagcaacuucggcgccaucuccagcgugcugaacgacauccucucccgccuggacaaggucgaggccgaggugcagaucgaccggcugaucaccgggcgccuccagugccugcagaccuacgugacccagcagcugauccgggcggccgagauccgcgccagcgccaaccucgccgcgaccaagauguccgagugcguccugggccagagcaagcggguggacuucugcggcaagggguaccaccugauguccuucccccagagcgccccgcacggcguggucuuccuccacgugacguacguccccgcccaggagaagaacuucaccaccgcccccgcgaucugccacgacgggaaggcccacuucccccgcgagggcguguucguguccaacgggacccacugguucgucacgcagcggaacuucuacgagccgcagaucaucaccaccgacaacaccuucgugagcggcaacugcgacguggucaucggcaucgugaacaacacgguguacgacccccugcagcccgagcuggacuccggcgggggcgggagcgacaucaucaagcuccugaacgagcaggucaacaaggagaugcaguccagcaaccuguacauguccaugagcuccuggugcuacacccacagccucgacggcgccgggcuguuccuguucgaccacgccgcggaggaguacgagcacgccaagaagcucaucaucuuccugaacgagaacaacgugcccgugcagcugaccuccaucagcgccccggagcacaaguucgagggccucacgcagaucuuccagaaggccuacgagcacgagcagcacaucuccgagagcaucaacaacaucguggaccacgccaucaaguccaaggaccacgcgaccuucaacuuccugcagugguacgucgccgagcagcacgaggaggaggugcuguucaaggacauccucgacaagaucgagcugaucgggaacgagaaccacggccuguaccucgccgaccaguacgugaaggggaucgccaagagccgcaaguccugaggacuagucccuguucccagagcccacuuuuuuuucuuuuuuugaaauaaaauagccugucuuucagaucucaaaggcucuuuucagagccaccaaaaaaaaaaaaaaaaaaaaaaaaaaaaaaaaaaaaaaaaaaaaaaaaaaaaaaaaaaaaaaaaaaaaaaaaaaaaaaaaaaaaaaaaaaaaaaaaaaaaa

SEQ ID NO: 12439 - RNA, 4220 nt, Artificial Sequence
  SARS-CoV-2/Wuhan/WIV05/2019__EPI_ISL_402128 spike protein mRNA gc (1-1147)(F970C_G999C) Ferritin construct
aggagagucccgcagucggcguccagcggcucugcuuguucgugugugugucguugcaggccuuauucaagcuuaccauguucguguuccugguccuccugccccuggugagcucccagugcgugaaccucaccacccgcacgcagcugccgcccgccuacaccaacagcuucacccggggcgucuacuaccccgacaagguguuccgcuccagcgugcugcacuccacccaggaccucuuccugcccuucuucagcaacgucacgugguuccacgccauccacguguccgggaccaacggcaccaagcgguucgacaacccggugcugcccuucaacgacggggucuacuucgcgagcaccgagaaguccaacaucauccgcggcuggaucuucgggacgacccucgacagcaagacccagucccugcugaucgugaacaacgccaccaacguggucaucaaggugugcgaguuccaguucugcaacgaccccuuccucggcguguacuaccacaagaacaacaagagcuggauggaguccgaguuccgggucuacagcuccgccaacaacugcacguucgaguacgugagccagcccuuccugauggaccuggagggcaagcaggggaacuucaagaaccuccgcgaguucguguucaagaacaucgacggcuacuucaagaucuacuccaagcacaccccgaucaaccugguccgggaccugccccagggguucagcgcccucgagccccugguggaccugcccaucggcaucaacaucacccgcuuccagacccuccuggcccugcaccgguccuaccucacgccgggggacagcagcuccggcuggaccgcgggcgccgccgccuacuacgugggguaccugcagccccgcaccuuccugcucaaguacaacgagaacggcaccaucacggacgcggucgacugcgcccuggacccccugagcgagaccaagugcacccucaaguccuucaccguggagaaggggaucuaccagacgagcaacuuccgggugcagcccaccgaguccaucguccgcuucccgaacaucaccaaccugugccccuucggcgagguguucaacgccacccgguucgccagcgucuacgccuggaaccgcaagcggaucuccaacugcguggcggacuacagcgugcuguacaacuccgccagcuucuccacguucaagugcuacggcgucagccccaccaagcucaacgaccugugcuucaccaacguguacgccgacuccuucgugauccgcggggacgagguccggcagaucgcccccggccagaccgggaagaucgccgacuacaacuacaagcugccggacgacuucacgggcugcgugaucgcguggaacagcaacaaccucgacuccaaggucgggggcaacuacaacuaccuguaccgccuguuccgcaagagcaaccucaagcccuucgagcgggacaucuccaccgagaucuaccaggccggcagcacccccugcaacgggguggagggcuucaacugcuacuucccccugcaguccuacggguuccagccgaccaacggcgugggguaccagcccuaccggguggucgugcugagcuucgagcuccugcacgcccccgccacggugugcggccccaagaaguccaccaaccuggucaagaacaagugcgugaacuucaacuucaacggccucaccgggaccggcgugcugaccgagagcaacaagaaguuccugccguuccagcaguucgggcgcgacaucgccgacacgaccgacgcgguccgcgacccccagacccuggagauccucgacaucacccccugcagcuucggcgggguguccgugaucacgccgggcaccaacaccagcaaccaggucgccgugcuguaccaggacgugaacugcaccgagguccccguggccauccacgccgaccagcugacgcccaccuggcggguguacuccaccggcagcaacgucuuccagacccgcgccgggugccucaucggcgcggagcacgugaacaacuccuacgagugcgacauccccaucggggccggcaucugcgccagcuaccagacgcagaccaacuccccgcggcgcgcccggagcguggcgucccagagcaucaucgccuacaccaugucccugggcgccgagaacagcgucgccuacuccaacaacagcaucgccauccccaccaacuucacgaucuccgugaccaccgagauccugcccgugagcaugaccaagacgagcgucgacugcaccauguacaucugcggggacuccaccgagugcagcaaccuccugcugcaguacggcuccuucugcacccagcucaaccgcgcgcugacggggaucgccguggagcaggacaagaacacccaggagguguucgcccaggucaagcagaucuacaagacgcccccgaucaaggacuucggcggguucaacuucagccagauccugcccgaccccuccaagcccagcaagcgguccuucaucgaggaccuccuguucaacaaggugacccuggccgacgccggcuucaucaagcaguacggcgacugccucggggacaucgcggcccgcgaccugaucugcgcccagaaguucaacggccugaccgugcucccgccccugcugaccgacgagaugaucgcccaguacaccagcgcccuccuggcggggaccaucacguccggcuggaccuucggggccggcgccgcccugcagauccccuucgcgaugcagauggccuaccgguucaacggcaucggggucacccagaacgugcucuacgagaaccagaagcugaucgccaaccaguucaacagcgccaucggcaagauccaggacucccugagcuccaccgccagcgcgcucgggaagcugcaggacguggucaaccagaacgcccaggcccugaacacgcucgugaagcagcuguccagcaacugcggcgccaucuccagcgugcugaacgacauccucucccgccuggacaaggucgaggccgaggugcagaucgaccggcugaucaccugucgccuccagagccugcagaccuacgugacccagcagcugauccgggcggccgagauccgcgccagcgccaaccucgccgcgaccaagauguccgagugcguccugggccagagcaagcggguggacuucugcggcaagggguaccaccugauguccuucccccagagcgccccgcacggcguggucuuccuccacgugacguacguccccgcccaggagaagaacuucaccaccgcccccgcgaucugccacgacgggaaggcccacuucccccgcgagggcguguucguguccaacgggacccacugguucgucacgcagcggaacuucuacgagccgcagaucaucaccaccgacaacaccuucgugagcggcaacugcgacguggucaucggcaucgugaacaacacgguguacgacccccugcagcccgagcuggacuccggcgggggcgggagcgacaucaucaagcuccugaacgagcaggucaacaaggagaugcaguccagcaaccuguacauguccaugagcuccuggugcuacacccacagccucgacggcgccgggcuguuccuguucgaccacgccgcggaggaguacgagcacgccaagaagcucaucaucuuccugaacgagaacaacgugcccgugcagcugaccuccaucagcgccccggagcacaaguucgagggccucacgcagaucuuccagaaggccuacgagcacgagcagcacaucuccgagagcaucaacaacaucguggaccacgccaucaaguccaaggaccacgcgaccuucaacuuccugcagugguacgucgccgagcagcacgaggaggaggugcuguucaaggacauccucgacaagaucgagcugaucgggaacgagaaccacggccuguaccucgccgaccaguacgugaaggggaucgccaagagccgcaaguccugaggacuagucccuguucccagagcccacuuuuuuuucuuuuuuugaaauaaaauagccugucuuucagaucucaaaggcucuuuucagagccaccaaaaaaaaaaaaaaaaaaaaaaaaaaaaaaaaaaaaaaaaaaaaaaaaaaaaaaaaaaaaaaaaaaaaaaaaaaaaaaaaaaaaaaaaaaaaaaaaaaaaa

SEQ ID NO: 12440 - RNA, 4220 nt, Artificial Sequence
  SARS-CoV-2/Wuhan/WIV05/2019__EPI_ISL_402128 spike protein mRNA gc (1-1147)(A972C_R995C) Ferritin construct
aggagagucccgcagucggcguccagcggcucugcuuguucgugugugugucguugcaggccuuauucaagcuuaccauguucguguuccugguccuccugccccuggugagcucccagugcgugaaccucaccacccgcacgcagcugccgcccgccuacaccaacagcuucacccggggcgucuacuaccccgacaagguguuccgcuccagcgugcugcacuccacccaggaccucuuccugcccuucuucagcaacgucacgugguuccacgccauccacguguccgggaccaacggcaccaagcgguucgacaacccggugcugcccuucaacgacggggucuacuucgcgagcaccgagaaguccaacaucauccgcggcuggaucuucgggacgacccucgacagcaagacccagucccugcugaucgugaacaacgccaccaacguggucaucaaggugugcgaguuccaguucugcaacgaccccuuccucggcguguacuaccacaagaacaacaagagcuggauggaguccgaguuccgggucuacagcuccgccaacaacugcacguucgaguacgugagccagcccuuccugauggaccuggagggcaagcaggggaacuucaagaaccuccgcgaguucguguucaagaacaucgacggcuacuucaagaucuacuccaagcacaccccgaucaaccugguccgggaccugccccagggguucagcgcccucgagccccugguggaccugcccaucggcaucaacaucacccgcuuccagacccuccuggcccugcaccgguccuaccucacgccgggggacagcagcuccggcuggaccgcgggcgccgccgccuacuacgugggguaccugcagccccgcaccuuccugcucaaguacaacgagaacggcaccaucacggacgcggucgacugcgcccuggacccccugagcgagaccaagugcacccucaaguccuucaccguggagaaggggaucuaccagacgagcaacuuccgggugcagcccaccgaguccaucguccgcuucccgaacaucaccaaccugugccccuucggcgagguguucaacgccacccgguucgccagcgucuacgccuggaaccgcaagcggaucuccaacugcguggcggacuacagcgugcuguacaacuccgccagcuucuccacguucaagugcuacggcgucagccccaccaagcucaacgaccugugcuucaccaacguguacgccgacuccuucgugauccgcggggacgagguccggcagaucgcccccggccagaccgggaagaucgccgacuacaacuacaagcugccggacgacuucacgggcugcgugaucgcguggaacagcaacaaccucgacuccaaggucgggggcaacuacaacuaccuguaccgccuguuccgcaagagcaaccucaagcccuucgagcgggacaucuccaccgagaucuaccaggccggcagcacccccugcaacgggguggagggcuucaacugcuacuucccccugcaguccuacggguuccagccgaccaacggcgugggguaccagcccuaccggguggucgugcugagcuucgagcuccugcacgcccccgccacggugugcggccccaagaaguccaccaaccuggucaagaacaagugcgugaacuucaacuucaacggccucaccgggaccggcgugcugaccgagagcaacaagaaguuccugccguuccagcaguucgggcgcgacaucgccgacacgaccgacgcgguccgcgacccccagacccuggagauccucgacaucacccccugcagcuucggcgggguguccgugaucacgccgggcaccaacaccagcaaccaggucgccgugcuguaccaggacgugaacugcaccgagguccccguggccauccacgccgaccagcugacgcccaccuggcggguguacuccaccggcagcaacgucuuccagacccgcgccgggugccucaucggcgcggagcacgugaacaacuccuacgagugcgacauccccaucggggccggcaucugcgccagcuaccagacgcagaccaacuccccgcggcgcgcccggagcguggcgucccagagcaucaucgccuacaccaugucccugggcgccgagaacagcgucgccuacuccaacaacagcaucgccauccccaccaacuucacgaucuccgugaccaccgagauccugcccgugagcaugaccaagacgagcgucgacugcaccauguacaucugcggggacuccaccgagugcagcaaccuccugcugcaguacggcuccuucugcacccagcucaaccgcgcgcugacggggaucgccguggagcaggacaagaacacccaggagguguucgcccaggucaagcagaucuacaagacgcccccgaucaaggacuucggcggguucaacuucagccagauccugcccgaccccuccaagcccagcaagcgguccuucaucgaggaccuccuguucaacaaggugacccuggccgacgccggcuucaucaagcaguacggcgacugccucggggacaucgcggcccgcgaccugaucugcgcccagaaguucaacggccugaccgugcucccgccccugcugaccgacgagaugaucgcccaguacaccagcgcccuccuggcggggaccaucacguccggcuggaccuucggggccggcgccgcccugcagauccccuucgcgaugcagauggccuaccgguucaacggcaucggggucacccagaacgugcucuacgagaaccagaagcugaucgccaaccaguucaacagcgccaucggcaagauccaggacucccugagcuccaccgccagcgcgcucgggaagcugcaggacguggucaaccagaacgcccaggcccugaacacgcucgugaagcagcuguccagcaacuucggcugcaucuccagcgugcugaacgacauccucucccgccuggacaaggucgaggccgaggugcagaucgacugccugaucaccgggcgccuccagagccugcagaccuacgugacccagcagcugauccgggcggccgagauccgcgccagcgccaaccucgccgcgaccaagauguccgagugcguccugggccagagcaagcggguggacuucugcggcaagggguaccaccugauguccuucccccagagcgccccgcacggcguggucuuccuccacgugacguacguccccgcccaggagaagaacuucaccaccgcccccgcgaucugccacgacgggaaggcccacuucccccgcgagggcguguucguguccaacgggacccacugguucgucacgcagcggaacuucuacgagccgcagaucaucaccaccgacaacaccuucgugagcggcaacugcgacguggucaucggcaucgugaacaacacgguguacgacccccugcagcccgagcuggacuccggcgggggcgggagcgacaucaucaagcuccugaacgagcaggucaacaaggagaugcaguccagcaaccuguacauguccaugagcuccuggugcuacacccacagccucgacggcgccgggcuguuccuguucgaccacgccgcggaggaguacgagcacgccaagaagcucaucaucuuccugaacgagaacaacgugcccgugcagcugaccuccaucagcgccccggagcacaaguucgagggccucacgcagaucuuccagaaggccuacgagcacgagcagcacaucuccgagagcaucaacaacaucguggaccacgccaucaaguccaaggaccacgcgaccuucaacuuccugcagugguacgucgccgagcagcacgaggaggaggugcuguucaaggacauccucgacaagaucgagcugaucgggaacgagaaccacggccuguaccucgccgaccaguacgugaaggggaucgccaagagccgcaaguccugaggacuagucccuguucccagagcccacuuuuuuuucuuuuuuugaaauaaaauagccugucuuucagaucucaaaggcucuuuucagagccaccaaaaaaaaaaaaaaaaaaaaaaaaaaaaaaaaaaaaaaaaaaaaaaaaaaaaaaaaaaaaaaaaaaaaaaaaaaaaaaaaaaaaaaaaaaaaaaaaaaaaa

SEQ ID NO: 12441 - RNA, 4220 nt, Artificial Sequence
  SARS-CoV-2/Wuhan/WIV05/2019__EPI_ISL_402128 spike protein mRNA gc (1-1147)(A890C_V1040C) Ferritin construct
aggagagucccgcagucggcguccagcggcucugcuuguucgugugugugucguugcaggccuuauucaagcuuaccauguucguguuccugguccuccugccccuggugagcucccagugcgugaaccucaccacccgcacgcagcugccgcccgccuacaccaacagcuucacccggggcgucuacuaccccgacaagguguuccgcuccagcgugcugcacuccacccaggaccucuuccugcccuucuucagcaacgucacgugguuccacgccauccacguguccgggaccaacggcaccaagcgguucgacaacccggugcugcccuucaacgacggggucuacuucgcgagcaccgagaaguccaacaucauccgcggcuggaucuucgggacgacccucgacagcaagacccagucccugcugaucgugaacaacgccaccaacguggucaucaaggugugcgaguuccaguucugcaacgaccccuuccucggcguguacuaccacaagaacaacaagagcuggauggaguccgaguuccgggucuacagcuccgccaacaacugcacguucgaguacgugagccagcccuuccugauggaccuggagggcaagcaggggaacuucaagaaccuccgcgaguucguguucaagaacaucgacggcuacuucaagaucuacuccaagcacaccccgaucaaccugguccgggaccugccccagggguucagcgcccucgagccccugguggaccugcccaucggcaucaacaucacccgcuuccagacccuccuggcccugcaccgguccuaccucacgccgggggacagcagcuccggcuggaccgcgggcgccgccgccuacuacgugggguaccugcagccccgcaccuuccugcucaaguacaacgagaacggcaccaucacggacgcggucgacugcgcccuggacccccugagcgagaccaagugcacccucaaguccuucaccguggagaaggggaucuaccagacgagcaacuuccgggugcagcccaccgaguccaucguccgcuucccgaacaucaccaaccugugccccuucggcgagguguucaacgccacccgguucgccagcgucuacgccuggaaccgcaagcggaucuccaacugcguggcggacuacagcgugcuguacaacuccgccagcuucuccacguucaagugcuacggcgucagccccaccaagcucaacgaccugugcuucaccaacguguacgccgacuccuucgugauccgcggggacgagguccggcagaucgcccccggccagaccgggaagaucgccgacuacaacuacaagcugccggacgacuucacgggcugcgugaucgcguggaacagcaacaaccucgacuccaaggucgggggcaacuacaacuaccuguaccgccuguuccgcaagagcaaccucaagcccuucgagcgggacaucuccaccgagaucuaccaggccggcagcacccccugcaacgggguggagggcuucaacugcuacuucccccugcaguccuacggguuccagccgaccaacggcgugggguaccagcccuaccggguggucgugcugagcuucgagcuccugcacgcccccgccacggugugcggccccaagaaguccaccaaccuggucaagaacaagugcgugaacuucaacuucaacggccucaccgggaccggcgugcugaccgagagcaacaagaaguuccugccguuccagcaguucgggcgcgacaucgccgacacgaccgacgcgguccgcgacccccagacccuggagauccucgacaucacccccugcagcuucggcgggguguccgugaucacgccgggcaccaacaccagcaaccaggucgccgugcuguaccaggacgugaacugcaccgagguccccguggccauccacgccgaccagcugacgcccaccuggcggguguacuccaccggcagcaacgucuuccagacccgcgccgggugccucaucggcgcggagcacgugaacaacuccuacgagugcgacauccccaucggggccggcaucugcgccagcuaccagacgcagaccaacuccccgcggcgcgcccggagcguggcgucccagagcaucaucgccuacaccaugucccugggcgccgagaacagcgucgccuacuccaacaacagcaucgccauccccaccaacuucacgaucuccgugaccaccgagauccugcccgugagcaugaccaagacgagcgucgacugcaccauguacaucugcggggacuccaccgagugcagcaaccuccugcugcaguacggcuccuucugcacccagcucaaccgcgcgcugacggggaucgccguggagcaggacaagaacacccaggagguguucgcccaggucaagcagaucuacaagacgcccccgaucaaggacuucggcggguucaacuucagccagauccugcccgaccccuccaagcccagcaagcgguccuucaucgaggaccuccuguucaacaaggugacccuggccgacgccggcuucaucaagcaguacggcgacugccucggggacaucgcggcccgcgaccugaucugcgcccagaaguucaacggccugaccgugcucccgccccugcugaccgacgagaugaucgcccaguacaccagcgcccuccuggcggggaccaucacguccggcuggaccuucgggugcggcgccgcccugcagauccccuucgcgaugcagauggccuaccgguucaacggcaucggggucacccagaacgugcucuacgagaaccagaagcugaucgccaaccaguucaacagcgccaucggcaagauccaggacucccugagcuccaccgccagcgcgcucgggaagcugcaggacguggucaaccagaacgcccaggcccugaacacgcucgugaagcagcuguccagcaacuucggcgccaucuccagcgugcugaacgacauccucucccgccuggacaaggucgaggccgaggugcagaucgaccggcugaucaccgggcgccuccagagccugcagaccuacgugacccagcagcugauccgggcggccgagauccgcgccagcgccaaccucgccgcgaccaagauguccgagugcguccugggccagagcaagcggugcgacuucugcggcaagggguaccaccugauguccuucccccagagcgccccgcacggcguggucuuccuccacgugacguacguccccgcccaggagaagaacuucaccaccgcccccgcgaucugccacgacgggaaggcccacuucccccgcgagggcguguucguguccaacgggacccacugguucgucacgcagcggaacuucuacgagccgcagaucaucaccaccgacaacaccuucgugagcggcaacugcgacguggucaucggcaucgugaacaacacgguguacgacccccugcagcccgagcuggacuccggcgggggcgggagcgacaucaucaagcuccugaacgagcaggucaacaaggagaugcaguccagcaaccuguacauguccaugagcuccuggugcuacacccacagccucgacggcgccgggcuguuccuguucgaccacgccgcggaggaguacgagcacgccaagaagcucaucaucuuccugaacgagaacaacgugcccgugcagcugaccuccaucagcgccccggagcacaaguucgagggccucacgcagaucuuccagaaggccuacgagcacgagcagcacaucuccgagagcaucaacaacaucguggaccacgccaucaaguccaaggaccacgcgaccuucaacuuccugcagugguacgucgccgagcagcacgaggaggaggugcuguucaaggacauccucgacaagaucgagcugaucgggaacgagaaccacggccuguaccucgccgaccaguacgugaaggggaucgccaagagccgcaaguccugaggacuagucccuguucccagagcccacuuuuuuuucuuuuuuugaaauaaaauagccugucuuucagaucucaaaggcucuuuucagagccaccaaaaaaaaaaaaaaaaaaaaaaaaaaaaaaaaaaaaaaaaaaaaaaaaaaaaaaaaaaaaaaaaaaaaaaaaaaaaaaaaaaaaaaaaaaaaaaaaaaaaa

SEQ ID NO: 12442 - RNA, 4220 nt, Artificial Sequence
  SARS-CoV-2/Wuhan/WIV05/2019__EPI_ISL_402128 spike protein mRNA gc (1-1147)(T874C_S1055C) Ferritin construct
aggagagucccgcagucggcguccagcggcucugcuuguucgugugugugucguugcaggccuuauucaagcuuaccauguucguguuccugguccuccugccccuggugagcucccagugcgugaaccucaccacccgcacgcagcugccgcccgccuacaccaacagcuucacccggggcgucuacuaccccgacaagguguuccgcuccagcgugcugcacuccacccaggaccucuuccugcccuucuucagcaacgucacgugguuccacgccauccacguguccgggaccaacggcaccaagcgguucgacaacccggugcugcccuucaacgacggggucuacuucgcgagcaccgagaaguccaacaucauccgcggcuggaucuucgggacgacccucgacagcaagacccagucccugcugaucgugaacaacgccaccaacguggucaucaaggugugcgaguuccaguucugcaacgaccccuuccucggcguguacuaccacaagaacaacaagagcuggauggaguccgaguuccgggucuacagcuccgccaacaacugcacguucgaguacgugagccagcccuuccugauggaccuggagggcaagcaggggaacuucaagaaccuccgcgaguucguguucaagaacaucgacggcuacuucaagaucuacuccaagcacaccccgaucaaccugguccgggaccugccccagggguucagcgcccucgagccccugguggaccugcccaucggcaucaacaucacccgcuuccagacccuccuggcccugcaccgguccuaccucacgccgggggacagcagcuccggcuggaccgcgggcgccgccgccuacuacgugggguaccugcagccccgcaccuuccugcucaaguacaacgagaacggcaccaucacggacgcggucgacugcgcccuggacccccugagcgagaccaagugcacccucaaguccuucaccguggagaaggggaucuaccagacgagcaacuuccgggugcagcccaccgaguccaucguccgcuucccgaacaucaccaaccugugccccuucggcgagguguucaacgccacccgguucgccagcgucuacgccuggaaccgcaagcggaucuccaacugcguggcggacuacagcgugcuguacaacuccgccagcuucuccacguucaagugcuacggcgucagccccaccaagcucaacgaccugugcuucaccaacguguacgccgacuccuucgugauccgcggggacgagguccggcagaucgcccccggccagaccgggaagaucgccgacuacaacuacaagcugccggacgacuucacgggcugcgugaucgcguggaacagcaacaaccucgacuccaaggucgggggcaacuacaacuaccuguaccgccuguuccgcaagagcaaccucaagcccuucgagcgggacaucuccaccgagaucuaccaggccggcagcacccccugcaacgggguggagggcuucaacugcuacuucccccugcaguccuacggguuccagccgaccaacggcgugggguaccagcccuaccggguggucgugcugagcuucgagcuccugcacgcccccgccacggugugcggccccaagaaguccaccaaccuggucaagaacaagugcgugaacuucaacuucaacggccucaccgggaccggcgugcugaccgagagcaacaagaaguuccugccguuccagcaguucgggcgcgacaucgccgacacgaccgacgcgguccgcgacccccagacccuggagauccucgacaucacccccugcagcuucggcgggguguccgugaucacgccgggcaccaacaccagcaaccaggucgccgugcuguaccaggacgugaacugcaccgagguccccguggccauccacgccgaccagcugacgcccaccuggcggguguacuccaccggcagcaacgucuuccagacccgcgccgggugccucaucggcgcggagcacgugaacaacuccuacgagugcgacauccccaucggggccggcaucugcgccagcuaccagacgcagaccaacuccccgcggcgcgcccggagcguggcgucccagagcaucaucgccuacaccaugucccugggcgccgagaacagcgucgccuacuccaacaacagcaucgccauccccaccaacuucacgaucuccgugaccaccgagauccugcccgugagcaugaccaagacgagcgucgacugcaccauguacaucugcggggacuccaccgagugcagcaaccuccugcugcaguacggcuccuucugcacccagcucaaccgcgcgcugacggggaucgccguggagcaggacaagaacacccaggagguguucgcccaggucaagcagaucuacaagacgcccccgaucaaggacuucggcggguucaacuucagccagauccugcccgaccccuccaagcccagcaagcgguccuucaucgaggaccuccuguucaacaaggugacccuggccgacgccggcuucaucaagcaguacggcgacugccucggggacaucgcggcccgcgaccugaucugcgcccagaaguucaacggccugaccgugcucccgccccugcugaccgacgagaugaucgcccaguacugcagcgcccuccuggcggggaccaucacguccggcuggaccuucggggccggcgccgcccugcagauccccuucgcgaugcagauggccuaccgguucaacggcaucggggucacccagaacgugcucuacgagaaccagaagcugaucgccaaccaguucaacagcgccaucggcaagauccaggacucccugagcuccaccgccagcgcgcucgggaagcugcaggacguggucaaccagaacgcccaggcccugaacacgcucgugaagcagcuguccagcaacuucggcgccaucuccagcgugcugaacgacauccucucccgccuggacaaggucgaggccgaggugcagaucgaccggcugaucaccgggcgccuccagagccugcagaccuacgugacccagcagcugauccgggcggccgagauccgcgccagcgccaaccucgccgcgaccaagauguccgagugcguccugggccagagcaagcggguggacuucugcggcaagggguaccaccugauguccuucccccagugcgccccgcacggcguggucuuccuccacgugacguacguccccgcccaggagaagaacuucaccaccgcccccgcgaucugccacgacgggaaggcccacuucccccgcgagggcguguucguguccaacgggacccacugguucgucacgcagcggaacuucuacgagccgcagaucaucaccaccgacaacaccuucgugagcggcaacugcgacguggucaucggcaucgugaacaacacgguguacgacccccugcagcccgagcuggacuccggcgggggcgggagcgacaucaucaagcuccugaacgagcaggucaacaaggagaugcaguccagcaaccuguacauguccaugagcuccuggugcuacacccacagccucgacggcgccgggcuguuccuguucgaccacgccgcggaggaguacgagcacgccaagaagcucaucaucuuccugaacgagaacaacgugcccgugcagcugaccuccaucagcgccccggagcacaaguucgagggccucacgcagaucuuccagaaggccuacgagcacgagcagcacaucuccgagagcaucaacaacaucguggaccacgccaucaaguccaaggaccacgcgaccuucaacuuccugcagugguacgucgccgagcagcacgaggaggaggugcuguucaaggacauccucgacaagaucgagcugaucgggaacgagaaccacggccuguaccucgccgaccaguacgugaaggggaucgccaagagccgcaaguccugaggacuagucccuguucccagagcccacuuuuuuuucuuuuuuugaaauaaaauagccugucuuucagaucucaaaggcucuuuucagagccaccaaaaaaaaaaaaaaaaaaaaaaaaaaaaaaaaaaaaaaaaaaaaaaaaaaaaaaaaaaaaaaaaaaaaaaaaaaaaaaaaaaaaaaaaaaaaaaaaaaaaa

SEQ ID NO: 12443 - RNA, 3806 nt, Artificial Sequence
  SARS-CoV-2/Wuhan/WIV05/2019__EPI_ISL_402128 spike protein mRNA gc (1-1147) Foldon construct
aggagagucccgcagucggcguccagcggcucugcuuguucgugugugugucguugcaggccuuauucaagcuuaccauguucguguuccugguccuccugccccuggugagcucccagugcgugaaccucaccacccgcacgcagcugccgcccgccuacaccaacagcuucacccggggcgucuacuaccccgacaagguguuccgcuccagcgugcugcacuccacccaggaccucuuccugcccuucuucagcaacgucacgugguuccacgccauccacguguccgggaccaacggcaccaagcgguucgacaacccggugcugcccuucaacgacggggucuacuucgcgagcaccgagaaguccaacaucauccgcggcuggaucuucgggacgacccucgacagcaagacccagucccugcugaucgugaacaacgccaccaacguggucaucaaggugugcgaguuccaguucugcaacgaccccuuccucggcguguacuaccacaagaacaacaagagcuggauggaguccgaguuccgggucuacagcuccgccaacaacugcacguucgaguacgugagccagcccuuccugauggaccuggagggcaagcaggggaacuucaagaaccuccgcgaguucguguucaagaacaucgacggcuacuucaagaucuacuccaagcacaccccgaucaaccugguccgggaccugccccagggguucagcgcccucgagccccugguggaccugcccaucggcaucaacaucacccgcuuccagacccuccuggcccugcaccgguccuaccucacgccgggggacagcagcuccggcuggaccgcgggcgccgccgccuacuacgugggguaccugcagccccgcaccuuccugcucaaguacaacgagaacggcaccaucacggacgcggucgacugcgcccuggacccccugagcgagaccaagugcacccucaaguccuucaccguggagaaggggaucuaccagacgagcaacuuccgggugcagcccaccgaguccaucguccgcuucccgaacaucaccaaccugugccccuucggcgagguguucaacgccacccgguucgccagcgucuacgccuggaaccgcaagcggaucuccaacugcguggcggacuacagcgugcuguacaacuccgccagcuucuccacguucaagugcuacggcgucagccccaccaagcucaacgaccugugcuucaccaacguguacgccgacuccuucgugauccgcggggacgagguccggcagaucgcccccggccagaccgggaagaucgccgacuacaacuacaagcugccggacgacuucacgggcugcgugaucgcguggaacagcaacaaccucgacuccaaggucgggggcaacuacaacuaccuguaccgccuguuccgcaagagcaaccucaagcccuucgagcgggacaucuccaccgagaucuaccaggccggcagcacccccugcaacgggguggagggcuucaacugcuacuucccccugcaguccuacggguuccagccgaccaacggcgugggguaccagcccuaccggguggucgugcugagcuucgagcuccugcacgcccccgccacggugugcggccccaagaaguccaccaaccuggucaagaacaagugcgugaacuucaacuucaacggccucaccgggaccggcgugcugaccgagagcaacaagaaguuccugccguuccagcaguucgggcgcgacaucgccgacacgaccgacgcgguccgcgacccccagacccuggagauccucgacaucacccccugcagcuucggcgggguguccgugaucacgccgggcaccaacaccagcaaccaggucgccgugcuguaccaggacgugaacugcaccgagguccccguggccauccacgccgaccagcugacgcccaccuggcggguguacuccaccggcagcaacgucuuccagacccgcgccgggugccucaucggcgcggagcacgugaacaacuccuacgagugcgacauccccaucggggccggcaucugcgccagcuaccagacgcagaccaacuccccgcggcgcgcccggagcguggcgucccagagcaucaucgccuacaccaugucccugggcgccgagaacagcgucgccuacuccaacaacagcaucgccauccccaccaacuucacgaucuccgugaccaccgagauccugcccgugagcaugaccaagacgagcgucgacugcaccauguacaucugcggggacuccaccgagugcagcaaccuccugcugcaguacggcuccuucugcacccagcucaaccgcgcgcugacggggaucgccguggagcaggacaagaacacccaggagguguucgcccaggucaagcagaucuacaagacgcccccgaucaaggacuucggcggguucaacuucagccagauccugcccgaccccuccaagcccagcaagcgguccuucaucgaggaccuccuguucaacaaggugacccuggccgacgccggcuucaucaagcaguacggcgacugccucggggacaucgcggcccgcgaccugaucugcgcccagaaguucaacggccugaccgugcucccgccccugcugaccgacgagaugaucgcccaguacaccagcgcccuccuggcggggaccaucacguccggcuggaccuucggggccggcgccgcccugcagauccccuucgcgaugcagauggccuaccgguucaacggcaucggggucacccagaacgugcucuacgagaaccagaagcugaucgccaaccaguucaacagcgccaucggcaagauccaggacucccugagcuccaccgccagcgcgcucgggaagcugcaggacguggucaaccagaacgcccaggcccugaacacgcucgugaagcagcuguccagcaacuucggcgccaucuccagcgugcugaacgacauccucucccgccuggacaaggucgaggccgaggugcagaucgaccggcugaucaccgggcgccuccagagccugcagaccuacgugacccagcagcugauccgggcggccgagauccgcgccagcgccaaccucgccgcgaccaagauguccgagugcguccugggccagagcaagcggguggacuucugcggcaagggguaccaccugauguccuucccccagagcgccccgcacggcguggucuuccuccacgugacguacguccccgcccaggagaagaacuucaccaccgcccccgcgaucugccacgacgggaaggcccacuucccccgcgagggcguguucguguccaacgggacccacugguucgucacgcagcggaacuucuacgagccgcagaucaucaccaccgacaacaccuucgugagcggcaacugcgacguggucaucggcaucgugaacaacacgguguacgacccccugcagcccgagcuggacuccggcgggagcggcuacauccccgaggccccgcgcgacgggcaggccuacgugcggaaggacggcgaguggguccugcucagcaccuuccugugaggacuagucccuguucccagagcccacuuuuuuuucuuuuuuugaaauaaaauagccugucuuucagaucucaaaggcucuuuucagagccaccaaaaaaaaaaaaaaaaaaaaaaaaaaaaaaaaaaaaaaaaaaaaaaaaaaaaaaaaaaaaaaaaaaaaaaaaaaaaaaaaaaaaaaaaaaaaaaaaaaaaa

SEQ ID NO: 12444 - RNA, 3806 nt, Artificial Sequence
  SARS-CoV-2/Wuhan/WIV05/2019__EPI_ISL_402128 spike protein mRNA gc (1-1147)(K986P_V987P) Foldon construct
aggagagucccgcagucggcguccagcggcucugcuuguucgugugugugucguugcaggccuuauucaagcuuaccauguucguguuccugguccuccugccccuggugagcucccagugcgugaaccucaccacccgcacgcagcugccgcccgccuacaccaacagcuucacccggggcgucuacuaccccgacaagguguuccgcuccagcgugcugcacuccacccaggaccucuuccugcccuucuucagcaacgucacgugguuccacgccauccacguguccgggaccaacggcaccaagcgguucgacaacccggugcugcccuucaacgacggggucuacuucgcgagcaccgagaaguccaacaucauccgcggcuggaucuucgggacgacccucgacagcaagacccagucccugcugaucgugaacaacgccaccaacguggucaucaaggugugcgaguuccaguucugcaacgaccccuuccucggcguguacuaccacaagaacaacaagagcuggauggaguccgaguuccgggucuacagcuccgccaacaacugcacguucgaguacgugagccagcccuuccugauggaccuggagggcaagcaggggaacuucaagaaccuccgcgaguucguguucaagaacaucgacggcuacuucaagaucuacuccaagcacaccccgaucaaccugguccgggaccugccccagggguucagcgcccucgagccccugguggaccugcccaucggcaucaacaucacccgcuuccagacccuccuggcccugcaccgguccuaccucacgccgggggacagcagcuccggcuggaccgcgggcgccgccgccuacuacgugggguaccugcagccccgcaccuuccugcucaaguacaacgagaacggcaccaucacggacgcggucgacugcgcccuggacccccugagcgagaccaagugcacccucaaguccuucaccguggagaaggggaucuaccagacgagcaacuuccgggugcagcccaccgaguccaucguccgcuucccgaacaucaccaaccugugccccuucggcgagguguucaacgccacccgguucgccagcgucuacgccuggaaccgcaagcggaucuccaacugcguggcggacuacagcgugcuguacaacuccgccagcuucuccacguucaagugcuacggcgucagccccaccaagcucaacgaccugugcuucaccaacguguacgccgacuccuucgugauccgcggggacgagguccggcagaucgcccccggccagaccgggaagaucgccgacuacaacuacaagcugccggacgacuucacgggcugcgugaucgcguggaacagcaacaaccucgacuccaaggucgggggcaacuacaacuaccuguaccgccuguuccgcaagagcaaccucaagcccuucgagcgggacaucuccaccgagaucuaccaggccggcagcacccccugcaacgggguggagggcuucaacugcuacuucccccugcaguccuacggguuccagccgaccaacggcgugggguaccagcccuaccggguggucgugcugagcuucgagcuccugcacgcccccgccacggugugcggccccaagaaguccaccaaccuggucaagaacaagugcgugaacuucaacuucaacggccucaccgggaccggcgugcugaccgagagcaacaagaaguuccugccguuccagcaguucgggcgcgacaucgccgacacgaccgacgcgguccgcgacccccagacccuggagauccucgacaucacccccugcagcuucggcgggguguccgugaucacgccgggcaccaacaccagcaaccaggucgccgugcuguaccaggacgugaacugcaccgagguccccguggccauccacgccgaccagcugacgcccaccuggcggguguacuccaccggcagcaacgucuuccagacccgcgccgggugccucaucggcgcggagcacgugaacaacuccuacgagugcgacauccccaucggggccggcaucugcgccagcuaccagacgcagaccaacuccccgcggcgcgcccggagcguggcgucccagagcaucaucgccuacaccaugucccugggcgccgagaacagcgucgccuacuccaacaacagcaucgccauccccaccaacuucacgaucuccgugaccaccgagauccugcccgugagcaugaccaagacgagcgucgacugcaccauguacaucugcggggacuccaccgagugcagcaaccuccugcugcaguacggcuccuucugcacccagcucaaccgcgcgcugacggggaucgccguggagcaggacaagaacacccaggagguguucgcccaggucaagcagaucuacaagacgcccccgaucaaggacuucggcggguucaacuucagccagauccugcccgaccccuccaagcccagcaagcgguccuucaucgaggaccuccuguucaacaaggugacccuggccgacgccggcuucaucaagcaguacggcgacugccucggggacaucgcggcccgcgaccugaucugcgcccagaaguucaacggccugaccgugcucccgccccugcugaccgacgagaugaucgcccaguacaccagcgcccuccuggcggggaccaucacguccggcuggaccuucggggccggcgccgcccugcagauccccuucgcgaugcagauggccuaccgguucaacggcaucggggucacccagaacgugcucuacgagaaccagaagcugaucgccaaccaguucaacagcgccaucggcaagauccaggacucccugagcuccaccgccagcgcgcucgggaagcugcaggacguggucaaccagaacgcccaggcccugaacacgcucgugaagcagcuguccagcaacuucggcgccaucuccagcgugcugaacgacauccucucccgccuggacccgcccgaggccgaggugcagaucgaccggcugaucaccgggcgccuccagagccugcagaccuacgugacccagcagcugauccgggcggccgagauccgcgccagcgccaaccucgccgcgaccaagauguccgagugcguccugggccagagcaagcggguggacuucugcggcaagggguaccaccugauguccuucccccagagcgccccgcacggcguggucuuccuccacgugacguacguccccgcccaggagaagaacuucaccaccgcccccgcgaucugccacgacgggaaggcccacuucccccgcgagggcguguucguguccaacgggacccacugguucgucacgcagcggaacuucuacgagccgcagaucaucaccaccgacaacaccuucgugagcggcaacugcgacguggucaucggcaucgugaacaacacgguguacgacccccugcagcccgagcuggacuccggcgggagcggcuacauccccgaggccccgcgcgacgggcaggccuacgugcggaaggacggcgaguggguccugcucagcaccuuccugugaggacuagucccuguucccagagcccacuuuuuuuucuuuuuuugaaauaaaauagccugucuuucagaucucaaaggcucuuuucagagccaccaaaaaaaaaaaaaaaaaaaaaaaaaaaaaaaaaaaaaaaaaaaaaaaaaaaaaaaaaaaaaaaaaaaaaaaaaaaaaaaaaaaaaaaaaaaaaaaaaaaaa

SEQ ID NO: 12445 - RNA, 3806 nt, Artificial Sequence
  SARS-CoV-2/Wuhan/WIV05/2019__EPI_ISL_402128 spike protein mRNA gc (1-1147)(K986P_V987P_T887WN_A1020W) Foldon construct
aggagagucccgcagucggcguccagcggcucugcuuguucgugugugugucguugcaggccuuauucaagcuuaccauguucguguuccugguccuccugccccuggugagcucccagugcgugaaccucaccacccgcacgcagcugccgcccgccuacaccaacagcuucacccggggcgucuacuaccccgacaagguguuccgcuccagcgugcugcacuccacccaggaccucuuccugcccuucuucagcaacgucacgugguuccacgccauccacguguccgggaccaacggcaccaagcgguucgacaacccggugcugcccuucaacgacggggucuacuucgcgagcaccgagaaguccaacaucauccgcggcuggaucuucgggacgacccucgacagcaagacccagucccugcugaucgugaacaacgccaccaacguggucaucaaggugugcgaguuccaguucugcaacgaccccuuccucggcguguacuaccacaagaacaacaagagcuggauggaguccgaguuccgggucuacagcuccgccaacaacugcacguucgaguacgugagccagcccuuccugauggaccuggagggcaagcaggggaacuucaagaaccuccgcgaguucguguucaagaacaucgacggcuacuucaagaucuacuccaagcacaccccgaucaaccugguccgggaccugccccagggguucagcgcccucgagccccugguggaccugcccaucggcaucaacaucacccgcuuccagacccuccuggcccugcaccgguccuaccucacgccgggggacagcagcuccggcuggaccgcgggcgccgccgccuacuacgugggguaccugcagccccgcaccuuccugcucaaguacaacgagaacggcaccaucacggacgcggucgacugcgcccuggacccccugagcgagaccaagugcacccucaaguccuucaccguggagaaggggaucuaccagacgagcaacuuccgggugcagcccaccgaguccaucguccgcuucccgaacaucaccaaccugugccccuucggcgagguguucaacgccacccgguucgccagcgucuacgccuggaaccgcaagcggaucuccaacugcguggcggacuacagcgugcuguacaacuccgccagcuucuccacguucaagugcuacggcgucagccccaccaagcucaacgaccugugcuucaccaacguguacgccgacuccuucgugauccgcggggacgagguccggcagaucgcccccggccagaccgggaagaucgccgacuacaacuacaagcugccggacgacuucacgggcugcgugaucgcguggaacagcaacaaccucgacuccaaggucgggggcaacuacaacuaccuguaccgccuguuccgcaagagcaaccucaagcccuucgagcgggacaucuccaccgagaucuaccaggccggcagcacccccugcaacgggguggagggcuucaacugcuacuucccccugcaguccuacggguuccagccgaccaacggcgugggguaccagcccuaccggguggucgugcugagcuucgagcuccugcacgcccccgccacggugugcggccccaagaaguccaccaaccuggucaagaacaagugcgugaacuucaacuucaacggccucaccgggaccggcgugcugaccgagagcaacaagaaguuccugccguuccagcaguucgggcgcgacaucgccgacacgaccgacgcgguccgcgacccccagacccuggagauccucgacaucacccccugcagcuucggcgggguguccgugaucacgccgggcaccaacaccagcaaccaggucgccgugcuguaccaggacgugaacugcaccgagguccccguggccauccacgccgaccagcugacgcccaccuggcggguguacuccaccggcagcaacgucuuccagacccgcgccgggugccucaucggcgcggagcacgugaacaacuccuacgagugcgacauccccaucggggccggcaucugcgccagcuaccagacgcagaccaacuccccgcggcgcgcccggagcguggcgucccagagcaucaucgccuacaccaugucccugggcgccgagaacagcgucgccuacuccaacaacagcaucgccauccccaccaacuucacgaucuccgugaccaccgagauccugcccgugagcaugaccaagacgagcgucgacugcaccauguacaucugcggggacuccaccgagugcagcaaccuccugcugcaguacggcuccuucugcacccagcucaaccgcgcgcugacggggaucgccguggagcaggacaagaacacccaggagguguucgcccaggucaagcagaucuacaagacgcccccgaucaaggacuucggcggguucaacuucagccagauccugcccgaccccuccaagcccagcaagcgguccuucaucgaggaccuccuguucaacaaggugacccuggccgacgccggcuucaucaagcaguacggcgacugccucggggacaucgcggcccgcgaccugaucugcgcccagaaguucaacggccugaccgugcucccgccccugcugaccgacgagaugaucgcccaguacaccagcgcccuccuggcggggaccaucacguccggcuggugguucggggccggcgccgcccugcagauccccuucgcgaugcagauggccuaccgguucaacggcaucggggucacccagaacgugcucuacgagaaccagaagcugaucgccaaccaguucaacagcgccaucggcaagauccaggacucccugagcuccaccgccagcgcgcucgggaagcugcaggacguggucaaccagaacgcccaggcccugaacacgcucgugaagcagcuguccagcaacuucggcgccaucuccagcgugcugaacgacauccucucccgccuggacccgcccgaggccgaggugcagaucgaccggcugaucaccgggcgccuccagagccugcagaccuacgugacccagcagcugauccgggcggccgagauccgcuggagcgccaaccucgccgcgaccaagauguccgagugcguccugggccagagcaagcggguggacuucugcggcaagggguaccaccugauguccuucccccagagcgccccgcacggcguggucuuccuccacgugacguacguccccgcccaggagaagaacuucaccaccgcccccgcgaucugccacgacgggaaggcccacuucccccgcgagggcguguucguguccaacgggacccacugguucgucacgcagcggaacuucuacgagccgcagaucaucaccaccgacaacaccuucgugagcggcaacugcgacguggucaucggcaucgugaacaacacgguguacgacccccugcagcccgagcuggacuccggcgggagcggcuacauccccgaggccccgcgcgacgggcaggccuacgugcggaaggacggcgaguggguccugcucagcaccuuccugugaggacuagucccuguucccagagcccacuuuuuuuucuuuuuuugaaauaaaauagccugucuuucagaucucaaaggcucuuuucagagccaccaaaaaaaaaaaaaaaaaaaaaaaaaaaaaaaaaaaaaaaaaaaaaaaaaaaaaaaaaaaaaaaaaaaaaaaaaaaaaaaaaaaaaaaaaaaaaaaaaaaaa

SEQ ID NO: 12446 - RNA, 3806 nt, Artificial Sequence
  SARS-CoV-2/Wuhan/WIV05/2019__EPI_ISL_402128 spike protein mRNA gc (1-1147)(K986P_V987P_P1069F) Foldon construct
aggagagucccgcagucggcguccagcggcucugcuuguucgugugugugucguugcaggccuuauucaagcuuaccauguucguguuccugguccuccugccccuggugagcucccagugcgugaaccucaccacccgcacgcagcugccgcccgccuacaccaacagcuucacccggggcgucuacuaccccgacaagguguuccgcuccagcgugcugcacuccacccaggaccucuuccugcccuucuucagcaacgucacgugguuccacgccauccacguguccgggaccaacggcaccaagcgguucgacaacccggugcugcccuucaacgacggggucuacuucgcgagcaccgagaaguccaacaucauccgcggcuggaucuucgggacgacccucgacagcaagacccagucccugcugaucgugaacaacgccaccaacguggucaucaaggugugcgaguuccaguucugcaacgaccccuuccucggcguguacuaccacaagaacaacaagagcuggauggaguccgaguuccgggucuacagcuccgccaacaacugcacguucgaguacgugagccagcccuuccugauggaccuggagggcaagcaggggaacuucaagaaccuccgcgaguucguguucaagaacaucgacggcuacuucaagaucuacuccaagcacaccccgaucaaccugguccgggaccugccccagggguucagcgcccucgagccccugguggaccugcccaucggcaucaacaucacccgcuuccagacccuccuggcccugcaccgguccuaccucacgccgggggacagcagcuccggcuggaccgcgggcgccgccgccuacuacgugggguaccugcagccccgcaccuuccugcucaaguacaacgagaacggcaccaucacggacgcggucgacugcgcccuggacccccugagcgagaccaagugcacccucaaguccuucaccguggagaaggggaucuaccagacgagcaacuuccgggugcagcccaccgaguccaucguccgcuucccgaacaucaccaaccugugccccuucggcgagguguucaacgccacccgguucgccagcgucuacgccuggaaccgcaagcggaucuccaacugcguggcggacuacagcgugcuguacaacuccgccagcuucuccacguucaagugcuacggcgucagccccaccaagcucaacgaccugugcuucaccaacguguacgccgacuccuucgugauccgcggggacgagguccggcagaucgcccccggccagaccgggaagaucgccgacuacaacuacaagcugccggacgacuucacgggcugcgugaucgcguggaacagcaacaaccucgacuccaaggucgggggcaacuacaacuaccuguaccgccuguuccgcaagagcaaccucaagcccuucgagcgggacaucuccaccgagaucuaccaggccggcagcacccccugcaacgggguggagggcuucaacugcuacuucccccugcaguccuacggguuccagccgaccaacggcgugggguaccagcccuaccggguggucgugcugagcuucgagcuccugcacgcccccgccacggugugcggccccaagaaguccaccaaccuggucaagaacaagugcgugaacuucaacuucaacggccucaccgggaccggcgugcugaccgagagcaacaagaaguuccugccguuccagcaguucgggcgcgacaucgccgacacgaccgacgcgguccgcgacccccagacccuggagauccucgacaucacccccugcagcuucggcgggguguccgugaucacgccgggcaccaacaccagcaaccaggucgccgugcuguaccaggacgugaacugcaccgagguccccguggccauccacgccgaccagcugacgcccaccuggcggguguacuccaccggcagcaacgucuuccagacccgcgccgggugccucaucggcgcggagcacgugaacaacuccuacgagugcgacauccccaucggggccggcaucugcgccagcuaccagacgcagaccaacuccccgcggcgcgcccggagcguggcgucccagagcaucaucgccuacaccaugucccugggcgccgagaacagcgucgccuacuccaacaacagcaucgccauccccaccaacuucacgaucuccgugaccaccgagauccugcccgugagcaugaccaagacgagcgucgacugcaccauguacaucugcggggacuccaccgagugcagcaaccuccugcugcaguacggcuccuucugcacccagcucaaccgcgcgcugacggggaucgccguggagcaggacaagaacacccaggagguguucgcccaggucaagcagaucuacaagacgcccccgaucaaggacuucggcggguucaacuucagccagauccugcccgaccccuccaagcccagcaagcgguccuucaucgaggaccuccuguucaacaaggugacccuggccgacgccggcuucaucaagcaguacggcgacugccucggggacaucgcggcccgcgaccugaucugcgcccagaaguucaacggccugaccgugcucccgccccugcugaccgacgagaugaucgcccaguacaccagcgcccuccuggcggggaccaucacguccggcuggaccuucggggccggcgccgcccugcagauccccuucgcgaugcagauggccuaccgguucaacggcaucggggucacccagaacgugcucuacgagaaccagaagcugaucgccaaccaguucaacagcgccaucggcaagauccaggacucccugagcuccaccgccagcgcgcucgggaagcugcaggacguggucaaccagaacgcccaggcccugaacacgcucgugaagcagcuguccagcaacuucggcgccaucuccagcgugcugaacgacauccucucccgccuggacccgcccgaggccgaggugcagaucgaccggcugaucaccgggcgccuccagagccugcagaccuacgugacccagcagcugauccgggcggccgagauccgcgccagcgccaaccucgccgcgaccaagauguccgagugcguccugggccagagcaagcggguggacuucugcggcaagggguaccaccugauguccuucccccagagcgccccgcacggcguggucuuccuccacgugacguacgucuucgcccaggagaagaacuucaccaccgcccccgcgaucugccacgacgggaaggcccacuucccccgcgagggcguguucguguccaacgggacccacugguucgucacgcagcggaacuucuacgagccgcagaucaucaccaccgacaacaccuucgugagcggcaacugcgacguggucaucggcaucgugaacaacacgguguacgacccccugcagcccgagcuggacuccggcgggagcggcuacauccccgaggccccgcgcgacgggcaggccuacgugcggaaggacggcgaguggguccugcucagcaccuuccugugaggacuagucccuguucccagagcccacuuuuuuuucuuuuuuugaaauaaaauagccugucuuucagaucucaaaggcucuuuucagagccaccaaaaaaaaaaaaaaaaaaaaaaaaaaaaaaaaaaaaaaaaaaaaaaaaaaaaaaaaaaaaaaaaaaaaaaaaaaaaaaaaaaaaaaaaaaaaaaaaaaaaa

SEQ ID NO: 12447 - RNA, 3806 nt, Artificial Sequence
  SARS-CoV-2/Wuhan/WIV05/2019__EPI_ISL_402128 spike protein mRNA gc (1-1147)(K986P_V987P_ H1048Q_H1064N_ H1083N_H1101N) Foldon construct
aggagagucccgcagucggcguccagcggcucugcuuguucgugugugugucguugcaggccuuauucaagcuuaccauguucguguuccugguccuccugccccuggugagcucccagugcgugaaccucaccacccgcacgcagcugccgcccgccuacaccaacagcuucacccggggcgucuacuaccccgacaagguguuccgcuccagcgugcugcacuccacccaggaccucuuccugcccuucuucagcaacgucacgugguuccacgccauccacguguccgggaccaacggcaccaagcgguucgacaacccggugcugcccuucaacgacggggucuacuucgcgagcaccgagaaguccaacaucauccgcggcuggaucuucgggacgacccucgacagcaagacccagucccugcugaucgugaacaacgccaccaacguggucaucaaggugugcgaguuccaguucugcaacgaccccuuccucggcguguacuaccacaagaacaacaagagcuggauggaguccgaguuccgggucuacagcuccgccaacaacugcacguucgaguacgugagccagcccuuccugauggaccuggagggcaagcaggggaacuucaagaaccuccgcgaguucguguucaagaacaucgacggcuacuucaagaucuacuccaagcacaccccgaucaaccugguccgggaccugccccagggguucagcgcccucgagccccugguggaccugcccaucggcaucaacaucacccgcuuccagacccuccuggcccugcaccgguccuaccucacgccgggggacagcagcuccggcuggaccgcgggcgccgccgccuacuacgugggguaccugcagccccgcaccuuccugcucaaguacaacgagaacggcaccaucacggacgcggucgacugcgcccuggacccccugagcgagaccaagugcacccucaaguccuucaccguggagaaggggaucuaccagacgagcaacuuccgggugcagcccaccgaguccaucguccgcuucccgaacaucaccaaccugugccccuucggcgagguguucaacgccacccgguucgccagcgucuacgccuggaaccgcaagcggaucuccaacugcguggcggacuacagcgugcuguacaacuccgccagcuucuccacguucaagugcuacggcgucagccccaccaagcucaacgaccugugcuucaccaacguguacgccgacuccuucgugauccgcggggacgagguccggcagaucgcccccggccagaccgggaagaucgccgacuacaacuacaagcugccggacgacuucacgggcugcgugaucgcguggaacagcaacaaccucgacuccaaggucgggggcaacuacaacuaccuguaccgccuguuccgcaagagcaaccucaagcccuucgagcgggacaucuccaccgagaucuaccaggccggcagcacccccugcaacgggguggagggcuucaacugcuacuucccccugcaguccuacggguuccagccgaccaacggcgugggguaccagcccuaccggguggucgugcugagcuucgagcuccugcacgcccccgccacggugugcggccccaagaaguccaccaaccuggucaagaacaagugcgugaacuucaacuucaacggccucaccgggaccggcgugcugaccgagagcaacaagaaguuccugccguuccagcaguucgggcgcgacaucgccgacacgaccgacgcgguccgcgacccccagacccuggagauccucgacaucacccccugcagcuucggcgggguguccgugaucacgccgggcaccaacaccagcaaccaggucgccgugcuguaccaggacgugaacugcaccgagguccccguggccauccacgccgaccagcugacgcccaccuggcggguguacuccaccggcagcaacgucuuccagacccgcgccgggugccucaucggcgcggagcacgugaacaacuccuacgagugcgacauccccaucggggccggcaucugcgccagcuaccagacgcagaccaacuccccgcggcgcgcccggagcguggcgucccagagcaucaucgccuacaccaugucccugggcgccgagaacagcgucgccuacuccaacaacagcaucgccauccccaccaacuucacgaucuccgugaccaccgagauccugcccgugagcaugaccaagacgagcgucgacugcaccauguacaucugcggggacuccaccgagugcagcaaccuccugcugcaguacggcuccuucugcacccagcucaaccgcgcgcugacggggaucgccguggagcaggacaagaacacccaggagguguucgcccaggucaagcagaucuacaagacgcccccgaucaaggacuucggcggguucaacuucagccagauccugcccgaccccuccaagcccagcaagcgguccuucaucgaggaccuccuguucaacaaggugacccuggccgacgccggcuucaucaagcaguacggcgacugccucggggacaucgcggcccgcgaccugaucugcgcccagaaguucaacggccugaccgugcucccgccccugcugaccgacgagaugaucgcccaguacaccagcgcccuccuggcggggaccaucacguccggcuggaccuucggggccggcgccgcccugcagauccccuucgcgaugcagauggccuaccgguucaacggcaucggggucacccagaacgugcucuacgagaaccagaagcugaucgccaaccaguucaacagcgccaucggcaagauccaggacucccugagcuccaccgccagcgcgcucgggaagcugcaggacguggucaaccagaacgcccaggcccugaacacgcucgugaagcagcuguccagcaacuucggcgccaucuccagcgugcugaacgacauccucucccgccuggacccgcccgaggccgaggugcagaucgaccggcugaucaccgggcgccuccagagccugcagaccuacgugacccagcagcugauccgggcggccgagauccgcgccagcgccaaccucgccgcgaccaagauguccgagugcguccugggccagagcaagcggguggacuucugcggcaagggguaccagcugauguccuucccccagagcgccccgcacggcguggucuuccucaacgugacguacguccccgcccaggagaagaacuucaccaccgcccccgcgaucugcaacgacgggaaggcccacuucccccgcgagggcguguucguguccaacgggaccaacugguucgucacgcagcggaacuucuacgagccgcagaucaucaccaccgacaacaccuucgugagcggcaacugcgacguggucaucggcaucgugaacaacacgguguacgacccccugcagcccgagcuggacuccggcgggagcggcuacauccccgaggccccgcgcgacgggcaggccuacgugcggaaggacggcgaguggguccugcucagcaccuuccugugaggacuagucccuguucccagagcccacuuuuuuuucuuuuuuugaaauaaaauagccugucuuucagaucucaaaggcucuuuucagagccaccaaaaaaaaaaaaaaaaaaaaaaaaaaaaaaaaaaaaaaaaaaaaaaaaaaaaaaaaaaaaaaaaaaaaaaaaaaaaaaaaaaaaaaaaaaaaaaaaaaaaa

SEQ ID NO: 12448 - RNA, 3806 nt, Artificial Sequence
  SARS-CoV-2/Wuhan/WIV05/2019__EPI_ISL_402128 spike protein mRNA gc (1-1147)(I712C_T1077C) Foldon construct
aggagagucccgcagucggcguccagcggcucugcuuguucgugugugugucguugcaggccuuauucaagcuuaccauguucguguuccugguccuccugccccuggugagcucccagugcgugaaccucaccacccgcacgcagcugccgcccgccuacaccaacagcuucacccggggcgucuacuaccccgacaagguguuccgcuccagcgugcugcacuccacccaggaccucuuccugcccuucuucagcaacgucacgugguuccacgccauccacguguccgggaccaacggcaccaagcgguucgacaacccggugcugcccuucaacgacggggucuacuucgcgagcaccgagaaguccaacaucauccgcggcuggaucuucgggacgacccucgacagcaagacccagucccugcugaucgugaacaacgccaccaacguggucaucaaggugugcgaguuccaguucugcaacgaccccuuccucggcguguacuaccacaagaacaacaagagcuggauggaguccgaguuccgggucuacagcuccgccaacaacugcacguucgaguacgugagccagcccuuccugauggaccuggagggcaagcaggggaacuucaagaaccuccgcgaguucguguucaagaacaucgacggcuacuucaagaucuacuccaagcacaccccgaucaaccugguccgggaccugccccagggguucagcgcccucgagccccugguggaccugcccaucggcaucaacaucacccgcuuccagacccuccuggcccugcaccgguccuaccucacgccgggggacagcagcuccggcuggaccgcgggcgccgccgccuacuacgugggguaccugcagccccgcaccuuccugcucaaguacaacgagaacggcaccaucacggacgcggucgacugcgcccuggacccccugagcgagaccaagugcacccucaaguccuucaccguggagaaggggaucuaccagacgagcaacuuccgggugcagcccaccgaguccaucguccgcuucccgaacaucaccaaccugugccccuucggcgagguguucaacgccacccgguucgccagcgucuacgccuggaaccgcaagcggaucuccaacugcguggcggacuacagcgugcuguacaacuccgccagcuucuccacguucaagugcuacggcgucagccccaccaagcucaacgaccugugcuucaccaacguguacgccgacuccuucgugauccgcggggacgagguccggcagaucgcccccggccagaccgggaagaucgccgacuacaacuacaagcugccggacgacuucacgggcugcgugaucgcguggaacagcaacaaccucgacuccaaggucgggggcaacuacaacuaccuguaccgccuguuccgcaagagcaaccucaagcccuucgagcgggacaucuccaccgagaucuaccaggccggcagcacccccugcaacgggguggagggcuucaacugcuacuucccccugcaguccuacggguuccagccgaccaacggcgugggguaccagcccuaccggguggucgugcugagcuucgagcuccugcacgcccccgccacggugugcggccccaagaaguccaccaaccuggucaagaacaagugcgugaacuucaacuucaacggccucaccgggaccggcgugcugaccgagagcaacaagaaguuccugccguuccagcaguucgggcgcgacaucgccgacacgaccgacgcgguccgcgacccccagacccuggagauccucgacaucacccccugcagcuucggcgggguguccgugaucacgccgggcaccaacaccagcaaccaggucgccgugcuguaccaggacgugaacugcaccgagguccccguggccauccacgccgaccagcugacgcccaccuggcggguguacuccaccggcagcaacgucuuccagacccgcgccgggugccucaucggcgcggagcacgugaacaacuccuacgagugcgacauccccaucggggccggcaucugcgccagcuaccagacgcagaccaacuccccgcggcgcgcccggagcguggcgucccagagcaucaucgccuacaccaugucccugggcgccgagaacagcgucgccuacuccaacaacagcugcgccauccccaccaacuucacgaucuccgugaccaccgagauccugcccgugagcaugaccaagacgagcgucgacugcaccauguacaucugcggggacuccaccgagugcagcaaccuccugcugcaguacggcuccuucugcacccagcucaaccgcgcgcugacggggaucgccguggagcaggacaagaacacccaggagguguucgcccaggucaagcagaucuacaagacgcccccgaucaaggacuucggcggguucaacuucagccagauccugcccgaccccuccaagcccagcaagcgguccuucaucgaggaccuccuguucaacaaggugacccuggccgacgccggcuucaucaagcaguacggcgacugccucggggacaucgcggcccgcgaccugaucugcgcccagaaguucaacggccugaccgugcucccgccccugcugaccgacgagaugaucgcccaguacaccagcgcccuccuggcggggaccaucacguccggcuggaccuucggggccggcgccgcccugcagauccccuucgcgaugcagauggccuaccgguucaacggcaucggggucacccagaacgugcucuacgagaaccagaagcugaucgccaaccaguucaacagcgccaucggcaagauccaggacucccugagcuccaccgccagcgcgcucgggaagcugcaggacguggucaaccagaacgcccaggcccugaacacgcucgugaagcagcuguccagcaacuucggcgccaucuccagcgugcugaacgacauccucucccgccuggacaaggucgaggccgaggugcagaucgaccggcugaucaccgggcgccuccagagccugcagaccuacgugacccagcagcugauccgggcggccgagauccgcgccagcgccaaccucgccgcgaccaagauguccgagugcguccugggccagagcaagcggguggacuucugcggcaagggguaccaccugauguccuucccccagagcgccccgcacggcguggucuuccuccacgugacguacguccccgcccaggagaagaacuucaccugcgcccccgcgaucugccacgacgggaaggcccacuucccccgcgagggcguguucguguccaacgggacccacugguucgucacgcagcggaacuucuacgagccgcagaucaucaccaccgacaacaccuucgugagcggcaacugcgacguggucaucggcaucgugaacaacacgguguacgacccccugcagcccgagcuggacuccggcgggagcggcuacauccccgaggccccgcgcgacgggcaggccuacgugcggaaggacggcgaguggguccugcucagcaccuuccugugaggacuagucccuguucccagagcccacuuuuuuuucuuuuuuugaaauaaaauagccugucuuucagaucucaaaggcucuuuucagagccaccaaaaaaaaaaaaaaaaaaaaaaaaaaaaaaaaaaaaaaaaaaaaaaaaaaaaaaaaaaaaaaaaaaaaaaaaaaaaaaaaaaaaaaaaaaaaaaaaaaaaa
